United States Patent Application Publication US 2017/0114356 A1 - sequence listing, part 112

SEQ ID NO: 210481 - DNA, 2799 bp, Zea Mays
caagtatactatttttgagtggtatatataattctttgagagtctataaatcaatcacatagtttgactgggaaatggggttcagcttaacaaaaaaagaggtggcagtagtcgtggagatcaaactaaaaaaaatattgaattgcagtgtctggttcatagccgctgaaaccaagatagccgtggcgttacatcaagtacttagggagtctttgaatgcactagtgttaatagttagcgactaaaattagctggagacatccaaacaccctagctaatagttcaaatattagctatttttagtaaattggttaatagttagctagctaattccactagcaattttttagccaactaactattagctctagtacattcaaatacccccttagttaatgccactaaatctaagctaaatataggggatgcttgcattgagtgcgcaaaaagacaaaaaagactttactaaatatgaacagcacttgcaacaaagaacagaaaatgagctgtaaaacatgtgattgatgtgtttatgtgaactcaaccgttattgcagctctgttttcctaattacctaatgtgatcacaaccacttgatcagctgatcagcctagtatagcgatgtgttcatatgatataacataatgccacacgtgcatcacaagcggccttgacctaatagaattgctgaacctgatatttagatttgttatgggtttcatttgttttgcactggttgcctatggcagtgatgtcatcccaagattctattggcacggtgctcaagtgtatgcagaagggtgcggtggacttccttgtgaaaccagtaagaaagaatgagctgggtaacctgtggcaacatgtgtggaggaggcatgcaatgaattgccagacaaatggatcagaaaataatgcagccagcaatcatgtaagtaccaatgttgctaatgggtcaaagacaggagaaaacaatgatgaggaaagtgatgcccaagtgctccaagtgaaagtgagaagaatgtgcgttccaaatgccttaatggtattacttctgcaaaggtggctgagcaaataatggataatgccttgaggatcacggatgcaagttcacgtcgtccaaccaatcttggcaaagatttggctatgactgaaccagcagctgatagaaaatgccaatctttagtgatggaaaataatgctgtcaaagaaaagaaccctggtgaaaagtcgaagagtgctgtaataggtcatgctgattcttacccctcccaatttctcgagaccaacttgggaaaacaacagtatcgtaatggttacaagaatcaagaattcagggaaaaagatatctttaatcactcgaattcttctgccttctcgagatatggcaatagaaggatagaatcatcaggtgagatacagtttcttccttctcgttgcattgttgggcaagagcagcatgttcatggcaaggacccagttttccaacccaatggggtcttgctgcctcccaatgaccataatacaggtgagagtacaaggcaagctcgaattactctggacagtagcatggagggtgctgacatcatttgctccagtagtgctagggaagatgctggtgcaagtagttcttcccatagaaaggacagtatgagccatccctcatatgggtttgtacctgttccaattcctgtcggtgccatgatgccctatcattgtggtgcaattctgcagccagtatactacccacagggtccacttatgcactgtaattcatctgcaatcaacaaggcaacaattcatcaaacctctggccaatctaactaccgtgaagattgtggtagtggtagaccatctcaggttgatgaacacaaacagtcagaggaaaagcaccagttgcatcattcaagacaaattcatcgggaatcaggacaaccagttgacatggttagagctcacatggatcatgctaaccagagtgcaagctgcagccgggatatctgtaaaggaagcggatgcacgggtagcggtgaagccgataccaatgcgaacacgacggttgccctagagagtggcaacgagagtggcatccaaaatagtgacaggtctcaccgagaagctgctttgatgaagttccgcatgaaaaggaaagacagatgcttcgataaaaaggtcaggtatcatagcaggaagaagcttgcggagcagaggccaagagttaaggggcagtttgtaagccagaagctgaaagcagctatggcaacggaagccgaaactgactcgtgacgggcgctagtccagaactgtaattttggttcttcccttcgcgccaggtgtgggcgattggactggtaagtctgaaggctggcaaaagtttttttttcttccttccatggttagcctttctgtacaaaggtgaactccacgtcgggtgtttgttggcatccaagccttattttttgcgaggtacatcaagttgacaaaatgttcggagggatagggtgaaaacggtgcaagcgccatatttcgtccatacgcttaggtgtttgtggagtgtgaaagcagagcctgtacagcatattcaccacccattctgttgccattacaattgtagtaacttgtaattactactatgacaaaagtagacactgttgtagaacttacagccagcaggtcttttccatatgggacagtagcattttatttattaattggttgatcatatgaggacagtcccgaatgcaggacagttaagatttgtttgatccaatccaatcatccagcattttgcttgccttaaac

SEQ ID NO: 210482 - DNA, 2787 bp, Zea Mays
tcgttctcgtctcccagccccgtcgccgctgacgtggcgcccaccgcgcggaaaaaaatattgcagatattttcctcaccgctccttcccccctctctgctcgtccttgcctcccaccgcaccgccggctcttgctctgctcggttcctcctggcagcaaccgaatgtctcccgacgccgacgccgccgccgggggaggaggaggtggagaggcgagcgccggcgccggcgccggcgcgtcgtcgcctcccgcgtccgcgtccgcggcggcgaacggccgggcgctggtgcggtgggaccagatcctgccgcgccgctccctgcgggtgcttctcgtcgagcacgacgactccacgcgccagatcgtcaccgcgctcctccgcaagtgcggctaccgcgtggccgcggtcgcggacgggatgaaggcgtgggaggtcatgcgggagcgtgcctacgacttcgacctcgtcctcaccgaggtcgccatgccctccctctccggcatccagctgctctccaggatcgccgccgccgccgagtgcaagaacatccccgtcatcatgatgtcatcccaagattctattggcacggtgctcaagtgtatgcagaagggtgcggtggacttccttgtgaaaccagtaagaaagaatgagctgggtaacctgtggcaacatgtgtggaggaggcatgcaatgaattgccagacaaatggatcagaaaataatgcagccagcaatcatgtaagtaccaatgttgctaatgggtcaaagacaggagaaaacaatgatgaggaaagtgatgcccaaactgttttgtcttgactagagctttggtaacaaaagggagactgaaattaagagtgctgagacgttaccagatattcgtagagatgaaatggctggctcatccaaaaaaattgaactacaaaataagtctaatgatggagtaaacacaaaagtggatgcgtcaaaagatagcgatggtgctccaagtgaaagtgagaagaatgtgcgttccaaatgccttaatggtattacttctgcaaaggtggctgagcaaataatggataatgccttgaggatcacggatgcaagttcacgtcgtccaaccaatcttggcaaagatttggctatgactgaaccagcagctgatagaaaatgccaatctttagtgatggaaaataatgctgtcaaagaaaagaaccctggtgaaaagtcgaagagtgctgtaataggtcatgctgattcttacccctcccaatttctcgagaccaacttgggaaaacaacagtatcgtaatggttacaagaatcaagaattcagggaaaaagatatctttaatcactcgaattcttctgccttctcgagatatggcaatagaaggatagaatcatcaggtgagatacagtttcttccttctcgttgcattgttgggcaagagcagcatgttcatggcaaggacccagttttccaacccaatggggtcttgctgcctcccaatgaccataatacaggtgagagtacaaggcaagctcgaattactctggacagtagcatggagggtgctgacatcatttgctccagtagtgctagggaagatgctggtgcaagtagttcttcccatagaaaggacagtatgagccatccctcatatgggtttgtacctgttccaattcctgtcggtgccatgatgccctatcattgtggtgcaattctgcagccagtatactacccacagggtccacttatgcactgtaattcatctgcaatcaacaaggcaacaattcatcaaacctctggccaatctaactaccgtgaagattgtggtagtggtagaccatctcaggttgatgaacacaaacagtcagaggaaaagcaccagttgcatcattcaagacaaattcatcgggaatcaggacaaccagttgacatggttagagctcacatggatcatgctaaccagagtgcaagctgcagccgggatatctgtaaaggaagcggatgcacgggtagcggtgaagccgataccaatgcgaacacgacggttgccctagagagtggcaacgagagtggcatccaaaatagtgacaggtctcaccgagaagctgctttgatgaagttccgcatgaaaaggaaagacagatgcttcgataaaaaggtcaggtatcatagcaggaagaagcttgcggagcagaggccaagagttaaggggcagtttgtaagccagaagctgaaagcagctatggcaacggaagccgaaactgactcgtgacgggcgctagtccagaactgtaattttggttcttcccttcgcgccaggtgtgggcgattggactggtaagtctgaaggctggcaaaagtttttttttcttccttccatggttagcctttctgtacaaaggtgaactccacgtcgggtgtttgttggcatccaagccttattttttgcgaggtacatcaagttgacaaaatgttcggagggatagggtgaaaacggtgcaagcgccatatttcgtccatacgcttaggtgtttgtggagtgtgaaagcagagcctgtacagcatattcaccacccattctgttgccattacaattgtagtaacttgtaattactactatgacaaaagtagacactgttgtagaacttacagccagcaggtcttttccatatgggacagtagcattttatttattaattggttgatcatatgaggacagtcccgaatgcaggacagttaagatttgtttgatccaatccaatcatccagcattttgcttgccttaaac

SEQ ID NO: 210483 - DNA, 846 bp, Zea Mays
gcatgatgcgtctgcacctcgggaggcttactgcaacatgctggtgaagttccacgaggagatggcgcggccgatccaggaggcaacggagttcttcaacagcatggagaggcagctcggctcgacgatctccgacagtaactgtgaggtcgccgggtcgtccgaggatgagcaggacgcgagctggcctgaggagatcgatccctgcgccgaggacaaggagctcaagcaccagcttctgaggaagtacggcggctacctgggcggccttcgccaggagttctccaagaggaagaagaaagggaagctccccaaggaggcgaggcagaagttgctgcactggtgggagctgcactacaagtggccctacccttctgagacggagaagatggcgctcgcagagacgaccgggctggacccgaagcagatcaacaactggttcatcaaccagcggaagcggcactggaagccggcgtcggaggacatgccgttcgcggtgatggagggcgggttccacgtcgcgcagggcaccgcagcgctgtatatggacaggccggcggtgccgccgttcatggcggacggcgggatgtaccggctggggtcgtgagggccggcatgcacggtaaaagctaagcacgtgtgccagcacgacggtgattgttgaggtgtagtagtgattgaactgattgctccttctcatccgtaaatatacagtttcgggttgacacgtttttctcgatctgcaaggtaggcatcatgttgttctccttattttctttttttctccctgaagacgaccggtaataaaatatattagcactatgatgtactgtatatagggaaaat

SEQ ID NO: 210484 - DNA, 960 bp, Zea Mays
caaagccagccaccagcccacacacgcatatcattcactcatgtacacctttcttcctcctctcttcatctcctatcccaaatatctatctcaaccatctacatggctttatctcctccttattgttccagtcgtccgatccatttgctatcttagccttagctagctagggtttcttgagtcgccttggcctcagcagcttcctacttcgtctgtcttctgattattaacacagtagaaataaagaagctagctatagcgacgccatggatagcttcggggatcttggcggaggtgggagcagttcctccagagctgcttctgctcccttcttgcagctcccgctgccggcatcaacgtcatcagcacaacaacaggtgttatttccgctgccggacgggccgcagcagcagcaccatcaccacagctcgcgcatcccgttgcgacagttactgttactggccgacccgtcgtcggcagcgcagcatagcgctagccatcggacgaaggacatggcaacagtgcagggagagatgtcgtcgccggcggtggatggggatgccgacgccatcaaggccaggatcatgtcgcacccccagtactcggccctcctcgccgcctacttagactgccaaaaggtcggcgcgccgccggatgtgtcggataggctctcggccatggcggcggcgaatctggacgcgcagccggggccaataagccggcggcgcggcccgacgacgacgcgagctgatgacccggagctcgaccagttcatggaggcttactgcaacatgctggtgaagttccacgaggagatggcgcggccgatccaggaggcaacggagttcttcaacagcatggagaggcagctcggctcgacgatctccgccgcctggatgctgtagagacgtgcggaagagggaggcgaaagccaatgctccggtgcagagaaaaggggtg

SEQ ID NO: 210485 - DNA, 1838 bp, Zea Mays
ctacatttaataatgagtacaacgttgagaatgacgtcaaccagcggctccggaatccggatctccccacacggccacacggacacggccacacgcttcggcaggcacggccggtccatgtagcgcgcgcccggacacggagcaggggtcacgcgcaacggcagcccggcttgtcgggagcgcgaggggcgacatgggggcggaggccggcgagcccagctccatcctcagcttagcttccgccttttcctatggagtcgcatctatggcaatggttttcgtgaacaaagcggttcttatgcagtatgttcactccatgaccctcctcactttacagcaaatagcaacagcacttctgatacattttggtcaagttctaggaatgtctaaacgaaaagactttagctggataaccgcgaagaaacttcttccagtgtcaattttctacaatgcaaatgtgggatttgctctagcaagcttgaaaggggttaacatcccaatgtatattgcaatcaaaaggatcactccccttgctgtgttggtggctgggtgcatgcggggaaaggggaagccaccgacacaggtcattctttcagttatctgcaccgccactggtgtcctcattgcagcacttggagatttttcctttgacctatatggatactgcatggctctaacatcagtcttcttccagactatgtatttgattctggtggagaaatcaggcgctgaggatggtctttcctcagtggacttgatgttttacaacagcatattgtcacttccatttctgtttttcctcattatagcaacaggagaattcccccattctcttacagtattatctgcaaaggtcagtgatacaaatgcagtataatcaaaaatttaccagcacatttaagctagcaatctctgcgtgttcccttgtatcacccctttaactcaagaatgacaattaaaggtagttctccagagtttctgaagcaaatggtttcacacttcgctgctattcattaacacaatagtactcttaaagttcgtgtcattgtctgttgtatgtctctatcctaacttgcattgtctggtgacacttgaactgcaggcagcctctctgacgttcggtgtcattctcgttatctcactggtgatgggaatcgttctcaatttcactatgttttggtgcacaattgtgaactctgctctgactacaacaatagtaggagttctcaagggtgtcggatcaacgaccctcggtttcgttctgttgggaggtgtcgaagtacatgctctgaatgttactggactggtgatcaacacatttggcggcgtatggtactcttatgcgaagtataagcagaaaaggaaaacaccacggaagatccaacatgatgtagagtcgcatgcccacaagtagcgtcagattaactgtagttatacttcgttctttgatcagataataactggatgcatgtttaaatccattttttctgaactctattccatcaccagcagttaggttggtgcaattaagggaagcaacaagcttttcctatttcacatcttatagtttttacgatcagtgatatagggtgtaaagtcagttatttttcgcagctccagtgtgcgatgcatcacttttgctccaaagagagaaatccatgggtctggatgaggtgattgccggttctttaaggaatttttaaacatatgctcctagttcagctgttcagttttacccagtagtaatggatggatgagacgttttactagtgttatgagaaaggatctctggattctttctttcttaataaaataacatgtgcgaaaggacttctaac

SEQ ID NO: 210486 - DNA, 590 bp, Zea Mays
cctggtcatggagagcctagagcatgcaatgaaacgtgatgcaccaataattgcggagtatttaggaggtgctgtgaactgtgatgcttaccatatgactgatccgagatctgatggtcttggtgtttcatcttgcatcaagcaaagccttaaagatgctggtgtggcgcctgaggaggtcaactatattaatgctcatgcaacatcaacccttgctggtgatctggcagaggtgaatgccatcaagcaagtcttcaaggacccatctgggattaaaataaatgcaaccaagtccatgataggacattgccttggcgcagcaggcggtttggaagccattgctactattaaagcgataactactggatgggtgcatccaagcataaaccaatttaacccagaggaagcagttgaatttgacactgtacctaatgtaaaaaagcagcatgaagtgaatgttggtatctcaaattcctttggatttggaggtcacaattctgtcgtagtatttgcaccatttaagccataaggtgttccttgcctcacaaatcttggtcagaacagctttgcaactcaaccttgttggtgag

SEQ ID NO: 210487 - DNA, 1851 bp, Zea Mays
cgatattttttgacgagttcacctagacacggtatattttgcagagcggcaacatacatcgacatgttttgacaaattcctctcccccgactgagatcactgatccagtgcgcgtgccgccggcgccatggccgcgccaccgccgtcgccagaccaaacctactagcagcgcgtcgggggtgcacctgcggccgatctaggaatgcgaaggatgtgatcaagtctataaagaagtctgtagggagcaagaacaagagcactcaacactttgctgttatgctattggagatgcttctgaataattgcggagagcctgtccataggcaggttgttgataatagccttcttccaatacttgtgaagatagtgaagaaaaaaacggatttaccagttcgagaaaaaatatttcttctgttagatgccacgcaaacatcccttggtggagctaaagcaaagtttcctcagtactatgaggcatactatgagctggtgtctgctggtgtgcaattttcaaatcgcccaaatgttgttgtcacacgagcagaagtgccagtcccagaaacgagaacagaaccaaataatgtgagtttatcggcccgattgcatgaagctcaacaggaagtgcacactcagcctgctctggatacaagaaagcctgtagtgtcatggaagtattgagggatgtgcttaattctatggatcctagacaccctgagggagcaacggatgaatttgtgttggatcttgtcgagcaatgtacgtttcagaagcaacggatgatgcaccttgttatgacatcaagggatgaaatggtggtgtcacaagctatagagctaaacgaagagctacataaggttctcgtccggcatgatgtgttgctctcagttcatccgacaacaacagtagcttctaatatcaatgaggaagagaatgctgaaagtctctatcggagactgcggaaggggaaagctctgtcacaggactacacagatgactcggtaccgtcgttccggtccatgcccgaggacaagctgcggcggccgctgaccatccaatcacctcaccctgacaagagactgggcgcgctgaacatccacttgccggacggtgaggagccaaggcatgatcccgctccgctgatcccgccgccgcccgcaaagcacgccgagagggagaggttcttccaggagaagagcatcgacgagcatcgacggcggagtggccagcctgccgggtcacctgaggggcctgtcgcagcacagccgggacagcagcagctcgtgtagcggcagcactgattatggcgactgaagggggagcagtggtacatataggggttcccttcttgggggttgttggtctcccacttggccaggcaggccatacattggtgttgcgccggagtttggcttggccgtgagcttcttcttcatgctgacctgtgtacacttggtagcattttgttcctccttttcacctttgccgtgacattattgggagaccgttgtgttggtggcggtgtgggttcttttctttcagatctatagatgattgtgatctacatctactgcatggggtatgcttgggtctgaagcattgctgtgactttaccccttttggcttcctgctcctgtgtgtgtggtgtagcgcttggaggtctgccagagctgtgtccttgggaaaagctactgttcaaagcatgcgagagccccaccttgggctgtctatacagatgaaattttgataaactatcgttttggacaaaaactgtgtaaactgttcattgttttcttttttggaaaaaatatggcagaagttgtctttcaattaagataaactaggtgaatttcc

SEQ ID NO: 210488 - DNA, 2074 bp, Zea Mays
cgatattttttgacgagttcacctagacacggtatattttgcagagcggcaacatacatcgacatgttttgacaaattcctctcccccgactgagatcactgatccagtgcgcgtgccgccggcgccatggccgcgccaccgccgtcgccagaccaaacctactagcagcgcgtcgggggtgcacctgcggccgatctaggttggagacagggatttcttctcgtcctgtcctgtggattattacgggcctggatttgcttgggagtgagaggagagagcgagtaatagggtgaaggagtcttggggagaagatggctgcggaaatggtgaaggcggcgacgagcgacaagctcaaggagatggactgggcaaagaacatcgaaatctgcgagctcgtggcgcaggatccggggaatgcgaaggatgtgatcaagtctataaagaagtctgtagggagcaagaacaagagcactcaacactttgctgttatgctattggagatgcttctgaataattgcggagagcctgtccataggcaggttgttgataatagccttcttccaatacttgtgaagatagtgaagaaaaaaacggatttaccagttcgagaaaaaatatttcttctgttagatgccacgcaaacatcccttggtggagctaaagcaaagtttcctcagtactatgaggcatactatgagctggtgtctgctggtgtgcaattttcaaatcgcccaaatgttgttgtcacacgagcagaagtgccagtcccagaaacgagaacagaaccaaataatgtgagtttatcggcccgattgcatgaagctcaacaggaagtgcacactcagcctgctctggatacaagtatagtccagaaagcctgtagtgtcatggaagtattgagggatgtgcttaattctatggatcctagacaccctgagggagcaacggatgaatttgtgttggatcttgtcgagcaatgtacgtttcagaagcaacggatgatgcaccttgttatgacatcaagggatgaaatggtggtgtcacaagctatagagctaaacgaagagctacataaggttctcgtccggcatgatgtgttgctctcagttcatccgacaacaacagtagcttctaatatcaatgaggaagagaatgctgaaagtctctatcggagactgcggaaggggaaagctctgtcacaggactacacagatgactcggtaccgtcgttccggtccatgcccgaggacaagctgcggcggccgctgaccatccaatcacctcaccctgacaagagactgggcgcgctgaacatccacttgccggacggtgaggagccaaggcatgatcccgctccgctgatcccgccgccgcccgcaaagcacgccgagagggagaggttcttccaggagaagagcatcgacgagcatcgacggcggagtggccagcctgccgggtcacctgaggggcctgtcgcagcacagccgggacagcagcagctcgtgtagcggcagcactgattatggcgactgaagggggagcagtggtacatataggggttcccttcttgggggttgttggtctcccacttggccaggcaggccatacattggtgttgcgccggagtttggcttggccgtgagcttcttcttcatgctgacctgtgtacacttggtagcattttgttcctccttttcacctttgccgtgacattattgggagaccgttgtgttggtggcggtgtgggttcttttctttcagatctatagatgattgtgatctacatctactgcatggggtatgcttgggtctgaagcattgctgtgactttaccccttttggcttcctgctcctgtgtgtgtggtgtagcgcttggaggtctgccagagctgtgtccttgggaaaagctactgttcaaagcatgcgagagccccaccttgggctgtctatacagatgaaattttgataaactatcgttttggacaaaaactgtgtaaactgttcattgttttcttttttggaaaaaatatggcagaagttgtctttcaattaagataaactaggtgaatttcc

SEQ ID NO: 210489 - DNA, 2124 bp, Zea Mays
acgacgcttcgcggtcccacctagcggcaacatacatcgacatgttttgacaaattcctctcccccgactgagatcactgatccagtgcgcgtgccgccggcgccatggccgcgccaccgccgtcgccagaccaaacctactagcagcgcgtcgggggtgcacctgcggccgatctagggcagaatggctcctcgcgggctgcggttttgtgctcaaaggcgcgatctttacgctcgggatggcttcgttacaggagacagggatttcttctcgtcctgtcctgtggattattacgggcctggatttgcttgggagtgagaggagagagcgagtaatagggtgaaggagtcttggggagaagatggctgcggaaatggtgaaggcggcgacgagcgacaagctcaaggagatggactgggcaaagaacatcgaaatctgcgagctcgtggcgcaggatccggggaatgcgaaggatgtgatcaagtctataaagaagtctgtagggagcaagaacaagagcactcaacactttgctgttatgctattggagatgcttctgaataattgcggagagcctgtccataggcaggttgttgataatagccttcttccaatacttgtgaagatagtgaagaaaaaaacggatttaccagttcgagaaaaaatatttcttctgttagatgccacgcaaacatcccttggtggagctaaagcaaagtttcctcagtactatgaggcatactatgagctggtgtctgctggtgtgcaattttcaaatcgcccaaatgttgttgtcacacgagcagaagtgccagtcccagaaacgagaacagaaccaaataatgtgagtttatcggcccgattgcatgaagctcaacaggaagtgcacactcagcctgctctggatacaagtatagtccagaaagcctgtagtgtcatggaagtattgagggatgtgcttaattctatggatcctagacaccctgagggagcaacggatgaatttgtgttggatcttgtcgagcaatgtacgtttcagaagcaacggatgatgcaccttgttatgacatcaagggatgaaatggtggtgtcacaagctatagagctaaacgaagagctacataaggttctcgtccggcatgatgtgttgctctcagttcatccgacaacaacagtagcttctaatatcaatgaggaagagaatgctgaaagtctctatcggagactgcggaaggggaaagctctgtcacaggactacacagatgactcggtaccgtcgttccggtccatgcccgaggacaagctgcggcggccgctgaccatccaatcacctcaccctgacaagagactgggcgcgctgaacatccacttgccggacggtgaggagccaaggcatgatcccgctccgctgatcccgccgccgcccgcaaagcacgccgagagggagaggttcttccaggagaagagcatcgacgagcatcgacggcggagtggccagcctgccgggtcacctgaggggcctgtcgcagcacagccgggacagcagcagctcgtgtagcggcagcactgattatggcgactgaagggggagcagtggtacatataggggttcccttcttgggggttgttggtctcccacttggccaggcaggccatacattggtgttgcgccggagtttggcttggccgtgagcttcttcttcatgctgacctgtgtacacttggtagcattttgttcctccttttcacctttgccgtgacattattgggagaccgttgtgttggtggcggtgtgggttcttttctttcagatctatagatgattgtgatctacatctactgcatggggtatgcttgggtctgaagcattgctgtgactttaccccttttggcttcctgctcctgtgtgtgtggtgtagcgcttggaggtctgccagagctgtgtccttgggaaaagctactgttcaaagcatgcgagagccccaccttgggctgtctatacagatgaaattttgataaactatcgttttggacaaaaactgtgtaaactgttcattgttttcttttttggaaaaaatatggcagaagttgtctttcaattaagataaactaggtgaatttcc

SEQ ID NO: 210490 - DNA, 1951 bp, Zea Mays
ccaaagcagcaaaggacgtcaatcaatgagcaaatacatcgaattgcgcgaaggcaaagcgtccaagcaaccacttctgctctgcatcccgtctgggcctctgcatttgcttggctgctgctcccttctcccaccgaccaactcgatcccgcgccatggatcgcgccgaccccgcgcggggccgccttgccgtgctctcctcccacctccgtggtgcaggggccgaggaggcggcggggctggagaggtcgccggtatccgcgccggcgcccgggccccgcgccggcgcgcttgccgtggtggacgggaggaccgggaagcggcacgaggtcaaggtctccgaagacggcaccgtgcgcgccaccgacttcaagaagattaccactggaaaggacgacaagggtcttaagatttatgatcctggttaccttaacactgcccctgttcgctcgtccatctgctacatcgatggagatgagggaatccttcgctataggggttatccaatcgaagaattggctgaaagcagctcgtttgttgaggtggcctaccttttaatgtatgggaacttgcctactcagagtcaattggcaggctgggaatttgctatttctcagcattctgctgttccccaaggactgttggatatcatacaatcaatgccccatgatgctcaccccatgggtgttcttgccagtgctatgagcaccctttctgtctttcatccagatgcaaaccctgctctacaaggtcaagatctttataaatcgaagcaggtgagggataaacaaattgtgcgagtacttgggaaggcaccaacaatagcagctgctgcctacttgagattagcaggaagacctcccgtccttcctttaaatactctatcttattcagagaacttcttgtacatgctggactctttgggtgacagaacatataaaccaaatcctcgacttgctcgagctctagatattctttttattctgcatgctgaacatgaaatgaactgctccactgctgctgttaggcaccttgcttcaagtggtgtggatgtatttactgctctttctggtggtgttggagctctatatggtcctctgcatggcggcgcaaacgaggcagtacttaaaatgttaaatgagattggaagcatggaaaatattccagatttcattgtaggagtgaagaacaggaagaggaagatgtccggttttgggcaccgtgtgtataaaaactatgaccctcgtgctaaagtcataaggaaattggcagatgaggtgttctcaattgttggacgggatccacttattgaggtggccattgccctagaaaaggcagcgctgtcagacgaatattttatcaagaggaagctgtatccaaatgtggatttctactctgggctaatttatagggcaatgggattccctacagaattttttcctgtgctgtttgctattcctcgcatgggtggctggctagcgcattggaaagagtcactcgatgatcctgacactaagattataaggccccaacaggtatacaccggcttctggcttaggcactatacccccgtcagagaacgagtgctatcaagccagagtgaggaacttggtcaggttgccacctcaaacgcaactaggcgccgccgtgctggttctgccctgtagaagctgcagcgtataaacgcaccggcatactcaataaacatcgaccacttttgtgcttgaaaaggccacaaatgctttttagcttggttggagttgtaggccttttgttgtcgagtatataggcaataatgcagtgagaacaccacaccgttacaatgtaaaactgtcacgaggcatcacttgctggtgtacaccccttgcgttctctatgacttaatcacttaacttcccaaaagatgaattaagaggtacgatcgagtacccgtgttcttgcgtaaaaagaa

SEQ ID NO: 210491 - DNA, 2931 bp, Zea Mays
ggccgccattcgtgtggcccaacgccgtttcgcgtgcctctcaggcagcatgccaagggtaggcgaagggcacggccatggatacattcaagtctcctctttcagcgccaagccgccaaggtttgcctcaggtgagctttgacaaaaagaagaccatggagagaattggggtagacggggactttattgtcgccggcaattggaaggctgttacagcagaacacgttctaacaaaatttgagaattcaagacaaggacttctggaaagccttcatcaagtggaagaaacaattccggaagcagtcggttctcagatcacattgattgcacaagaactggaaaaggctgctttcgttttggatcagtctgaaaaggaagttggtgatgaggtgaatcaactaattcagaacgagtcaaaatccaatgggtttcttgatgagaatgagcttgaattgctccaccaaattgctgtccgggttggtattacatcatccgtggcagctctcaccgaaagaagagcacttaggaggcttcttgagagagcccatgcagaggaggacttgaaaaaggaatcgattgcagcctgcctactccaacttattaggaaatactccaacatatttaagagtgaaacaaccgatagcaccaactctttgtgctcaagcactccttgctcctccagatcgaattctggcttgattggtatgcatcgttcactttccagctcaactgatctctacggaaactgtcagagtctcgagaagcaactcccaaaggttggctccttcagttcgaagcagatgaaagggttatcaaggagcatgcccttgccacctgaggagctgaggtgcccaatctccctgcagctcatctatgaccctgttgttattacatccggccagacatatgaacgagcttgcatcgagaagtggttcgacagtggcaacacaacctgcccgaaaactcgcaagcagttgtcccagctcttgaggacgcctaattactgcattaagggtctgatagcatcttggtgtgaacagaacggggttcctgctccatctggaccgccagaatctcccgagctagaccacatgagaatttcatgcctggaaagcagcacatgtgtggggactgatggcgctaacactgttttgttcgaagagacagctgccaaggatgatgccaagtcggacatggagatattctctcgtcagaactccggagaggccacatccaaactacgtgtagatgaggtctcaccggagaactgctttactcttcagagctccaaggaggctgcacctgagacatgtggggttgtagactctctagacaagggcaagggctctcaccaagactccaaagatgatgtgcctgttagtgaaagatgtgaacagtggctccatgtgctgaacaagaacgatgctgagagcatgagtgagagacttaagttggtcgagcagatcaggatcctgttgaagaacgacgacgaacttcgcgactacgcaggtgctaatggtattactgagccactaatccattttctgaagatggctatctacagaggagatgtgcgatctcaggaggttgctacaatggctctgttcaattttgctgtcaacaatgaccggaacaagaggctgctgctgtcagctggagtcatccccttgatcgagcagatgatacaggaacgggaaacctgcgaggctgccatcgcaatgtacctgaacctctcctgcatccccgaggcgcaggcgatcatcggttcgagcgtcgctattcctttcctcgtcaatggcctgggggaaggtggctcccggagcgacacgtgccgcctggacgcgctgctcaccctgtacaatctctccctgcacgcgcccaacatcccgtccctcatggcgtccggcatcatcgagggcctccggggagtgctgacgccgtcgtccccgtggacggacaaggccctcgcggtgctgctgaacctggcgatgacccggaggggcaaggaagagatcgcggccagcgcggccatggtgggcgccatcgtgctcatcctggacaacggtgagccgggggagaaggagaaggccgtgtcgtgtctgtacgtgatctgcagcggcgacgatggcagcagccagacggtgctccaggagggcgtgatcccggcgctggtgtccgtgacggccaacggcacggccagggcccgggacaaggcgcagcggctgctgaggctgttccgggaacagcggcagcgggagttggagctggaggagatgcagccgcgggtggagctgcacgaggtggcgagccaggcggccgcgcggcaggaggaggaggaagaagaagaggaagagatggcgctggccgttacgccggccgccgcggccagtaagccgagaggcggcggcaagaagccgcggttgcgcaggtcaggctccaggaggttcaccaaggccttcacgtgcctgctcaagaagtggagcctgcgctgagcactgagctgagaaggatcggccagtccgccggtatttgggttcggcaagggtgataacgcaaactcactccgaatggtgaactgcggagagcttgaaggtggatatgaggcttgaggttatattggttcaagccagtccagtgtagtgctgatcatgtattgcttggagggtgttacagttgggtgcttgtctgcagttgtggatggattggatgtcttgttctaggatggggtggtcttgcccttttatagctcaagggtagactttgcaattattggacgaagggtctagatttaatgtgtatacatacaaggatactttatgtccacaagatacgttcttatttttatatctaataccttctatgtgactggtgatgacatgaaagggtataaaatagtatccaaggaacatagaagggattaagacatttgcg

SEQ ID NO: 210492 - DNA, 2900 bp, Zea Mays
tccccgtcccctccgccgccgccgcccctgcaccctttgctcccgttggatcagccccgcgggcggatctcgaccgccgagcacgtccttgccgccgcgtctgcggggatggacgagcctcacctgccacgacagcacgatgccgaagctcgcgcccccgtcctgccgcgagagcgtcggcggcgacttcgtcggtggatgacttcgtccgatgcctctccgcggccatggcgaggcagctcgtattcccgtggagctctagcgcgtcgacgcgtcatccatggaccatggtgattgtcactgggcagacaacgagctcatggagacgctggcgctctgaggtgttgtgttgtgtcagtaaaaatggccaaaacgtagctacatggagcactatgcaatgaactttacacagtaatccgtgaagttttggataccattcctccctttgagactacaagctcaggatgcagtcctgggctcctggcattgagttccttgaggatagctgttgagaaatccaagaatttactccagtattgctcagagactagcaagttttacttggctgttacagcagaacacgttctaacaaaatttgagaattcaagacaaggacttctggaaagccttcatcaagtggaagaaacaattccggaagcagtcggttctcagatcacattgattgcacaagaactggaaaaggctgctttcgttttggatcagtctgaaaaggaagttggtgatgaggtgaatcaactaattcagaacgagtcaaaatccaatgggtttcttgatgagaatgagcttgaattgctccaccaaattgctgtccgggttggtattacatcatccgtggcagctctcaccgaaagaagagcacttaggaggcttcttgagagagcccatgcagaggaggacttgaaaaaggaatcgattgcagcctgcctactccaacttattaggaaatactccaacatatttaagagtgaaacaaccgatagcaccaactctttgtgctcaagcactccttgctcctccagatcgaattctggcttgattggtatgcatcgttcactttccagctcaactgatctctacggaaactgtcagagtctcgagaagcaactcccaaaggttggctccttcagttcgaagcagatgaaagggttatcaaggagcatgcccttgccacctgaggagctgaggtgcccaatctccctgcagctcatctatgaccctgttgttattacatccggccagacatatgaacgagcttgcatcgagaagtggttcgacagtggcaacacaacctgcccgaaaactcgcaagcagttgtcccagctcttgaggacgcctaattactgcattaagggtctgatagcatcttggtgtgaacagaacggggttcctgctccatctggaccgccagaatctcccgagctagaccacatgagaatttcatgcctggaaagcagcacatgtgtggggactgatggcgctaacactgttttgttcgaagagacagctgccaaggatgatgccaagtcggacatggagatattctctcgtcagaactccggagaggccacatccaaactacgtgtagatgaggtctcaccggagaactgctttactcttcagagctccaaggaggctgcacctgagacatgtggggttgtagactctctagacaagggcaagggctctcaccaagactccaaagatgatgtgcctgttagtgaaagatgtgaacagtggctccatgtgctgaacaagaacgatgctgagagcatgagtgagagacttaagttggtcgagcagatcaggatcctgttgaagaacgacgacgaacttcgcgactacgcaggtgctaatggtattactgagccactaatccattttctgaagatggctatctacagaggagatgtgcgatctcaggaggttgctacaatggctctgttcaattttgctgtcaacaatgaccggaacaagaggctgctgctgtcagctggagtcatccccttgatcgagcagatgatacaggaacgggaaacctgcgaggctgccatcgcaatgtacctgaacctctcctgcatccccgaggcgcaggcgatcatcggttcgagcgtcgctattcctttcctcgtcaatggcctgggggaaggtggctcccggagcgacacgtgccgcctggacgcgctgctcaccctgtacaatctctccctgcacgcgcccaacatcccgtccctcatggcgtccggcatcatcgagggcctccggggagtgctgacgccgtcgtccccgtggacggacaaggccctcgcggtgctgctgaacctggcgatgacccggaggggcaaggaagagatcgcggccagcgcggccatggtgggcgccatcgtgctcatcctggacaacggtgagccgggggagaaggagaaggccgtgtcgtgtctgtacgtgatctgcagcggcgacgatggcagcagccagacggtgctccaggagggcgtgatcccggcgctggtgtccgtgacggccaacggcacggccagggcccgggacaaggcgcagcggctgctgaggctgttccgggaacagcggcagcgggagttggagctggaggagatgcagccgcgggtggagctgcacgaggtggcgagccaggcggccgcgcggcaggaggaggaggaagaagaagaggaagagatggcgctggccgttacgccggccgccgcggccagtaagccgagaggcggcggcaagaagccgcggttgcgcaggtcaggctccaggaggttcaccaaggccttcacgtgcctgctcaagaagtggagcctgcgctgagcactgagctgagaaggatcggccagtccgccggtgtaagtgtaactgac

SEQ ID NO: 210493 - DNA, 1452 bp, Zea Mays
taaccactaaccagacacaacaaagcaatatgttctttcataggttagagatcatggggtctgaaactatcaaaggattagctaaaggttcaatgactacagaatggggtagggcagatccatgcattgatactggaaaaccagtatagtggtccctttttagattgaatgaaatgcagttgtgcagagcatgtgcattgctgcaactatttttatactgcttttttactgatattgctatggagatcaacaattttgtttttattttgcagtgatatgggctgtcatattgatagctttattgttgtggtcacatacacatttaattgaaaatgggcttgtcacaggtagaactactgatgttcttgctgttgccaacacagtggcagaattgcttcagaatcattgttgactccccctaagcatatatatttgaaagatgttagaagtggtgacctaactaagtatttcctttctcattttttggcgtctaattatgtgttcatttcattactgaagcaattcaaaatatggatgttacttaatcaattcagaaagttgctgatgcttatgattgcaaagttctggaaacacttgcaagcattatgtttctgctggaatttgctctaggtattttcctgcacaagttctatggttttgttcttagctaacactacaagtgtggatgaatctgggaagcagcatttccttgatgcatcagttgcttacaagcgtgtagtcctgaacgacatcgaataccttgctaggtttgggtactccaaggagcaggtgtatctcttactatcatgttgtccctgtgaggcaggatctctggaatagtagactctccttatgcagtgtcaactcttgacatccctacaacaatatttgatcaggatgatatggagcaatggtggcagcactagttgaagatgatcagcttgtgaagtcttttacacaagttgttttccacgttttgtcgagctcaagtaaattccttcacaatgttggccttcagtatgtctccaagacaagcttagtttcatcaaaagtgcaagaactctaatctcaactagagactaagacaagaaaaacgatagactttggcgaaaatggaaaccttgaaggcgtcacaagaatttgcagccactgtagctaatcaaccaattgaggtcaaggcgtcacaagaatttgcagccactgtagctaatcaaccaattgaggtcgaagattttaagaagttgctaatagaaaataatactcggtcgaagatttaaagatagactcttaatgtttgatgaaattatatgcacaatttggattgcattcaagtgtacgttgatttttattaattggtgatgaaataaaaatgtcatagtttgtttgacatgtcagctactatattatctgccacttcatctcacttgcgacaaaactaatggtcataatttt

SEQ ID NO: 210494 - DNA, 1175 bp, Zea Mays
tttacataaccactaaccagacacaacaaagcaatatgttctttcataggttagagatcatggggtctgaaactatcaaaggattagctaaaggttcaatgactacagaatggggtagggcagatccatgcattgatactggaaaaccagtatagtggtccctttttagattgaatgaaatgcagttgtgcagagcatgtgcattgctgcaactatttttatactgcttttttactgatattgctatggagatcaacaattttgtttttattttgcagtgatatgggctgtcatattgatagctttattgttgtggtcacatacacatttaattgaaaatgggcttgtcacaggtattttcctgcacaagttctatggttttgttcttagctaacactacaagtgtggatgaatctgggaagcagcatttccttgatgcatcagttgcttacaagcgtgtagtcctgaacgacatcgaataccttgctaggtttgggtactccaaggagcaggtgtatctcttactatcatgttgtccctgtgaggcaggatctctggaatagtagactctccttatgcagtgtcaactcttgacatccctacaacaatatttgatcaggatgatatggagcaatggtggcagcactagttgaagatgatcagcttgtgaagtcttttacacaagttgttttccacgttttgtcgagctcaagtaaattccttcacaatgttggccttcagtatgtctccaagacaagcttagtttcatcaaaagtgcaagaactctaatctcaactagagactaagacaagaaaaacgatagactttggcgaaaatggaaaccttgaaggcgtcacaagaatttgcagccactgtagctaatcaaccaattgaggtcaaggcgtcacaagaatttgcagccactgtagctaatcaaccaattgaggtcgaagattttaagaagttgctaatagaaaataatactcggtcgaagatttaaagatagactcttaatgtttgatgaaattatatgcacaatttggattgcattcaagtgtacgttgatttttattaattggtgatgaaataaaaatgtcatagtttgtttgacatgtcagctactatattatctgccacttcatctcacttgcgacaaaactaatggtcataatttt

SEQ ID NO: 210495 - DNA, 916 bp, Zea Mays
catccacctgcgacacatttccccccttttcccgcaacttccgtgacgacttcaccactacatccatgccaccggcgacttcatggcctccccattcagcctctccttcccaagacaaagatggttccagggaggaagggatttaatgcacaagggaacccagcagcatttccttgatgcatcagttgcttacaagcgtgtagtcctgaacgacatcgaataccttgctaggtttgggtactccaaggagcaggtgtatctcttactatcatgttgtccctgtgaggcaggatctctggaatagtagactctccttatgcagtgtcaactcttgacatccctacaacaatatttgatcaggatgatatggagcaatggtggcagcactagttgaagatgatcagcttgtgaagtcttttacacaagttgttttccacgttttgtcgagctcaagtaaattccttcacaatgttggccttcagtatgtctccaagacaagcttagtttcatcaaaagtgcaagaactctaatctcaactagagactaagacaagaaaaacgatagactttggcgaaaatggaaaccttgaaggcgtcacaagaatttgcagccactgtagctaatcaaccaattgaggtcaaggcgtcacaagaatttgcagccactgtagctaatcaaccaattgaggtcgaagattttaagaagttgctaatagaaaataatactcggtcgaagatttaaagatagactcttaatgtttgatgaaattatatgcacaatttggattgcattcaagtgtacgttgatttttattaattggtgatgaaataaaaatgtcatagtttgtttgacatgtcagctactatattatctgccacttcatctcacttgcgacaaaactaatggtcataatttt

SEQ ID NO: 210496 - DNA, 1616 bp, Zea Mays
gctcaatctccctcataatccttgacaggcggcacccaatcccatccacctgcgacacatttccccccttttcccgcaacttccgtgacgacttcaccactacatccatgccaccggcgacttcatggcctccccattcagcctctccttcccaagacaaagatggttccagggaggaagggatttaatgcacaagggaacccagcaggactgattactcttcacctcctcaaggaaagcagaagttcaggtgcaattcaaggatgttcctgatgacattttagaagtatgttcatagaagttactcatagtgtagtatactcttagcatagatttacttgtatagtaatgatagtgcctttacataaccactaaccagacacaacaaagcaatatgttctttcataggttagagatcatggggtctgaaactatcaaaggattagctaaaggttcaatgactacagaatgggtgatatgggctgtcatattgatagctttattgttgtggtcacatacacatttaattgaaaatgggcttgtcacaggtagaactactgatgttcttgctgttgccaacacagtggcagaattgcttcagaatcattgttgactccccctaagcatatatatttgaaagatgttagaagtggtgacctaactaagtatttcctttctcattttttggcgtctaattatgtgttcatttcattactgaagcaattcaaaatatggatgttacttaatcaattcagaaagttgctgatgcttatgattgcaaagttctggaaacacttgcaagcattatgtttctgctggaatttgctctaggtattttcctgcacaagttctatggttttgttcttagctaacactacaagtgtggatgaatctgggaagcagcatttccttgatgcatcagttgcttacaagcgtgtagtcctgaacgacatcgaataccttgctaggtttgggtactccaaggagcaggatctctggaatagtagactctccttatgcagtgtcaactcttgacatccctacaacaatatttgatcaggatgatatggagcaatggtggcagcactagttgaagatgatcagcttgtgaagtcttttacacaagttgttttccacgttttgtcgagctcaagtaaattccttcacaatgttggccttcagtatgtctccaagacaagcttagtttcatcaaaagtgcaagaactctaatctcaactagagactaagacaagaaaaacgatagactttggcgaaaatggaaaccttgaaggcgtcacaagaatttgcagccactgtagctaatcaaccaattgaggtcaaggcgtcacaagaatttgcagccactgtagctaatcaaccaattgaggtcgaagattttaagaagttgctaatagaaaataatactcggtcgaagatttaaagatagactcttaatgtttgatgaaattatatgcacaatttggattgcattcaagtgtacgttgatttttattaattggtgatgaaataaaaatgtcatagtttgtttgacatgtcagctactatattatctgccacttcatctcacttgcgacaaaactaatggtcataatttt

SEQ ID NO: 210497 - DNA, 993 bp, Zea Mays
gctcaatctccctcataatccttgacaggcggcacccaatcccatccacctgcgacacatttccccccttttcccgcaacttccgtgacgacttcaccactacatccatgccaccggcgacttcatggcctccccattcagcctctccttcccaagacaaagatggttccagggaggaagggatttaatgcacaagggaacccagcaggtattttcctgcacaagttctatggttttgttcttagctaacactacaagtgtggatgaatctgggaagcagcatttccttgatgcatcagttgcttacaagcgtgtagtcctgaacgacatcgaataccttgctaggtttgggtactccaaggagcaggatctctggaatagtagactctccttatgcagtgtcaactcttgacatccctacaacaatatttgatcaggatgatatggagcaatggtggcagcactagttgaagatgatcagcttgtgaagtcttttacacaagttgttttccacgttttgtcgagctcaagtaaattccttcacaatgttggccttcagtatgtctccaagacaagcttagtttcatcaaaagtgcaagaactctaatctcaactagagactaagacaagaaaaacgatagactttggcgaaaatggaaaccttgaaggcgtcacaagaatttgcagccactgtagctaatcaaccaattgaggtcaaggcgtcacaagaatttgcagccactgtagctaatcaaccaattgaggtcgaagattttaagaagttgctaatagaaaataatactcggtcgaagatttaaagatagactcttaatgtttgatgaaattatatgcacaatttggattgcattcaagtgtacgttgatttttattaattggtgatgaaataaaaatgtcatagtttgtttgacatgtcagctactatattatctgccacttcatctcacttgcgacaaaactaatggtcataatttt

SEQ ID NO: 210498 - DNA, 2880 bp, Zea Mays
ctaaaaagaaccgcagaaagatcgttttttttccctgtccccgttcttgcactcgagttcttcagttcttaggaatagtcagacggaacaactcgagtttgccatggtggtgatctggaaccggggtgtgctgccccctctttgattccctgattggtctcgctccagttcgacgcgggatttggacgggacgggcggaagttgggagagcagagcggccggcatgtttgggtccagggtccaggatgaggtggagatgcagaggaggcctaacaacaggatctttcccgacgagagacaaaatcaatctaagtcattgtatcaaactacacgggctgacagatttggcgcaaatagaatagatctgaagaatcctgagaagcttaaggtgttaaatgaaagcaacaaaccctggcaccagcgtattctagaccctggaagtaatattgtactgagatggaacagggtgtaccttgtggcatgtttgtttgctctttttatagatccttttttctattaccttccattgattagacaaaatggcaatggatcttcatgtgttgccaaggaccagggactgagcataagaatcactgtcctacgatcacttgctgacttattttacatgttgaacatagcaatcaagtttcatactgcatatgtggatccaaagtccagagtccttggaaagggagagcttgttgtggatattaagaagattcaacgaagatatataagaactgatttctttgtagacatacttgcagctgtgccacttccacagatgcatattattttgactaaattgattgatttgcgtctatgtggcggtaagattctcatggtaagcctttgggttgagtccatgtcattattttccttaatataagtaagtcatccgaccttcctggtgatgttgctatttcctatcctaggaaattgtaggcagtaaacgtacaattgcgacaaccacattgtgacttaaggttactgtgtggttaattatgcctgcgataaaaagctcagattataacatccggaacactacatttgctctcgtaattgtaattcagtatgtcataagaatgtatctcatcatccctttaagcaatcagattatcaaagctgttggagtagttgcaaagtcagcttgggggggagcagcatacaatcttcttctctacatgcttgcaagccatattactggtgcaatatattaccttctctccatcgaacggcagattacatgctgggatcagcagtgcgttgctgagtacaatgatacacattgcaactttagttttataagctgtgagaataatggttctaatgattattctgtgtgggcaaataagacaaaagtatttgccaactgtgatgccacgaatagtagtatatcatttaactacgggatgttttctagtgcactgagtaaaggtgctgtatcatctccattccttgagaagtatttcttttgcctatggtggggcttgctgcagcttagttcaagcggaaatcctctcgtgacaagtgcatttatcacagagaatgcatttgcgatagcaattggtgctatcagtctcatactctttgctcagttgattggcaaaatgcagacatacctgcagtctatcagtaaaaggcttgaagagtggaggctgaggcaaagggacatggatgagtggatgagacaccatcaactcccatctcatcttcaagaacgtgtgcggcggttcgttcaagtcaaatggcttgctacaagaggagtagaagaagaatccatcttgcaagctttgcctgctgatattcgtcgggatgtgcagcgtcatctttgtttggacctcgttagacgtgtaccttttttctctgagatggataaccaacttctcgatgccatctgtgagcggctggtgtctttcctgtgccctgagaacacgtacatctctcgcgagggtgatcctgtgaacgagatgctcttcattatacgcgggaaactagagagctcaacgacaaatggtggccgcagcaacttcttcaactccatcatcctgcgccccggcgatttcgcaggcgaggagctgctcacgtgggccctgctccccaagaccaacgtccacttcccgctctcgacaaggaccgtacggagccacacagaggtggaggccttcgctctgcgggctgaggacctgaagttcgtcgcgaaccagttccgtaggctccacagcaagaagctccagcacacgttccggttctactcccaccactggaggacctgggccgcctgcttcatccaggccgcttggcggcagcaccagaggaggaagctggccgagagcctcagccgctgggagtcgtactcgtggtggtcggcggaggaccacccaaccggcgataagccgaggcaggagggcacctcgagcggcggcggcggcacgaggacgatcgctgaaggtgccatcgcccatatgcacaagctcgcctctgcttccagaaggttccgcaccgaggacgtcgctatccgcaggctgcagaagcctgacgagcccgatttctccgcggaccattttgattgaaccttcttaatattgtgcttcgcagctgggagttgcatgttgtacgaacgatcgcagccgtagcatatatactctactgtaattttactgcacagccatcttaggtgtcgtgaattgtaatagaaaaagaagatgtatcgtgtaattctaaatccagaatctaccctgtataggcttaaccttttgtgcagtgcataaacttgagtatttcgaagcgtcatatgtgacttgttagagaccagagcagtgacagcactacagatgagtgataacattggtatagctcgagcacatgtcaccagcgcca

SEQ ID NO: 210499 - DNA, 2789 bp, Zea Mays
gtctttttgtgagaggctgcaaacagtatgatttgcagcagggctgcaccaaatttttttcatgagaacaggccgtcaccacttggtccaccccttcgctgtcctctctggctaaaaagaaccgcagaaagatcgttttttttccctgtccccgttcttgcactcgagttcttcagttcttaggaatagtcagacggaacaactcgagtttgccatggtggtgatctggaaccggggtgtgctgccccctctttgattccctgattggtctcgctccagttcgacgcgggatttggacgggacgggcggaagttgggagagcagagcggccggcatgtttgggtccagggtccaggatgaggtggagatgcagaggaggcctaacaacaggatctttcccgacgagagacaaaatcaatctaagtcattgtatcaaactacacgggctgacagatttggcgcaaatagaatagatctgaagaatcctgagaagcttaaggtgttaaatgaaagcaacaaaccctggcaccagcgtattctagaccctggaagtaatattgtactgagatggaacagggtgtaccttgtggcatgtttgtttgctctttttatagatccttttttctattaccttccattgattagacaaaatggcaatggatcttcatgtgttgccaaggaccagggactgagcataagaatcactgtcctacgatcacttgctgacttattttacatgttgaacatagcaatcaagtttcatactgcatatgtggatccaaagtccagagtccttggaaagggagagcttgttgtggatattaagaagattcaacgaagatatataagaactgatttctttgtagacatacttgcagctgtgccacttccacaggttactgtgtggttaattatgcctgcgataaaaagctcagattataacatccggaacactacatttgctctcgtaattgtaattcagtatgtcataagaatgtatctcatcatccctttaagcaatcagattatcaaagctgttggagtagttgcaaagtcagcttgggggggagcagcatacaatcttcttctctacatgcttgcaagccatattactggtgcaatatattaccttctctccatcgaacggcagattacatgctgggatcagcagtgcgttgctgagtacaatgatacacattgcaactttagttttataagctgtgagaataatggttctaatgattattctgtgtgggcaaataagacaaaagtatttgccaactgtgatgccacgaatagtagtatatcatttaactacgggatgttttctagtgcactgagtaaaggtgctgtatcatctccattccttgagaagtatttcttttgcctatggtggggcttgctgcagcttagttcaagcggaaatcctctcgtgacaagtgcatttatcacagagaatgcatttgcgatagcaattggtgctatcagtctcatactctttgctcagttgattggcaaaatgcagacatacctgcagtctatcagtaaaaggcttgaagagtggaggctgaggcaaagggacatggatgagtggatgagacaccatcaactcccatctcatcttcaagaacgtgtgcggcggttcgttcaagtcaaatggcttgctacaagaggagtagaagaagaatccatcttgcaagctttgcctgctgatattcgtcgggatgtgcagcgtcatctttgtttggacctcgttagacgtgtaccttttttctctgagatggataaccaacttctcgatgccatctgtgagcggctggtgtctttcctgtgccctgagaacacgtacatctctcgcgagggtgatcctgtgaacgagatgctcttcattatacgcgggaaactagagagctcaacgacaaatggtggccgcagcaacttcttcaactccatcatcctgcgccccggcgatttcgcaggcgaggagctgctcacgtgggccctgctccccaagaccaacgtccacttcccgctctcgacaaggaccgtacggagccacacagaggtggaggccttcgctctgcgggctgaggacctgaagttcgtcgcgaaccagttccgtaggctccacagcaagaagctccagcacacgttccggttctactcccaccactggaggacctgggccgcctgcttcatccaggccgcttggcggcagcaccagaggaggaagctggccgagagcctcagccgctgggagtcgtactcgtggtggtcggcggaggaccacccaaccggcgataagccgaggcaggagggcacctcgagcggcggcggcggcacgaggacgatcgctgaaggtgccatcgcccatatgcacaagctcgcctctgcttccagaaggttccgcaccgaggacgtcgctatccgcaggctgcagaagcctgacgagcccgatttctccgcggaccattttgattgaaccttcttaatattgtgcttcgcagctgggagttgcatgttgtacgaacgatcgcagccgtagcatatatactctactgtaattttactgcacagccatcttaggtgtcgtgaattgtaatagaaaaagaagatgtatcgtgtaattctaaatccagaatctaccctgtataggcttaaccttttgtgcagtgcataaacttgagtatttcgaagcgtcatatgtgacttgttagagaccagagcagtgacagcactacagatgagtgataacattggtatagctcgagcacatgtcaccagcgcca

SEQ ID NO: 210500 - DNA, 4507 bp, Zea Mays
cttggaggtaccgcaggatccgcttcatagcagtgagatgtggctcctgcggggcgtgcatatggtggcacacatgttggacgacgtatgcgatgtcgggccggatgaagatgaggtactgcagtgccccaacaagactctggtagctggtgggatcagccaccgggggccgtcgttggaggaggccttgccctgagtgtccaccggagtcgtgcaaggcttacagtcagccatgctagcgcgatcgaggatgtcgacgatgtactggtgctggtggagaaacaagccctgggaccggctctccatggtgatccccaggaagtggtgcaactcactcaggtccttcatcgcgaactcctgctagagggaggagatgatacgccacaggagttcgtgcgaggaggccgtggggacgatgttatcgacatagaggaggctgtacgtcgtgtccaggccacgatagaagacaaatagggaggtgtctgccttggtctcgaagaagcctcgtgagagcaataaggcgacaaagcgactacaccaagctcggggcacctgcttgaggccgtagagggaccagttgagcttgcaaaccatgtcgggtagggatgaaaatggtcggaacgatatttattcagttatcaatttttggtcatttttctttggttgcgaataaataggatatataatctactatacaaatttgtattcttgtttttaacattgagcttttagatattcataaaaggtaaaccacaaattcatcctatattttcttaaatgatagatgtaaaattcggtatggattcagaaacaaattcggtaatgtttcactttttgttgtagagagcaaataatgcataaaacaatttatgcaatattttattcttatttctaataatgtgcttcataacataataaaacatcaacatcaaattttatacagatctattttaaaataataaatttgttctaatagttcggattgccactttcatccctgatgttgggtgagccgggtccacagagctgaccaattgagtgtaatacaccgtctctgtcggagtgccatgaagacattcttgacgtcgagctgatgcactggccaagcctgtgagagagccggagtcagaacactcttgatggtaccaggcttcaccacggggatgaaggtcttgtcatagtccaccctgggacgttagggtgaagcccacaggacccaacgagccttgtgccgatccaaggagccatccaccttcagcttctgttgaagatccatttcccggtgacccctttggcttgtctgtgaaggatcttgctaccaggatccttcacacgcggtgtgacagctccgagccgctgtacactattcgcctgcttgcctccaattccccgacctccacgctgcatgccttgaccgctgctacctcatctatcacttggcgccaccgccttggccaccccaggcctgatgtgatgtctaagttgtctagcagttctatcatctcatgtagtcggggttcttttgagcatttgtgtcacgcctttcagttaggtcgacatgttaggctcccttttccctcctcttccagagcaacgagcaattttgatctggttcattgtgatgtttggacatcccccgttctcatcatttctggcaataaatattacttgctcattctggatgattactctcatttcttgtggacttttccgttacgcttgaagtctgatatgtttcccacactctctaacttcgcttgggtttccactcagtttggactcaccatccgggctgtccagtgtgacactgggcgagagtttgataactccgcgtcctgtgacttcttcctttcacacgacgttcagtggaggatgttgtgcccctacacttcttctcagaacagcaggattgagcgcatgattcgcaccacaaacaacgtcatgcgctccttgttgttccaggcctcccttcccgctcgctactggactggccactgctacctatctgctcaatcgcctccccaccaaggcggttcatcaccccaccccctactttgctctctttggtacctctccctcctatgatcaccttcgcgtgttcgggtgcgcttgctatcctaatctctatgccactgctctcataagcttgcatctcgctccactcgtagcgtcttccttgggtactctcctgctcataaggggtaccggtgccttgacctctccacctacagagtcctcgtctccgactttcccttctccgtctccccttccgctgcctcctcctttgagtacgacaacctccttgaggcactctgtggttccccctcttgctcccttgcttcccacacccctgtgtgcgatgtgctgtcaaggagtctcccgtgccgccatgtaggagtgggcagaaaacccgatactagaagcccgaacccaaaaccaaacccaaacccaaataacccgaacccgaaaaacttgagaaacattttgggtacgaacttccggtacccaaagtttttagcaaattttgggtcagttgtatcagtacccgaatagacatactacccgaacttccactacacaccaacgcttcacgtcacgttcaccttcagtccttgacgacctcatcctaatgggctagaccacgaccaccacagagtcacgttcacgggccacaacatcaagagtcttgtagccggccaagagtccaagacgaccaagagttttgcaactgtagcagccggctagccgccgttcgtcggccgccggtcgtcggtcgcacaagtaccagccatcaggtcgttggttgtcggccgctccagtaccagccaccaggtcaccagtcgctggccgcccaagcaccaagttgctgtccgccgctagcccgccacacccaacttgctgtccgcctacttgctccacgtggccacacctccagggctctagttcgtctccggctgtcctctagtccgcctctgacttctcgccggtctgcccgtgcgtgcggccggctgaccgacaacccaacatggcaacacgcggcagcacaccgaagaccgaattgccttgccgaagcacgacgcccacgccctggtgcctgacgttgaatcgttgtcgcttgtggtgaagccaacagaagaacaacaccaacatcggaggaatcttgcaatggtcatagtgttcaatgcactgaatccttcatgcgtgagaatgttatggacgagcttaagcagatgcaacctgaggatgaatcaaagaaaaagatgctagatatcctcaagcggctccacttggaagaagagatggcatcagatggtgaagatgagtccatgttatcagaggagcttattcaaaaagttatgtctggggaagagataaagctggaagacctctctgattgtgaaatcaaacgattccgtcaagctctggcctcaggtgagctcagtaagatgattgaaccgtggacaccttggtggaaaaaaccctcagccagatctatttcccttggcctggatggaagtcagcttatcagacaagtaaacgcagaagacactgctgtaccatatccagatccaaatactgaccaagaggctagcatcaacgaaatccctgaagggccagaatctcctctcccgtcattgaaacagttaacaaggacagagccatctcctttgcttgctgtccacttggttgacattctgtacagttactgcttcacacttcggctctacaacggtgattggcactcagatcctttgggtgcttgcactgtcgccctgtcgatgtcgaaagtcatgggccaggatgctaaacctgagactgtacctgaagcactcgcagcctgcatcgaggagacatgctcaccagcttacaggcatactggtggtttcaggtttgctattggactcgtggacgatatcatcgccattctctccttgggacagaacgcacttatttgtgccttatgcgacttccatcgactcattgaagttggtaagagcatgctcaaggtggagaaagtgggcaagacggagagggcacagaactctccgaagcttcgtagtgcagctaggaagctattcttcatgacttgttgggtccatgagcagccagatgaggcgtggccatctttagctcacatcgtccaggtgcagaaagcatctatggaggagttggagaccgggaattggaaggcggatagaaagagcaaaccacaatccgcggttcttatcgaggagctgtaggcatatggatgtaccactggaaactggatcgcgaggctctgtacccttgtgtatcgctcaggatgaatccaacgagagaccttgtccttgtaatgcagttagttgcttttgtgtacacttttttttgaaaaaaattgtatttgtatacgagtttgaaatcctagttgaagcgatcctgctttactttgcttgttaaattgcgggctgatttaatccatgcgttggagcttatgcggttcagatattcttatgattgcaagtttgtg

SEQ ID NO: 210501 - DNA, 1845 bp, Zea Mays
tgcggcctcctctcgcttcgtgtgtgtgtgatctcgttgcgcgctcgtcctgtcttagggcttgtagaataccgttcgggtatttcattcactttgttactctcatgcccgggctgccctctgctgacgcccacaaggtgtttgccgaatcgctcactgacttttgaagcttttggacaagaaatcctctgattcctgctcaaaatgtgtaattatccatgatataaactacgacttacctctgaatcatacaaaccacatgccaattgttcactttggcctctatatttggtgatctgcgtggaataatgcattttgttttgctgtgctgggtttaacaaatatacatttagattaaaggagcaatccaaaaaagttcaaagaaatttatatgtcatagtttccatgttctcccctttagtgaatctctcctaatagtttaatagttgggttctttgctgacctaacccagcataatttgaatcagctgacatctgaagtgacaggtcatagtgttcaatgcactgaatccttcatgcgtgagaatgttatggacgagcttaagcagatgcaacctgaggatgaatcaaagaaaaagatgctagatatcctcaagcggctccacttggaagaagagatggcatcagatggtgaagatgagtccatgttatcagaggagcttattcaaaaagttatgtctggggaagagataaagctggaagacctctctgattgtgaaatcaaacgattccgtcaagctctggcctcaggtgagctcagtaagatgattgaaccgtggacaccttggtggaaaaaaccctcagccagatctatttcccttggcctggatggaagtcagcttatcagacaagtaaacgcagaagacactgctgtaccatatccagatccaaatactgaccaagaggctagcatcaacgaaatccctgaagggccagaatctcctctcccgtcattgaaacagttaacaaggacagagccatctcctttgcttgctgtccacttggttgacattctgtacagttactgcttcacacttcggctctacaacggtgattggcactcagatcctttgggtgcttgcactgtcgccctgtcgatgtcgaaagtcatgggccaggatgctaaacctgagactgtacctgaagcactcgcagcctgcatcgaggagacatgctcaccagcttacaggcatactggtggtttcaggtttgctattggactcgtggacgatatcatcgccattctctccttgggacagaacgcacttatttgtgccttatgcgacttccatcgactcattgaagttggtaagagcatgctcaaggtggagaaagtgggcaagacggagagggcacagaactctccgaagcttcgtagtgcagctaggaagctattcttcatgacttgttgggtccatgagcagccagatgaggcgtggccatctttagctcacatcgtccaggtgcagaaagcatctatggaggagttggagaccgggaattggaaggcggatagaaagagcaaaccacaatccgcggttcttatcgaggagctgtaggcatatggatgtaccactggaaactggatcgcgaggctctgtacccttgtgtatcgctcaggatgaatccaacgagagaccttgtccttgtaatgcagttagttgcttttgtgtacacttttttttgaaaaaaattgtatttgtatacgagtttgaaatcctagttgaagcgatcctgctttactttgcttgttaaattgcgggctgatttaatccatgcgttggagcttatgcggttcagatattcttatgattgcaagtttgtg

SEQ ID NO: 210502 - DNA, 363 bp, Zea Mays
cagcctgtcactgaaactacctgtgtccggacgcccgatctagcaactagcaagcgccgcatccctcgcctcttcccgacttcccccctcgattcgatccgagctcacttctagggttcttggccccgctccaccgtcgcccatggcagacgatgccaaccgagcggccttcatggagctgcagtcccggatgatagataccaccgcgaagatcaagcagttacaaacccaaatgcgttctaaagaaggggaaaagaagcgtgcctaccttactttggaggaacttcgccagttgccagatgataccaacacctacaagactgtcgctgtccaactttgagtgagatgttatatgtgccttgc

SEQ ID NO: 210503 - DNA, 624 bp, Zea Mays
agaatttagtagctactgctgtacaatgtatgccataacaaaagccttttgcattgctttcgtcatgaccttcttctctgtattcgatgttcctgtcttctggccaatacttctctgttactggattgtgctctttgtcctgacaatgaagcgacaaattatgcatatggtcaagtacaagtatgtcccattcagctttggaaagcagaggtatggcggaaagaaacgccctggagccagtgcatcaaaagagtaaagaccggagggtcttgtacctcaaagagcaaatgcctgtgttatctgtgaggcattttgctggcatcatggtattttgagtaccagctactgatagtgaatgcacaccatattcactagtggagtctgcagagaagctaaccagacttttgcattggttaatgattcctgtttcacaagtcggtagtttatgtacaatgacatggaacatagctagtaaatcagattctcagttcctcttgtgctgtgcttttgtcgacaagttgtggacctgttgaactgttgcaaatccaaagcacgcgaagaccgagaaaacaaagttgaattgaggctgtgaaaaaagttttcttttattattattattattat

SEQ ID NO: 210504 - DNA, 2395 bp, Zea Mays
ccgtggcgagtccatccaacggccccgagaagctgaactgaccggccaccgcccagggtcagctcggtcattccgccgccgctgtcgtggtcgtggttccgcgccaactcaactccacggccgcggcgctagcatccactcaccatcgtcactcgccgccgctggcaccaccctccacgccccgtccgcactttttaaaactacgacccagctgccgaatcaaccgcctcccccggcgagcgcctccttcctctctcccatgggcccccgcgcccgagccgggaccgcttcgcccaccggccggtgcgcgcgccatagatagattccacaagcttcgcgaccagatccgatgctggaggccaccgccgccgcctcctccccccgcgccgcggccgcggcagtcgccgccggggcggccgccgccgcggtcgtttcctccccgcggcggggtggaggctccgcgcacaaccaccggcggtgggccccggccccgttcagggcttgcctgctcgcgctctggttgctgggcttcgcgctcgtcttcctgtggcagagcacctccgtgggccgcgtgcggctctacacgcgcccgccgatgccgaagcgcgccgtggcgtcgttggggcactgggcggcctccccgcccgtctacgatctgagggagttcggggcggtcggggacgggcggacggttaacacggccgcgttcgagtctgccatcgcggcgatcgccgagaggggcgggggcaggctcaccgtgccagccgggcggtggctcaccgcgccgttcaacctcaccagccacatgactctcttcctcgctgctggcgctgagatcctagggattcagttcggtgtacttatttacaattgagttaacattggcgacttctttatgttacttatattcaaggatgaaagatattggcccttgatgtctccattaccatcatacggctatggaagagagcacaagggacctcgatatgggagccttatacacggccaagacctgaagcatgtgactataacaggtcataatggtactataaatggacaaggtcaaagttggtgggtaaaatttcggagaaagctccttaatcacacaaggggtcctctggtgcagctcatgcggtcaagtaacattatcatttctaatatcactcttcgtgattctcccttctggactcttcacacgtacgactgcaagaatgttactatctcagaaaccaccatcttggctccaattgctggagctccaaatactgatgggatagatccagattcttgtgaaaatgtggtgataaaaaactgctacatttctgttggtgatgatgggatagccataaagagtggttgggaccaatatggaattgcttatggccgtccatcagctaatattactatccagaatgtcgtaatccgctctatggtcagtgctggagtatcgattggaagcgagatgtctggtggtgtctcggatgttttggtagagaatgttcatgtctgggattcacggcgaggcgtgaggataaagactgcacctggaagaggggcctatgtaaccaatgtcatttaccagaacataacctttgaaaacgtacgtgtcggtatagtgataaagacagactacaacgagcacccagacgaaggcttcgacccaaaggccgtccccaccatcgggaatatctcttacacctcaatccatgggcatcgtgtgcgagtaccggtcaggatacagggaagcgcgcagatccctgtgaagaatgttaccttccatgacatgtcaatcggtatagtagacaagaagcaccatgttttccagtgctccttcgtccaggggcaggtcattggctacgttttccctgtgccttgcaagaacctggacctgtacgacgagcggcgtgggctggttaaacaatcaacgttacagaatatctctgatatcgactacagtttctgacaatggcatttgataccactgtactattgctgtaggtgtattcagtattcacagccgtcacagtcctttccacacatttagaagcaaaattttgggtagcttttacactcttcacctcacagtcaggcatgtatctaaggaagatcgacttgaccatactgtctcgtagagggacgccaggaatgttgccttttcacttttttgatcactgtatgattacacttacttggttacacagtcgacagtacacttttgatagtgcttactgttcatggcagactacatttaccttgccctttttaaaacagatgtggatgtatatgtatttggtagtttgaacctggaatggttggttcttcttccaagttgtcttcatatgaagctgggtttgtcgagacaacttcaaaagaagtgggtattcatgatgtgaag

SEQ ID NO: 210505 - DNA, 1746 bp, Zea Mays
gcccagaaagccctgcagcagaactgcagaagacacggccgcggcagaagagcccaaatcacggccgcaaaagccacgcacgcggcgcttgtcctgcgcggcgcacggaaacccacctccacggcggcaccccgtgcgtcggctgcttgctgccccagtgccgccccgcgttcccttcgctcccgccgacaccgacgccgccactgccaccgccggcatggcgaccccgctccgcgccaccgcggtcctcgcgtggggttccggggaggacgggcagctgggcatgggcgggaacgaggagaaggactggccccacttcgttgaggcgctggggccctacgccgtcaccgccgtcgtcgccggcagccgcaactccctcgccatctgcgacgacggccgcctgttcacatggggatggaaccaacgcggcacgctcgggcacccgccggagaccaagacggagagctccccgggccccgtcgacgctctcgcgggtttcaagatcgtccaggcggcgattggcgggtggcattgcctcgcagttgacgacaaggggcgcgcctacgcctggggtggaaacgagtacgggcagtgtggtgaggagcctgagaggaaggaggacgggacgagggcgctcaggagggacatcccgatcccgcagcggtgcgcgctcaagctcaaagtccggcaagtagccgctggagggacacattcagtagttttgactcaagaaggtcacgtctggacatggggacagccatggcctccgggtgatatcaagcaaatatctacacctgtacgtgtgcaaggccttgagaaagtgagggtcattgctgtaggtgcattccataatttggcactaacggaggatgtaattttgtgggcatggggtaataatgagtatggtcagctggggactggagatacccaaccaagatcacaaccgatacgtgtcgaagggctatctgatctctcactggttgacattgctgctggaggctggcattcaactgcactaactatagatggagaggtgtatgcttgggggagaggagagcacgggaggcttggatttggagatgataagagtagtcacatggtgcccctaaaggttgagcttctagctggagaggatattgttcaggtatcatgtggaggaacacattcagttgcgctagctcgagatggccgaatgttttcttacgggaggggcgaccatggccgtctaggctacggcaggaaggtgacgacgggccaccccatggaattgcccatcaacctgccgccgctcagcagcagccgcgacggtcggtggcaggcgaaatacgtggcttgtggcgggcggcacaccctcgctattgcggagtggacagaggccactgattgatcacgtagcgtttgtggaataagcacaaggccggtgccaacgggcgtaggtggggctgcagtcgatggcgctgccggccgccgcggtcggtacttaccagaagtagttcagtaccgactgccattgccatgtgtcgtcttttaattagttgatgtccaataaattcataagttttttttaaaaaagtctaagtaatctgaaaaggtatttatgaattatgtaacttttttacttttttggtattatggtattttttatgtttatatgagttaatgtaaaattttatttatgattttataaattacatactgtgtatttatattcatgaactatataccttttttttattttggttactt

SEQ ID NO: 210506 - DNA, 1305 bp, Zea Mays
cagaactgcagaagacacggccgcggcagaagagcccaaatcacggccgcaaaagccacgcacgcggcgcttgtcctgcgcggcgcacggaaacccacctccacggcggcaccccgtgcgtcggctgcttgctgccccagtgccgccccgcgttcccttcgctcccgccgacaccgacgccgccactgccaccgccggcatggcgaccccgctccgcgccaccgcggtcctcgcgtggggttccggggaggacgggcagctgggcatgggcgggaacgaggagaaggactggccccacttcgttgaggcgctggggccctacgccgtcaccgccgtcgtcgccggcagccgcaactccctcgccatctgcgacgacggccgcctgttcacatggggatggaaccaacgcggcacgctcgggcacccgccggagaccaagacggagagctccccgggccccgtcgacgctctcgcgggtttcaagatcgtccaggcggcgattggcgggtggcattgcctcgcagttgacgacaaggggcgcgcctacgcctggggtggaaacgagtacgggcagtgtggtgaggagcctgagaggaaggaggacgggacgagggcgctcaggagggacatcccgatcccgcagcggtgcgcgctcaagctcaaagtccggcaagtagccgctggagggacacattcagtagttttgactcaagaaggtcacgtctggacatggggacagccatggcctccgggtgatatcaagcaaatatctacacctgtacgtgtgcaaggccttgagaaagtgagggtcattgctgtaggtgcattccataatttggcactaacggaggatgtaattttgtgggcatggggtaataatgagtatggtcagctggggactggagatacccaaccaagatcacaaccgatacgtgtcgaagggctatctgatctctcactggttgacattgctgctggaggctggcattcaactgcactaactatagatggagaggtgtatgcttgggggagaggagagcacgggaggcttggatttggagatgataagagtagtcacatggtgcccctaaaggttgagcttctagctggagaggatattgttcaggtatcatgtggaggaacacattcagttgcgctagctcgagatggccgaatgttttctagctcgacgtataaaatgaagatcctggccacttgaccattttacggcctttgctgtagaatactgccaatagaaaatttaatgcaaaaacctaaaatccatcaaagcaattttaactggag

SEQ ID NO: 210507 - DNA, 1126 bp, Zea Mays
cgcggcagaagagcccaaatcacggccgcaaaagccacgcacgcggcgcttgtcctgcgcggcgcacggaaacccacctccacggcggcaccccgtgcgtcggctgcttgctgccccagtgccgccccgcgttcccttcgctcccgccgacaccgacgccgccactgccaccgccggcatggcgaccccgctccgcgccaccgcggtcctcgcgtggggttccggggaggacgggcagctgggcatgggcgggaacgaggagaaggactggccccacttcgttgaggcgctggggccctacgccgtcaccgccgtcgtcgccggcagccgcaactccctcgccatctgcgacgacggccgcctgttcacatggggatggaaccaacgcggcacgctcgggcacccgccggagaccaagacggagagctccccgggccccgtcgacgctctcgcgggtttcaagatcgtccaggcggcgattggcgggtggcattgcctcgcagttgacgacaaggggcgcgcctacgcctggggtggaaacgagtacgggcagtgtggtgaggagcctgagaggaaggaggacgggacgagggcgctcaggagggacatcccgatcccgcagcggtgcgcgctcaagctcaaagtccggcaagtagccgctggagggacacattcagtagttttgactcaagaaggtcacgtctggacatggggacagccatggcctccgggtgatatcaagcaaatatctacacctgtacgtgtgcaaggccttgagaaagtgagggtcattgctgtaggtgcattccataatttggcactaacggaggatgtaattttgtgggcatggggtaataatgagtatggtcagctggggactggagatacccaaccaagatcacaaccgatacgtgtcgaagggctatctgatctctcactggttgacattgctgctggaggctggcattcaactgcactaactatagatggagaggtgtatgcttgggggagaggagagcacgggaggcttggatttggagatgataagagtagtcacatggtgcccctaaaggttgagcttctagctggagaggatattgttcagagctcattttccatgtttgca

SEQ ID NO: 210508 - DNA, 2050 bp, Zea Mays
aatcgtaatagctaggatcagatcatttcaacttcccgactctcgcatcccggattgttccgccgcccgcacacgtctctcctcttccgttgctctcctgcctccagctctccacggtctctgacccgcacaactgaacccgcgatggcgcgccgcctcctcgtcgccctcctcgccgcgtcgctcctgctcccgctcgcccgcccggactcctcctcgtccccgcccgccgccaccgcgtacgacgagctccgcctccggggcttcccgcgcggcctgctcccggccaacgtgcgggcctacacgctcgactccggctccggggacttcgccgtcgacctccgctccagctgccggatcgtgctgcccgcggggagctacctcgccgccttcagcgaccgactcacgggccgcctcgacgaccgccgcatctcgggcctcgacggcatccgcgtcagggccttcttccgctggtggtccatcacggggatccgcgccgatggggaccagctcgtcttcgaggtcggctccgtctccgccaagttccccgcgcgggacttcaacgccagcctcgactgccccgcccaggcggcgtcctaagtcaaggaggtattaaatactacgtacgggtgctcagcgcctcagctcagtactttgggtttctaggcttagttttttattgccactgtctgcttggtttcatccacggaacctcagaaccatcggaacttttgtgcacagtgttgttgttttcacggtttactagggaaaattcgcaaggctaatcgtttagtaaacatgatacctaagctagctaacaatcgtttagtaaataggatactcattcataataccaattagcatctatcagttatactagcttcgcaatataacttgcaaggattgttggattacttacctgtttagttgtagctcaacatttcatcactttttttttgtttcagcactgtactgctgctatttttgttagatccatactgcacttgtgatggttgcagatgttttgtgtttcaaagagcaattgcttgctttctcagtttttaatagaagttaagtagcttgctctcttaggtgtcgatctttgttatcctgcatttagttgttgacaagcaaggtggcagcttatgttcctagtgcaaaaaactgcttaatgcccaatcatcatacagtatctcgctccttttggaatactaaatttgccagacctgatcgcttctgagaaaatttgctactggagataacaaatttcagttttatttcgcatttaaagatgcctattgttatagtatctgaggcagtaggacaggacatataacatacaacttccccaaccattcatgatacaatccatgaataacttgagttatctgttaggcaataagttactgctcaactaaaagaaatgaactatcaaatgcaaatgctacttaagtaccttgtacctatgctagatcctatgtcaatgacgaattgcacagtggaattgtggaataataaagatcatgtggtacagctgtccaaaagcaaatatatatgcactggcacttcattcttggaatggttgaaattacaactgatggaagtgtcagtcaggcagtcaggctgaagcatcaagttagctcggaccaaatgtgtaaaagagtccggtatcctgtcgcatgttccatgacatgtgacattctaaaggggcagttggaagccaagcacatcaatgtttttaatttcatctgtctttattgtaattgtataagtttacaatagatgcatagaacagactggatcgataaaagcgccttcacagaccaaaaacccggtatcacggtagtggttcgtgcatttcgttagaaatgccctacgtcttattttgaaaagttgtgcttgtatatcttacttattgacaatagctgtacttataagactacttgcataaagaagaaaagtgaggtgcaaggccgaaaggcccctatgcgctaaatacaaatgcctttgtgaatagaagactttttttttgttatcatgaactttgtgt

SEQ ID NO: 210509 - DNA, 3062 bp, Zea Mays
atgctcctgccgcccttctcgcaacacccgcccaccaccaccgcatcttctcctacgctctcgcgctccgccacgaccttggtctgccactgccaccgctgtctcgccggcttcacgagccttctaaaacctggcgacgtcgcactcactgctcctgtgagcgcacgtcactgtgcccgcccgccccgcatgccgtggttctgctcgcgttgggcgaatcgggggacgaggaacctacgccgcattattatctccaacaatggtgtcacagacgccaggaaacgtcgtgctggcgcaaactagagtgccatcctcccccaccccgctcatttgcaaggctgtcgcggtgccgacgtgtccaaccgcacgtcgtggcacttaggctcttccaattccaaatcgcaaatgaggtctctccctcgcaaaggatatgaaaagaactgttgtcaaatacataaaacattgtctcacggttacatagatacgaaagcttggtctcaaagggaaaaggtctgtacagattacacctcaaggggaaaagagctacctcgaaacgagctatccagaatctgcgatgttgatgttgaagttgcattgagaactagctcctcaaagctgctaaagtcgaagggctcaacccaaaactcaaagaactgtcaaaacaaaacatccacagctgcactatgaatctagtgctcaaacactattacagagtgaaaatgatatcccacacctcaagtggtatggtgtcgatgaggagtaccatgttatggtgattgatcttcttggcccaatcttagaaaaattgtttacttcctgtaataggaaattttctatgaaaacaatacttatgcttactgatcaaccatcgagttcatccattccatattccatagtcaactttctgaaatttgataccagcttatagtcagaaagctaatcaagtttgatcaacccctgtattttgcttatgttgttttcagtataaacagaacatagtagttacttctctaatattaacaatgtctagtaataaatcccaagattctcgttcgtcaataagcaatggtaataacatatctcatttttattctatagatctatatcatcgattatggacttgctaagaaatacaaggacctttagactcataaacacatctcatacaggtgaatcatagtaaggaagttttcatttagaacccagactggactaatttccggtaataaaccccaaaattcttattcatcaataaacaatagtaaaaacatatatcctttttattctacgggtctttataattgattatggtctttctaagaaaaacaagaccttcatactcaaacacaccacatacaggtgaagcatattaatgaagttttgacttagaactgggagacttcattgtgccacacaattattctattaaatagcaagttcgtaagcagaaactggtatgcgagaattcacacaacctctatactgcacctgtctatgtcacagcttcttacattatctctagagacactggctaatggtacattattggggtaatccaaaaggttatgtggattcaatatagtaccaaatcgtggtacatagaggcaacctgaatggattgtttgactgtatgtcatttacatgtaaatatcagaaataaaacgaatgctctttgacgacttatgctcgtgcctaggagatcactgccaagtgccaagtgccaaatgcgagcactgcctcatcatcaaggtcccctccgttcatattcaattgaactaaattaacatgaagcaaaggcagctcaagggtcagctgggagcgttgtgtggccaagaaagaccaaacattttttggttatatcgtaccgacccgaagtgtaaaaacagtggcccagtccggccctaaactacgtcgtaccttcgttgggccgtgccggctcaagcccggcccgtatatttgaccatataaaatcaaaatattataaccatataaagttcataacttactaaattgaagatattaaataattatagtatcatttaaccacataaactccaaatataacaacaatataaagtcgatatcttactaaattaaagaaattaaacatattgtgcttaattgggtcgtgccggcccaagcccgacccatctatgcgggccgttccgggaacccgataggtcggaatttgaggtccggctcaggctcgccttcaggtcatgctagcctggctcatattatttcatgtcggactgtactttaggctcttattttcgggtcgtgcttgtgctggcccgaaaagcccggtctagattcccagcactagcggtgatggggtgggcggactacatgaggcccgggaccgtctgtggttcgactgggccaactgagcccgtcatgtaattctgaggcaaagtatggtcaactggattcttctcttagataatcactccccatgtatttctatttattcatattgtttctgtttactgggcagttggcactgaatttctgtttactgggcagtttagtaagtttcagttcatgtaattctgaggcaaagtatggtcaaaagttggttcttttccttctgtttatcttctttcttctcttctcaagttgtttatgtttatgagaaatcactgttgattgtgtcctttgcgtgtatccaagttgtttctgttttcctttgcgtgtatccaagttgtttctgtttctgtttccccaatcaagttgtttctgtttatgagaaatcactgtttacaaaggatctgctgtaatttatttcaatttatgtttatgtaagttgctcctactgtacagagacctgatggctattattcaaaatctgttgtaatctatttctacgtgttgtttctgtttacaaaggatctgttgtaatttatttctacatgttggtcataatcaaatgtttagggtgtaaatcatatttagatgattgtaattagttcaatttatgggtcaaaatcatatttttagttaaatctgttgtaattagtttaaaattggtggtaacccaattgggccaagctataaaaaat

SEQ ID NO: 210510 - DNA, 1871 bp, Zea Mays
gagatcgcgaccgcgagtcagggtattttgggcaccaccagagcgccaagaagggaaggttggcttctccttcctaccctttccgcgctgcaaccgccaaattctccgactgcctcgcactctcgcagcacgtggggggtgattctctctttcttctcttcctcagccgccaggaaggtggattcttttcgagctcttgcccagctgattatagcggccggctattcttcttgtccggctatccgttccaggacttcggattaagaggcgacgagatgatgcgacgctgcgtctcggcgttggcccgccgccgccgtccagatcgcacggttgatactatgaaggcacgattccaatgtttggttaacatttcctcttcaataagggacactgacagccaaaggtgctcaagtacgtgtgctacttcctgtgctaccgatccagatgttttatcgagagaaacatcgtcatcagaaatgcttgttgattcatttgggaggttccacaattacttgaggatctccttgaccgagcgctgtaatctgaggtgccagtactgtatgcctgctgaaggagttgaactaacaccaaagtcagagcttctgtcacatgatgagataattcgaatcgctgacctttttgttacttctggtgtgaataagatccgattaattggtggagaacctaccgtacgaaaagatattgaagatatttgtttgcatctttctagtttgaagggactgaaaactcttgcaatgaccacaaatggaattgttctttcaaagaaactcccaaagttgaaagaatgtggactcaatgctttaaatataagtttagatacactagtacctgcaaagtttgagttcatgacaaggcgtaaagggcactcaaaggtcttggaatcaatagatgctgctgtagaacttgggtatagccctgttaaggtcaactgtgtcatcatgcgtggtataaatgatgatgagatctgcaattttgttgaattgacgagacacaagcccatcaacgttagatttattgagtttatgccatttgatggtaatgtttggaatgtgaagaagctagttccttatgcagagatgttggacaaagtggtaagcggcaaagttataaaggagtagagagacttcaagatcaccccacagacactgcaaagaatttcaggattgatggacatgttggcactatttcatttattacatcaatgacagagcatttttgtgctggctgcaatagattacggttattggctgatggaaacctcaaggtgtgcttatttggcccctcagaggtaagtttgagagaacccatccgtactggtgttgatgacgctggactgaaggagataattggtgccgcggttaaaaggaagaaagctaaacatgccgggatgtttgatattgccaagacagcaaatagacccatgatacatataggtggctgaggtgtgcagaatttcctcatgtcgaatatgagccaataaaatggatttgccaactgctgggttgctgcctggttttacctgaacgaccatgaaaaagttctctgatgcaatggaccaaactctttccgagtggtttaaacattagaggaggaagtggagtgtattggtcactgcagtcatacaatttagatccgtatacttgaacaaatgaacagtgtcacagaaactcactcagtcttcgcgtgccaaggtgttttggttgtgtacttgtatgttgtatgctcataatgtcacgttgtgtaagctctcttttgagatctcaccgtttgtgaattaaactgctaccttgagatcaatcgcacatcctcgtttccgttttagaaatgagcatttcagaattcagataatg

SEQ ID NO: 210511 - DNA, 1870 bp, Zea Mays
gagatcgcgaccgcgagtcagggtattttgggcaccaccagagcgccaagaagggaaggttggcttctccttcctaccctttccgcgctgcaaccgccaaattctccgactgcctcgcactctcgcagcacgtggggggtgattctctctttcttctcttcctcagccgccaggaaggtggattcttttcgagctcttgcccagctgattataggtagcggccggctattcttcttgtccggctatccgttccaggacttcggattaagaggcgacgagatgatgcgacgctgcgtctcggcgttggcccgccgccgccgtccagatcgcacggttgatactatgaaggcacgattccaatgtttggttaacatttcctcttcaataagggacactgacagccaaaggtgctcaagtacgtgtgctacttcctgtgctaccgatccagatgttttatcgagagaaacatcgtcatcagaaatgcttgttgattcatttgggaggttccacaattacttgaggatctccttgaccgagcgctgtaatctgaggtgccagtactgtatgcctgctgaaggagttgaactaacaccaaagtcagagcttctgtcacatgatgagataattcgaatcgctgacctttttgttacttctggtgtgaataagatccgattaattggtggagaacctaccgtacgaaaagatattgaagatatttgtttgcatctttctagtttgaagggactgaaaactcttgcaatgaccacaaatggaattgttctttcaaagaaactcccaaagttgaaagaatgtggactcaatgctttaaatataagtttagatacactagtacctgcaaagtttgagttcatgacaaggcgtaaagggcactcaaaggtcttggaatcaatagatgctgctgtagaacttgggtatagccctgttaaggtcaactgtgtcatcatgcgtggtataaatgatgatgagatctgcaattttgttgaattgacgagacacaagcccatcaacgttagatttattgagtttatgccatttgatggtaatgtttggaatgtgaagaagctagttccttatgcagagatgttggacaaagtgcggcaaagttataaaggagtagagagacttcaagatcaccccacagacactgcaaagaatttcaggattgatggacatgttggcactatttcatttattacatcaatgacagagcatttttgtgctggctgcaatagattacggttattggctgatggaaacctcaaggtgtgcttatttggcccctcagaggtaagtttgagagaacccatccgtactggtgttgatgacgctggactgaaggagataattggtgccgcggttaaaaggaagaaagctaaacatgccgggatgtttgatattgccaagacagcaaatagacccatgatacatataggtggctgaggtgtgcagaatttcctcatgtcgaatatgagccaataaaatggatttgccaactgctgggttgctgcctggttttacctgaacgaccatgaaaaagttctctgatgcaatggaccaaactctttccgagtggtttaaacattagaggaggaagtggagtgtattggtcactgcagtcatacaatttagatccgtatacttgaacaaatgaacagtgtcacagaaactcactcagtcttcgcgtgccaaggtgttttggttgtgtacttgtatgttgtatgctcataatgtcacgttgtgtaagctctcttttgagatctcaccgtttgtgaattaaactgctaccttgagatcaatcgcacatcctcgtttccgttttagaaatgagcatttcagaattcagataatg

SEQ ID NO: 210512 - DNA, 1866 bp, Zea Mays
gagatcgcgaccgcgagtcagggtattttgggcaccaccagagcgccaagaagggaaggttggcttctccttcctaccctttccgcgctgcaaccgccaaattctccgactgcctcgcactctcgcagcacgtggggggtgattctctctttcttctcttcctcagccgccaggaaggtggattcttttcgagctcttgcccagctgattatagcggccggctattcttcttgtccggctatccgttccaggacttcggattaagaggcgacgagatgatgcgacgctgcgtctcggcgttggcccgccgccgccgtccagatcgcacggttgatactatgaaggcacgattccaatgtttggttaacatttcctcttcaataagggacactgacagccaaaggtgctcaagtacgtgtgctacttcctgtgctaccgatccagatgttttatcgagagaaacatcgtcatcagaaatgcttgttgattcatttgggaggttccacaattacttgaggatctccttgaccgagcgctgtaatctgaggtgccagtactgtatgcctgctgaaggagttgaactaacaccaaagtcagagcttctgtcacatgatgagataattcgaatcgctgacctttttgttacttctggtgtgaataagatccgattaattggtggagaacctaccgtacgaaaagatattgaagatatttgtttgcatctttctagtttgaagggactgaaaactcttgcaatgaccacaaatggaattgttctttcaaagaaactcccaaagttgaaagaatgtggactcaatgctttaaatataagtttagatacactagtacctgcaaagtttgagttcatgacaaggcgtaaagggcactcaaaggtcttggaatcaatagatgctgctgtagaacttgggtatagccctgttaaggtcaactgtgtcatcatgcgtggtataaatgatgatgagatctgcaattttgttgaattgacgagacacaagcccatcaacgttagatttattgagtttatgccatttgatggtaatgtttggaatgtgaagaagctagttccttatgcagagatgttggacaaagtgcggcaaagttataaaggagtagagagacttcaagatcaccccacagacactgcaaagaatttcaggattgatggacatgttggcactatttcatttattacatcaatgacagagcatttttgtgctggctgcaatagattacggttattggctgatggaaacctcaaggtgtgcttatttggcccctcagaggtaagtttgagagaacccatccgtactggtgttgatgacgctggactgaaggagataattggtgccgcggttaaaaggaagaaagctaaacatgccgggatgtttgatattgccaagacagcaaatagacccatgatacatataggtggctgaggtgtgcagaatttcctcatgtcgaatatgagccaataaaatggatttgccaactgctgggttgctgcctggttttacctgaacgaccatgaaaaagttctctgatgcaatggaccaaactctttccgagtggtttaaacattagaggaggaagtggagtgtattggtcactgcagtcatacaatttagatccgtatacttgaacaaatgaacagtgtcacagaaactcactcagtcttcgcgtgccaaggtgttttggttgtgtacttgtatgttgtatgctcataatgtcacgttgtgtaagctctcttttgagatctcaccgtttgtgaattaaactgctaccttgagatcaatcgcacatcctcgtttccgttttagaaatgagcatttcagaattcagataatg

SEQ ID NO: 210513 - DNA, 2215 bp, Zea Mays
aaaaaaagagatcgcgaccgcgagtcagggtattttgggcaccaccagagcgccaagaagggaaggttggcttctccttcctaccctttccgcgctgcaaccgccaaattctccgactgcctcgcactctcgcagcacgtggggggtgattctctctttcttctcttcctcagccgccaggaaggtggattcttttcgagctcttgcccagctgattatagcggccggctattcttcttgtccggctatccgttccaggacttcggattaagaggcgacgagatgatgcgacgctgcgtctcggcgttggcccgccgccgccgtccagatcgcacggttgatactatgaaggcacgattccaatgtttggttaacatttcctcttcaataagggacactgacagccaaaggtgctcaagtacgtgtgctacttcctgtgctaccgatccagatgttttatcgagagaaacatcgtcatcagaaatgcttgttgattcatttgggaggttccacaattacttgaggatctccttgaccgagcgctgtaatctgaggtgccagtactgtatgcctgctgaaggagttgaactaacaccaaagtcagagcttctgtcacatgatgagataattcgaatcgctgacctttttgttacttctggtgtgaataagatccgattaattggtggagaacctaccgtacgaaaagatattgaagatatttgtttgcatctttctagtttgaagggactgaaaactcttgcaatgaccacaaatggaattgttctttcaaagaaactcccaaagttgaaagaatgtggactcaatgctttaaatataagtttagatacactagtacctgcaaagtttgagttcatgacaaggcgtaaagggcactcaaaggtcttggaatcaatagatgctgctgtagaacttgggtatagccctgttaaggtcaactgtgtcatcatgcgtggtataaatgatgatgagatctgcaattttgttgaattgacgagacacaagcccatcaacgttagatttattgagtttatgccatttgatggtaatgtttggaatgtgaagaagctagttccttatgcagagatgttggacaaagtggtaagcggcaaagttataaaggagtagagagacttcaagatcaccccacagacactgcaaagaatttcaggattgatggacatgttggcactatttcatttattacatcaatgacagagcatttttgtgctggctgcaatagattacggttattggctgatggaaacctcaaggtgtgcttatttggcccctcagaggtaagtttgagagaacccatccgtactggtgttgatgacgctggactgaaggagataattggtgccgcggttaaaaggaagaaagctaaacatgccgggatgtttgatattgccaagacagcaaatagacccatgatacatataggtggctgaggtatcctcttatcaacatctgtacatttttactacaatgactatgtaatagattgttcacggacatgacaagattgatatttgagatgatttatcgcatggcaccttctatagttgccttgttgcacgcccagtttggtggttctcaaacttcagtagtcggtcccttttatgttctaacttctaatgaggaaaaaaattgcaaaccatttcatgagatcactgctgagtttaaacatcccatggatttttactgctgtttaagatatcgttttggaatctggtgatcaaatgtgttcagcattcaattcacgtgcatctctcttatttggaatcaggtgtgcagaatttcctcatgtcgaatatgagccaataaaatggatttgccaactgctgggttgctgcctggttttacctgaacgaccatgaaaaagttctctgatgcaatggaccaaactctttccgagtggtttaaacattagaggaggaagtggagtgtattggtcactgcagtcatacaatttagatccgtatacttgaacaaatgaacagtgtcacagaaactcactcagtcttcgcgtgccaaggtgttttggttgtgtacttgtatgttgtatgctcataatgtcacgttgtgtaagctctcttttgagatctcaccgtttgtgaattaaactgctaccttgagatcaatcgcacatcctcgtttccgttttagaaatgagcatttcagaattcagataatg

SEQ ID NO: 210514 - DNA, 2109 bp, Zea Mays
aaataaagttaaatacattcccttgccttcctcagcggctcctcgtcctcggctcctcccgctcccctccgcactgtgtcgagccgagcgtgccgctggccgaccttggcaccttgcccgcgcccgcccgagccccgacgctgcctgaagcagcaagtgacagctcccctgggcgagccggtttactaccagcacggtgagcttcggtcgggcggagcagacgacaggcagcacaccaaggtagatcgacgggctctacacggacccgatctgcctctatgctgcaacctggattttcttcttccaatcaccaccacagcgcaacgcctgaacggccgtcgctgccggctacgccaggtgctcaggtcttattcggccccttcgccggcgacgagcgccaccaggatgcgtccgagactaagttgatgaagcagcctacttgggtcttctttgagaaagaatcggtaactgacttaagagaacaaattctccaactcattcagcatgattgtaaggatcaagaggaaaaatcacgggcagagctactggagaagctcaacagatgtaaaagagatacacttatcgaactgtgtcgctcgtttgatttaattggctcaagagctaataggaaggaggaacttgtattgtttctgatggaattcattaaggatcactgttctggtagtgatgtcataaactcggataagaaatacaagaaaagaaagcgtgtcagagaagaggaaaatttgtctgctggtaaaccttcaaaggtaatcgggagtctaaaggagacacaaagcctcgaaaacaagtaatcaaaccaagtaaagatgagctgagggaagctgtctttcttatcttggatactgcggactttgccactgtgagaatgacctttggcgatgttgtaaaagaagtcgacaaatactttggcaaggatctgtttgagagaaagccactaataaggtcgcttatagaagaggagctctttaggctagcagacgaggcagagaagaaggaactggaagagtcggaagcagcagaggcgaaggctagagccgagcaagctgccaaggagatggcacaagttcaaacagttgaattggttatcaacgagcaaaatgtacttgaagatggtcgagatagcaacaccaaagacagtctaaagaacgcaaatgacagtgctaacaagaaatgtatcgatggtggggcttctgtggagtatggtttcaatgaaaacagctgttacgctgctgaaggttcagaagagcacaaagttgatgatgataataaaaacataactaaggatggcaatggtggaaaggtcgcagttgcacccactgcaaacactgattgtaccttacaactacagggttcaagcaacgtcgaagctgagacgactatgaagagcaatgttggaaccctagaagcgtcaaaagatggagaagtgagagatgccagaaatggagaaaacaatggcactgaagatggtgggaatgaaggaatcaggagtgggaatgttggtagcaatgcagaagctgaagagtctcacggtcatggaaataatgaacgcgcagaacataccgaagatgacaaggctcaggaatgtagccacaatgagaacagtgcaagtgtaggaatccttggcgatggagacggtgaagctagagaaggcgatataaatgcggaagcggaacaaagtcaagcagacggtggcggcaatagtaaagcggaagatgctgagcacaatgaaaacaccaaaactgacgccaattcaagcaagaatggtactactgctgctgggaatggaaagaccgatgttgacgtgaagggcgcaacagcgatggcgcagctgaaggaagccctgtgtgatgagatggatgtagattgcaagggaggtggagtaggaccccggttatgtagatcgtagaagttgatttaggatccccagttgagagattatcagtgacgctttaactcttgtatttgtatgatagcttatgcgtagcttagatttgatgtgtatagcactggactactggagatctggaatacgggaatccaaacattaccttgtggaaattgagctttattgggggttggtattgt

SEQ ID NO: 210515 - DNA, 2473 bp, Zea Mays
aaataaagttaaatacattcccttgccttcctcagcggctcctcgtcctcggctcctcccgctcccctccgcactgtgtcgagccgagcgtgccgctggccgaccttggcaccttgcccgcgcccgcccgagccccgacgctgcctgaagcagcaagtgacagctcccctgggcgagccggtttactaccagcacggtgagcttcggtcgggcggagcagacgacaggcagcacaccaaggtagatcgacgggctctacacggacccgatctgcctctatgctgcaacctggattttcttcttccaatcaccaccacagcgcaacgcctgaacggccgtcgctgccggctacgccaggtgctcaggtcttattcggccccttcgccggcgacgagcgccaccaggatgcgtccgagactaagttgatgaagcagcctacttgggtcttctttgagaaagaatcggtaactgacttaagagaacaaattctccaactcattcagcatgattgtaaggatcaagaggaaaaatcacgggcagagctactggagaagctcaacagatgtaaaagagatacacttatcgaactgtgtcgctcgtttgatttaattggctcaagagctaataggaaggaggaacttgtattgtttctgatggaattcattaaggatcactgttctggtagtgatgtcataaactcggataagaaatacaagaaaagaaagcgtgtcagagaagaggaaaatttgtctgctggtaaaccttcaaagaaaaagaaacgagagggtgaagaggaagcagaggatagagtaaaacattctgactgtgatttgctggacaacaaatattcatgtgctgatagtaagaatggaaaattcccaaatgaacagaccaactttgagccttctgggaggataaattactctgtatcagagaatttagatggagcatcactcagtgaagcgccaattcctacagatgagcaagcaataataaccacaccacctacaaagtttgttacagctgctgaggatgatagtactgacgtgaaggctttacaaaggaaaatgtcttctattgccaagaaaaaaacgacttctaaggaagattgcaaagtcaaattgtgtggtaatcgggagtctaaaggagacacaaagcctcgaaaacaagtaatcaaaccaagtaaagatgagctgagggaagctgtctttcttatcttggatactgcggactttgccactgtgagatacactatgacctttggcgatgttgtaaaagaagtcgacaaatactttggcaaggatctgtttgagagaaagccactaataaggtcgcttatagaagaggagctctttaggctagcagacgaggcagagaagaaggaactggaagagtcggaagcagcagaggcgaaggctagagccgagcaagctgccaaggagatggcacaagttcaaacagttgaattggttatcaacgagcaaaatgtacttgaagatggtcgagatagcaacaccaaagacagtctaaagaacgcaaatgacagtgctaacaagaaatgtatcgatggtggggcttctgtggagtatggtttcaatgaaaacagctgttacgctgctgaaggttcagaagagcacaaagttgatgatgataataaaaacataactaaggatggcaatggtggaaaggtcgcagttgcacccactgcaaacactgattgtaccttacaactacagggttcaagcaacgtcgaagctgagacgactatgaagagcaatgttggaaccctagaagcgtcaaaagatggagaagtgagagatgccagaaatggagaaaacaatggcactgaagatggtgggaatgaaggaatcaggagtgggaatgttggtagcaatgcagaagctgaagagtctcacggtcatggaaataatgaacgcgcagaacataccgaagatgacaaggctcaggaatgtagccacaatgagaacagtgcaagtgtaggaatccttggcgatggagacggtgaagctagagaaggcgatataaatgcggaagcggaacaaagtcaagcagacggtggcggcaatagtaaagcggaagatgctgagcacaatgaaaacaccaaaactgacgccaattcaagcaagaatggtactactgctgctgggaatggaaagaccgatgttgacgtgaagggcgcaacagcgatggcgcagctgaaggaagccctgtgtgatgagatggatgtagattgcaagggaggtggagtaggaccccggttatgtagatcgtagaagttgatttaggatccccagttgagagattatcagtgacgctttaactcttgtatttgtatgatagcttatgcgtagcttagatttgatgtgtatagcactggactactggagatctggaatacgggaatccaaacattaccttgtggaaattgagctttattgggggttggtattgt

SEQ ID NO: 210516 - DNA, 2461 bp, Zea Mays
aaataaagttaaatacattcccttgccttcctcagcggctcctcgtcctcggctcctcccgctcccctccgcactgtgtcgagccgagcgtgccgctggccgaccttggcaccttgcccgcgcccgcccgagccccgacgctgcctgaagcagcaagtgacagctcccctgggcgagccggtttactaccagcacggtgagcttcggtcgggcggagcagacgacaggcagcacaccaaggtagatcgacgggctctacacggacccgatctgcctctatgctgcaacctggattttcttcttccaatcaccaccacagcgcaacgcctgaacggccgtcgctgccggctacgccaggtgctcaggtcttattcggccccttcgccggcgacgagcgccaccaggatgcgtccgagactaagttgatgaagcagcctacttgggtcttctttgagaaagaatcggtaactgacttaagagaacaaattctccaactcattcagcatgattgtaaggatcaagaggaaaaatcacgggcagagctactggagaagctcaacagatgtaaaagagatacacttatcgaactgtgtcgctcgtttgatttaattggctcaagagctaataggaaggaggaacttgtattgtttctgatggaattcattaaggatcactgttctggtagtgatgtcataaactcggataagaaatacaagaaaagaaagcgtgtcagagaagaggaaaatttgtctgctggtaaaccttcaaagaaaaagaaacgagagggtgaagaggaagcagaggatagagtaaaacattctgactgtgatttgctggacaacaaatattcatgtgctgatagtaagaatggaaaattcccaaatgaacagaccaactttgagccttctgggaggataaattactctgtatcagagaatttagatggagcatcactcagtgaagcgccaattcctacagatgagcaagcaataataaccacaccacctacaaagtttgttacagctgctgaggatgatagtactgacgtgaaggctttacaaaggaaaatgtcttctattgccaagaaaaaaacgacttctaaggaagattgcaaagtcaaattgtgtggtaatcgggagtctaaaggagacacaaagcctcgaaaacaagtaatcaaaccaagtaaagatgagctgagggaagctgtctttcttatcttggatactgcggactttgccactatgacctttggcgatgttgtaaaagaagtcgacaaatactttggcaaggatctgtttgagagaaagccactaataaggtcgcttatagaagaggagctctttaggctagcagacgaggcagagaagaaggaactggaagagtcggaagcagcagaggcgaaggctagagccgagcaagctgccaaggagatggcacaagttcaaacagttgaattggttatcaacgagcaaaatgtacttgaagatggtcgagatagcaacaccaaagacagtctaaagaacgcaaatgacagtgctaacaagaaatgtatcgatggtggggcttctgtggagtatggtttcaatgaaaacagctgttacgctgctgaaggttcagaagagcacaaagttgatgatgataataaaaacataactaaggatggcaatggtggaaaggtcgcagttgcacccactgcaaacactgattgtaccttacaactacagggttcaagcaacgtcgaagctgagacgactatgaagagcaatgttggaaccctagaagcgtcaaaagatggagaagtgagagatgccagaaatggagaaaacaatggcactgaagatggtgggaatgaaggaatcaggagtgggaatgttggtagcaatgcagaagctgaagagtctcacggtcatggaaataatgaacgcgcagaacataccgaagatgacaaggctcaggaatgtagccacaatgagaacagtgcaagtgtaggaatccttggcgatggagacggtgaagctagagaaggcgatataaatgcggaagcggaacaaagtcaagcagacggtggcggcaatagtaaagcggaagatgctgagcacaatgaaaacaccaaaactgacgccaattcaagcaagaatggtactactgctgctgggaatggaaagaccgatgttgacgtgaagggcgcaacagcgatggcgcagctgaaggaagccctgtgtgatgagatggatgtagattgcaagggaggtggagtaggaccccggttatgtagatcgtagaagttgatttaggatccccagttgagagattatcagtgacgctttaactcttgtatttgtatgatagcttatgcgtagcttagatttgatgtgtatagcactggactactggagatctggaatacgggaatccaaacattaccttgtggaaattgagctttattgggggttggtattgt

SEQ ID NO: 210517 - DNA, 3794 bp, Zea Mays
tgcctttagtttttcacactatacgtactaaggtcctgtttggaagcaacctagtttttaagaatctagtttggaaccacgtctgttttcataaaccagtttcttaaaaattgggtgcttccaaacatgacctaatattgctgaattagttgttgccacgtggaggctactaatatttctttctgataccttaagctctctctgtggatgactagtgattgtgtgggaaagtgaactgcttgattgatattgcatagaggtggtggttacatatatagacacataacccctaaccctaatgggccgacaacccaacagtggtgtcggcccacccacacgcacagacaatctaacatccccccctcgtagtcgcaacgggggcactgcacacgatgggactggagtagaagccgaaggtaggagccgacgggttgatatccccccacagtcgcaacgtcgtgagggtgtgaatgttgcggctggagtagacaccggtgtggactctgagaaggtgatatcccctagatgtcgaggtagccgaagtcgaggtggtcgtggtcgtggtcgggagacatgcaacaatagcttgtggttcgggaggggtcgacgttcgagcatcaacgatcggcaacgcgatacaacaaaagagcaccaacaaaccaaccttcttgcttcttcgatcgtccggacgtcgaggagccccgctagggaggccggcggcagcgcacgcgtctgcgccagtcatggtggccgcgcccgcgacagaatagaaggggtaaaggcggatctggtcggaaaggccacgtcggcgacagatccagccaggaagatggcaatccggccaaaggaacgacagatctagccgggaaggtcgaagcaacggtgaatccggccggcggcggggcggacaactgcgcctgctctcgtgctcgccagaggccggcggcggaggagcggagccggcgagtagaggagaggggacgccgacggccggagaggagaagaggccgtgtggtggcctgcatctgggatgtggccgcccctaggagggaaggatgagcctcctgggggggctgagatggcggctgtccctgtgggatgctggcggctgctgcggggttgggcgagaaaacactaaccctaacctagtctggtaccatgtaggaaagtgaattgcttgattgatatcacatagaggtggtggttacatatatagacacaaaaccctaaccctaatgggccggcagcccaacagtggtgccggcccccccacacacatagtttaacagattgtgcaattctaattcttggttatgttccgtaaatacttcaggtgggctcttacccacccgtcaacagatttggaggatgagaaactgaagaggcatatgaaaccagattttctggacatggtaccttggtattcagggacatcagctgatttattcaagacagcatttgatcttatggtctctgtgactctttttgttgggcgatttgacatgcgcatgatgcaggctgcaatgaaaggaccaacaggcaacactccaaatgatgacctattgtatgaccacttcaatgaaagggaagacctttggtttgactttgttgcagacaccggtgatggagggaattcatcatatacagttgcccgactgttagcccaaccatctattaggactgttatcggtggctctatgcatactcttccacgtgggaacttacttattatcggcggagatcttgcgtacccaaacccttcatcatttacatacgagaggcgcttctttaggccttttgagtatgctctgcaacctccaccttggtacagagatgaacatatagctttggataagcctgagcttcctcctggtgtatcaaagatgactgaatatgatggaccacagtgtttcataattcctggaaatcatgactggtttgatgggcttcatacttttatgagatatatatgtcataaaagctggttaggtggatggtttctgcctcagaagaagagttattttgcattgcatcttcccaagggttggtggatatttggtcttgatttatctctccatggcgatgttgatgtataccaattcaagttctttgctgatgtttgtcagaataaggttggagagaatgattctgtgattgtagtaacacatgagccaaactggcttcttgattggtactggaatgagactacaggcaagaatgtatcacacttaattcaggaatacctgaaaggaagatgtaaacttcgcatggcaggggatttacaccattttatgaggcactctgccactcgatcagaaaagaataattttgtgcaacacttgcttgttaatggatgtggtggtgcctttttgcacccaacacatgttttcagaaactttgagaggttctctggaaccacctatgaatgcaaggcagcttatccatcctatgatgagtctactgggattgcattgggtaacatattgaagttccgcaaaaagaattggcagtttgacatcattggcggttttatatacttcattttggtgttttcaatgttcccacagtgtaatcttgttcgtatcttaaatgaagaaacttggtctgggcgtctgaaaagcttctcaggcacaatatggagtgctttgctttatatttttgagcactcttatgtctcttcagtaggaagtcttactttattgacggcgtcatattcattcgtaccatccaaactatcaaggaggagaagagctattataggcggcctccatgttttggcccatttaactgcagcactacttttaatgttgctgctggagttgggcattgaaatttgtattcgtaaccatttattggcaacttcaggttatcacactctgtatgaatggtatcgatccatggaaagtgagcattttccagatcctactggtcttcgtgctcgtttggagcaatggactctgggactgtatccagcatgtataaaatatcttatggcagcctttgacgtccctgaggtcatggctgtgacaagaataaatatatgcaagaacggaatgatgtctctttcgcggagtgttctgatcatgtactacacttctgtgtttatctatttctggattttctcgactccagttgtttctctcatatttggtagttacctatacatctgcatcaattggttccacatacactttgatgaagccttctcgtcgctgcgcatcgcaaactacaaatccttcacaaggttccatgttaagaaggatggtgatctagaaatatttactcttgcagttgacaaggtcccaaaggactggaagttggatccgaggtgggaatcagagggacgagggcctcatcagctcagccatgaccggaagcatccaagcaagtggaggtcagcctcatcaactgaccctgtgagatctgtacgggttgttgatcatttcaccatcgaaagaacaagaaccccagatatggagccctcttcctgattgtgcagcccttactattataaggagttgctactgctgctagaaaaattaacaataactagcttcaacacacagtattgtttttgtttccacatccagccaataggtggaccgaggtgatctgcccttgtcggcgtccccgctttactgacctcacctgcagcattgtaatctgtatagaaagaaaattcacctgctgcctattgcttgtattcaatcaaaggaactctaaaaaaaagagtgttacagaagaatgttttgagaaagcaaagggatgaatcgattcatcatcatttactaaag

SEQ ID NO: 210518 - DNA, 4849 bp, Zea Mays
gtcacgacaaaataaagtgtgcatctcgaggagtcaatcgattgtagatccaggcacgcatgacatcacatcagttcagctagatgcctgaaggagaagttcagtagcacaccactacctcacaaaacagctcttctgctcgtgcaaaagtatccagggtccagatgggttcagacaagcagattggtagcccacgccaactcttggaaacactaaagatgggcagagttaggactatcctgacacatacatacccgtaccctcacgagcactccaggcatattatgactgcagtgattattgcctgtctcttctttatatcgtctgacaacatgcacacgctcatacataaactggataacaatatcaagtggtggtccatgtatgtttgcctcattggcttcttctatttcttctcatctccttttcttggaaggaccattcagcccagctactcaaattttaaccgctggtatgttgcttggatttgctttgcatccctgtaccatcttcctagcttccagtcaatgggggttgatatgcgcatgaacctctcgcttttcttgacaatatatttctcctcagtgcttttcatcattgcctttcatatcatatttattggtctctggtacattgggttggttgcacgcttggcaggaacgaggccaggcgtatggacaattctccagaactgtacagtaatcagcattgcatgttgtgtgttctacagtcattgtgggaatcttgctgtgcacaagagcaaatcttttggtagtagttctgatcccaatttgcttgcttttcttaaaaatgaaaacgggagtacctggatatcaaattttctccgtatgaatcagttgaaagatgagatatgttcgtcttggtttgctcctgttggatctgcaagtgactatcctattctggcaaaatgggttatctacggggaggtactgcctgcttctcctttattcatctattatttctagtcgcactttcttaaggtgacatccatgttgcacttctttgatcatgtttttctccagttagtttgcagcggatcctgtgctggcccatcggatgaaatctctcctttgtactcattatgggctacatttgttggcctctatatcgctaactttgttgtggagagatcaactgggtatgcctttagtttttcacactatacgtactaaggtcctgtttggaagcaacctagtttttaagaatctagtttggaaccacgtctgttttcataaaccagtttcttaaaaattgggtgcttccaaacatgacctaatattgctgaattagttgttgccacgtggaggctactaatatttctttctgataccttaagctctctctgtggatgactagtgattgtgtgggaaagtgaactgcttgattgatattgcatagaggtggtggttacatatatagacacataacccctaaccctaatgggccgacaacccaacagtggtgtcggcccacccacacgcacagacaatctaacatccccccctcgtagtcgcaacgggggcactgcacacgatgggactggagtagaagccgaaggtaggagccgacgggttgatatccccccacagtcgcaacgtcgtgagggtgtgaatgttgcggctggagtagacaccggtgtggactctgagaaggtgatatcccctagatgtcgaggtagccgaagtcgaggtggtcgtggtcgtggtcgggagacatgcaacaatagcttgtggttcgggaggggtcgacgttcgagcatcaacgatcggcaacgcgatacaacaaaagagcaccaacaaaccaaccttcttgcttcttcgatcgtccggacgtcgaggagccccgctagggaggccggcggcagcgcacgcgtctgcgccagtcatggtggccgcgcccgcgacagaatagaaggggtaaaggcggatctggtcggaaaggccacgtcggcgacagatccagccaggaagatggcaatccggccaaaggaacgacagatctagccgggaaggtcgaagcaacggtgaatccggccggcggcggggcggacaactgcgcctgctctcgtgctcgccagaggccggcggcggaggagcggagccggcgagtagaggagaggggacgccgacggccggagaggagaagaggccgtgtggtggcctgcatctgggatgtggccgcccctaggagggaaggatgagcctcctgggggggctgagatggcggctgtccctgtgggatgctggcggctgctgcggggttgggcgagaaaacactaaccctaacctagtctggtaccatgtaggaaagtgaattgcttgattgatatcacatagaggtggtggttacatatatagacacaaaaccctaaccctaatgggccggcagcccaacagtggtgccggcccccccacacacatagtttaacagattgtgcaattctaattcttggttatgttccgtaaatacttcaggtgggctcttacccacccgtcaacagatttggaggatgagaaactgaagaggcatatgaaaccagattttctggacatggtaccttggtattcagggacatcagctgatttattcaagacagcatttgatcttatggtctctgtgactctttttgttgggcgatttgacatgcgcatgatgcaggctgcaatgaaaggaccaacaggcaacactccaaatgatgacctattgtatgaccacttcaatgaaagggaagacctttggtttgactttgttgcagacaccggtgatggagggaattcatcatatacagttgcccgactgttagcccaaccatctattaggactgttatcggtggctctatgcatactcttccacgtgggaacttacttattatcggcggagatcttgcgtacccaaacccttcatcatttacatacgagaggcgcttctttaggccttttgagtatgctctgcaacctccaccttggtacagagatgaacatatagctttggataagcctgagcttcctcctggtgtatcaaagatgactgaatatgatggaccacagtgtttcataattcctggaaatcatgactggtttgatgggcttcatacttttatgagatatatatgtcataaaagctggttaggtggatggtttctgcctcagaagaagagttattttgcattgcatcttcccaagggttggtggatatttggtcttgatttatctctccatggcgatgttgatgtataccaattcaagttctttgctgatgtttgtcagaataagctgtgcaggttggagagaatgattctgtgattgtagtaacacatgagccaaactggcttcttgattggtactggaatgagactacaggcaagaatgtatcacacttaattcaggaatacctgaaaggaagatgtaaacttcgcatggcaggggatttacaccattttatgaggcactctgccactcgatcagaaaagaataattttgtgcaacacttgcttgttaatggatgtggtggtgcctttttgcacccaacacatgttttcagaaactttgagaggttctctggaaccacctatgaatgcaaggcagcttatccatcctatgatgagtctactgggattgcattgggtaacatattgaagttccgcaaaaagaattggcagtttgacatcattggcggttttatatacttcattttggtgttttcaatgttcccacagtaggaagtcttactttattgacggcgtcatattcattcgtaccatccaaactatcaaggaggagaagagctattataggcggcctccatgttttggcccatttaactgcagcactacttttaatgttgctgctggagttgggcattgaaatttgtattcgtaaccatttattggcaacttcaggttatcacactctgtatgaatggtatcgatccatggaaagtgagcattttccagatcctactggtcttcgtgctcgtttggagcaatggactctgggactgtatccagcatgtataaaatatcttatggcagcctttgacgtccctgaggtcatggctgtgacaagaataaatatatgcaagaacggaatgatgtctctttcgcggagtgttctgatcatgtactacacttctgtgtttatctatttctggattttctcgactccagttgtttctctcatatttggtagttacctatacatctgcatcaattggttccacatacactttgatgaagccttctcgtcgctgcgcatcgcaaactacaaatccttcacaaggttccatgttaagaaggatggtgatctagaaatatttactcttgcagttgacaaggtcccaaaggactggaagttggatccgaggtgggaatcagagggacgagggcctcatcagctcagccatgaccggaagcatccaagcaagtggaggtcagcctcatcaactgaccctgtgagatctgtacgggttgttgatcatttcaccatcgaaagaacaagaaccccagatatggagccctcttcctgattgtgcagcccttactattataaggagttgctactgctgctagaaaaattaacaataactagcttcaacacacagtattgtttttgtttccacatccagccaataggtggaccgaggtgatctgcccttgtcggcgtccccgctttactgacctcacctgcagcattgtaatctgtatagaaagaaaattcacctgctgcctattgcttgtattcaatcaaaggaactctaaaaaaaagagtgttacagaagaatgttttgagaaagcaaagggatgaatcgattcatcatcatttactaaag

SEQ ID NO: 210519 - DNA, 3729 bp, Zea Mays
ccgatgcggatgcggatgccgatgccgatgccgaagcgcacctgtctcttctccttgccgaccctccacccccagccgaagtgaggccaccaatcacacagccgctccccccgctcgtcctcctcccctgcccctgcctccgcccccgcccccgcccccgccccgccacgccagcatttggattggattgccggcggccgagtggaggcggagatccatccggactccggtgagtccgttcccgctgccgtgcttgatccaggcacgcatgacatcacatcagttcagctagatgcctgaaggagaagttcagtagcacaccactacctcacaaaacagctcttctgctcgtgcaaaagtatccagggtccagatgggttcagacaagcagattggtagcccacgccaactcttggaaacactaaagatgggcagagttaggactatcctgacacatacatacccgtaccctcacgagcactccaggcatattatgactgcagtgattattgcctgtctcttctttatatcgtctgacaacatgcacacgctcatacataaactggataacaatatcaagtggtggtccatgtatgtttgcctcattggcttcttctatttcttctcatctccttttcttggaaggaccattcagcccagctactcaaattttaaccgctggtatgttgcttggatttgctttgcatccctgtaccatcttcctagcttccagtcaatgggggttgatatgcgcatgaacctctcgcttttcttgacaatatatttctcctcagtgcttttcatcattgcctttcatatcatatttattggtctctggtacattgggttggttgcacgcttggcaggaacgaggccaggcgtatggacaattctccagaactgtacagtaatcagcattgcatgttgtgtgttctacagtcattgtgggaatcttgctgtgcacaagagcaaatcttttggtagtagttctgatcccaatttgcttgcttttcttaaaaatgaaaacgggagtacctggatatcaaattttctccgtatgaatcagttgaaagatgagatatgttcgtcttggtttgctcctgttggatctgcaagtgactatcctattctggcaaaatgggttatctacggggagtttgcagcggatcctgtgctggcccatcggatgaaatctctcctttgtactcattatgggctacatttgttggcctctatatcgctaactttgttgtggagagatcaactgggtgggctcttacccacccgtcaacagatttggaggatgagaaactgaagaggcatatgaaaccagattttctggacatggtaccttggtattcagggacatcagctgatttattcaagacagcatttgatcttatggtctctgtgactctttttgttgggcgatttgacatgcgcatgatgcaggctgcaatgaaaggaccaacaggcaacactccaaatgatgacctattgtatgaccacttcaatgaaagggaagacctttggtttgactttgttgcagacaccggtgatggagggaattcatcatatacagttgcccgactgttagcccaaccatctattaggactgttatcggtggctctatgcatactcttccacgtgggaacttacttattatcggcggagatcttgcgtacccaaacccttcatcatttacatacgagaggcgcttctttaggccttttgagtatgctctgcaacctccaccttggtacagagatgaacatatagctttggataagcctgagcttcctcctggtgtatcaaagatgactgaatatgatggaccacagtgtttcataattcctggaaatcatgactggtttgatgggcttcatacttttatgagatatatatgtcataaaagctggttaggtggatggtttctgcctcagaagaagagttattttgcattgcatcttcccaagggttggtggatatttggtcttgatttatctctccatggcgatgttgatgtataccaattcaagttctttgctgatgtttgtcagaataaggttggagagaatgattctgtgattgtagtaacacatgagccaaactggcttcttgattggtactggaatgagactacaggcaagaatgtatcacacttaattcaggaatacctgaaaggaagatgtaaacttcgcatggcaggggatttacaccattttatgaggcactctgccactcgatcagaaaagaataattttgtgcaacacttgcttgttaatggatgtggtggtgcctttttgcacccaacacatgttttcagaaactttgagaggttctctggaaccacctatgaatgcaaggcagcttatccatcctatgatgagtctactgggattgcattgggtaacatattgaagttccgcaaaaagaattggcagtttgacatcattggcggttttatatacttcattttggtgttttcaatgttcccacagtgtaatcttgttcgtatcttaaatgaagaaacttggtctgggcgtctgaaaagcttctcaggcacaatatggagtgctttgctttatatttttgagcactcttatgtctcttcagtaggaagtcttactttattgacggcgtcatattcattcgtaccatccaaactatcaaggaggagaagagctattataggcggcctccatgttttggcccatttaactgcagcactacttttaatgttgctgctggagttgggcattgaaatttgtattcgtaaccatttattggcaacttcaggttatcacactctgtatgaatggtatcgatccatggaaagtgagcattttccagatcctactggtcttcgtgctcgtttggagcaatggactctgggactgtatccagcatgtataaaatatcttatggcagcctttgacgtccctgaggtcatggctgtgacaagaataaatatatgcaagaacggaatgatgtctctttcgcggagtgttctgatcatgtactacacttctgtgtttatctatttctggattttctcgactccagttgtttctctcatatttggtagttacctatacatctgcatcaattggttccacatacactttgatgaagccttctcgtcgctgcgcatcgcaaactacaaatccttcacaaggttccatgttaagaaggatggtgatctagaaatatttactcttgcagttgacaaggtcccaaaggactggaagttggatccgaggtgggaatcagagggacgagggcctcatcagctcagccatgaccggaagcatccaagcaagtggaggtcagcctcatcaactgaccctgtgagatctgtacgggttgttgatcatttcaccatcgaaagaacaagaaccccagatatggagccctcttcctgattgtgcagcccttactattataaggagttgctactgctgctagaaaaattaacaataactagcttcaacacacagtattgtttttgtttccacatccagccaataggtggaccgaggtgatctgcccttgtcggcgtccccgctttactgacctcacctgcagcattgtaatctgtatagaaagaaaattcacctgctgcctattgcttgtattcaatcaaaggaactctaaaaaaaagagtgttacagaagaatgttttgagaaagcaaagggatgaatcgattcatcatcatttactaaag

SEQ ID NO: 210520 - DNA, 3647 bp, Zea Mays
ccgatgcggatgcggatgccgatgccgatgccgaagcgcacctgtctcttctccttgccgaccctccacccccagccgaagtgaggccaccaatcacacagccgctccccccgctcgtcctcctcccctgcccctgcctccgcccccgcccccgcccccgccccgccacgccagcatttggattggattgccggcggccgagtggaggcggagatccatccggactccggtgagtccgttcccgctgccgtgcttgatccaggcacgcatgacatcacatcagttcagctagatgcctgaaggagaagttcagtagcacaccactacctcacaaaacagctcttctgctcgtgcaaaagtatccagggtccagatgggttcagacaagcagattggtagcccacgccaactcttggaaacactaaagatgggcagagttaggactatcctgacacatacatacccgtaccctcacgagcactccaggcatattatgactgcagtgattattgcctgtctcttctttatatcgtctgacaacatgcacacgctcatacataaactggataacaatatcaagtggtggtccatgtatgtttgcctcattggcttcttctatttcttctcatctccttttcttggaaggaccattcagcccagctactcaaattttaaccgctggtatgttgcttggatttgctttgcatccctgtaccatcttcctagcttccagtcaatgggggttgatatgcgcatgaacctctcgcttttcttgacaatatatttctcctcagtgcttttcatcattgcctttcatatcatatttattggtctctggtacattgggttggttgcacgcttggcaggaacgaggccaggcgtatggacaattctccagaactgtacagtaatcagcattgcatgttgtgtgttctacagtcattgtgggaatcttgctgtgcacaagagcaaatcttttgttgaaagatgagatatgttcgtcttggtttgctcctgttggatctgcaagtgactatcctattctggcaaaatgggttatctacggggagttagtttgcagcggatcctgtgctggcccatcggatgaaatctctcctttgtactcattatgggctacatttgttggcctctatatcgctaactttgttgtggagagatcaactgggtgggctcttacccacccgtcaacagatttggaggatgagaaactgaagaggcatatgaaaccagattttctggacatggtaccttggtattcagggacatcagctgatttattcaagacagcatttgatcttatggtctctgtgactctttttgttgggcgatttgacatgcgcatgatgcaggctgcaatgaaaggaccaacaggcaacactccaaatgatgacctattgtatgaccacttcaatgaaagggaagacctttggtttgactttgttgcagacaccggtgatggagggaattcatcatatacagttgcccgactgttagcccaaccatctattaggactgttatcggtggctctatgcatactcttccacgtgggaacttacttattatcggcggagatcttgcgtacccaaacccttcatcatttacatacgagaggcgcttctttaggccttttgagtatgctctgcaacctccaccttggtacagagatgaacatatagctttggataagcctgagcttcctcctggtgtatcaaagatgactgaatatgatggaccacagtgtttcataattcctggaaatcatgactggtttgatgggcttcatacttttatgagatatatatgtcataaaagctggttaggtggatggtttctgcctcagaagaagagttattttgcattgcatcttcccaagggttggtggatatttggtcttgatttatctctccatggcgatgttgatgtataccaattcaagttctttgctgatgtttgtcagaataaggttggagagaatgattctgtgattgtagtaacacatgagccaaactggcttcttgattggtactggaatgagactacaggcaagaatgtatcacacttaattcaggaatacctgaaaggaagatgtaaacttcgcatggcaggggatttacaccattttatgaggcactctgccactcgatcagaaaagaataattttgtgcaacacttgcttgttaatggatgtggtggtgcctttttgcacccaacacatgttttcagaaactttgagaggttctctggaaccacctatgaatgcaaggcagcttatccatcctatgatgagtctactgggattgcattgggtaacatattgaagttccgcaaaaagaattggcagtttgacatcattggcggttttatatacttcattttggtgttttcaatgttcccacagtgtaatcttgttcgtatcttaaatgaagaaacttggtctgggcgtctgaaaagcttctcaggcacaatatggagtgctttgctttatatttttgagcactcttatgtctcttcagtaggaagtcttactttattgacggcgtcatattcattcgtaccatccaaactatcaaggaggagaagagctattataggcggcctccatgttttggcccatttaactgcagcactacttttaatgttgctgctggagttgggcattgaaatttgtattcgtaaccatttattggcaacttcaggttatcacactctgtatgaatggtatcgatccatggaaagtgagcattttccagatcctactggtcttcgtgctcgtttggagcaatggactctgggactgtatccagcatgtataaaatatcttatggcagcctttgacgtccctgaggtcatggctgtgacaagaataaatatatgcaagaacggaatgatgtctctttcgcggagtgttctgatcatgtactacacttctgtgtttatctatttctggattttctcgactccagttgtttctctcatatttggtagttacctatacatctgcatcaattggttccacatacactttgatgaagccttctcgtcgctgcgcatcgcaaactacaaatccttcacaaggttccatgttaagaaggatggtgatctagaaatatttactcttgcagttgacaaggtcccaaaggactggaagttggatccgaggtgggaatcagagggacgagggcctcatcagctcagccatgaccggaagcatccaagcaagtggaggtcagcctcatcaactgaccctgtgagatctgtacgggttgttgatcatttcaccatcgaaagaacaagaaccccagatatggagccctcttcctgattgtgcagcccttactattataaggagttgctactgctgctagaaaaattaacaataactagcttcaacacacagtattgtttttgtttccacatccagccaataggtggaccgaggtgatctgcccttgtcggcgtccccgctttactgacctcacctgcagcattgtaatctgtatagaaagaaaattcacctgctgcctattgcttgtattcaatcaaaggaactctaaaaaaaagagtgttacagaagaatgttttgagaaagcaaagggatgaatcgattcatcatcatttactaaag

SEQ ID NO: 210521 - DNA, 3714 bp, Zea Mays
ccgatgcggatgcggatgccgatgccgatgccgaagcgcacctgtctcttctccttgccgaccctccacccccagccgaagtgaggccaccaatcacacagccgctccccccgctcgtcctcctcccctgcccctgcctccgcccccgcccccgcccccgccccgccacgccagcatttggattggattgccggcggccgagtggaggcggagatccatccggactccgatccaggcacgcatgacatcacatcagttcagctagatgcctgaaggagaagttcagtagcacaccactacctcacaaaacagctcttctgctcgtgcaaaagtatccagggtccagatgggttcagacaagcagattggtagcccacgccaactcttggaaacactaaagatgggcagagttaggactatcctgacacatacatacccgtaccctcacgagcactccaggcatattatgactgcagtgattattgcctgtctcttctttatatcgtctgacaacatgcacacgctcatacataaactggataacaatatcaagtggtggtccatgtatgtttgcctcattggcttcttctatttcttctcatctccttttcttggaaggaccattcagcccagctactcaaattttaaccgctggtatgttgcttggatttgctttgcatccctgtaccatcttcctagcttccagtcaatgggggttgatatgcgcatgaacctctcgcttttcttgacaatatatttctcctcagtgcttttcatcattgcctttcatatcatatttattggtctctggtacattgggttggttgcacgcttggcaggaacgaggccaggcgtatggacaattctccagaactgtacagtaatcagcattgcatgttgtgtgttctacagtcattgtgggaatcttgctgtgcacaagagcaaatcttttggtagtagttctgatcccaatttgcttgcttttcttaaaaatgaaaacgggagtacctggatatcaaattttctccgtatgaatcagttgaaagatgagatatgttcgtcttggtttgctcctgttggatctgcaagtgactatcctattctggcaaaatgggttatctacggggagttagtttgcagcggatcctgtgctggcccatcggatgaaatctctcctttgtactcattatgggctacatttgttggcctctatatcgctaactttgttgtggagagatcaactgggtgggctcttacccacccgtcaacagatttggaggatgagaaactgaagaggcatatgaaaccagattttctggacatggtaccttggtattcagggacatcagctgatttattcaagacagcatttgatcttatggtctctgtgactctttttgttgggcgatttgacatgcgcatgatgcaggctgcaatgaaaggaccaacaggcaacactccaaatgatgacctattgtatgaccacttcaatgaaagggaagacctttggtttgactttgttgcagacaccggtgatggagggaattcatcatatacagttgcccgactgttagcccaaccatctattaggactgttatcggtggctctatgcatactcttccacgtgggaacttacttattatcggcggagatcttgcgtacccaaacccttcatcatttacatacgagaggcgcttctttaggccttttgagtatgctctgcaacctccaccttggtacagagatgaacatatagctttggataagcctgagcttcctcctggtgtatcaaagatgactgaatatgatggaccacagtgtttcataattcctggaaatcatgactggtttgatgggcttcatacttttatgagatatatatgtcataaaagctggttaggtggatggtttctgcctcagaagaagagttattttgcattgcatcttcccaagggttggtggatatttggtcttgatttatctctccatggcgatgttgatgtataccaattcaagttctttgctgatgtttgtcagaataagctgtgcaggttggagagaatgattctgtgattgtagtaacacatgagccaaactggcttcttgattggtactggaatgagactacaggcaagaatgtatcacacttaattcaggaatacctgaaaggaagatgtaaacttcgcatggcaggggatttacaccattttatgaggcactctgccactcgatcagaaaagaataattttgtgcaacacttgcttgttaatggatgtggtggtgcctttttgcacccaacacatgttttcagaaactttgagaggttctctggaaccacctatgaatgcaaggcagcttatccatcctatgatgagtctactgggattgcattgggtaacatattgaagttccgcaaaaagaattggcagtttgacatcattggcggttttatatacttcattttggtgttttcaatgttcccacagtgtaatcttgttcgtatcttaaatgaagaaacttggtctgggcgtctgaaaagcttctcaggcacaatatggagtgctttgctttatatttttgagcactcttatgtctcttcagtaggaagtcttactttattgacggcgtcatattcattcgtaccatccaaactatcaaggaggagaagagctattataggcggcctccatgttttggcccatttaactgcagcactacttttaatgttgctgctggagttgggcattgaaatttgtattcgtaaccatttattggcaacttcaggttatcacactctgtatgaatggtatcgatccatggaaagtgagcattttccagatcctactggtcttcgtgctcgtttggagcaatggactctgggactgtatccagcatgtataaaatatcttatggcagcctttgacgtccctgaggtcatggctgtgacaagaataaatatatgcaagaacggaatgatgtctctttcgcggagtgttctgatcatgtactacacttctgtgtttatctatttctggattttctcgactccagttgtttctctcatatttggtagttacctatacatctgcatcaattggttccacatacactttgatgaagccttctcgtcgctgcgcatcgcaaactacaaatccttcacaaggttccatgttaagaaggatggtgatctagaaatatttactcttgcagttgacaaggtcccaaaggactggaagttggatccgaggtgggaatcagagggacgagggcctcatcagctcagccatgaccggaagcatccaagcaagtggaggtcagcctcatcaactgaccctgtgagatctgtacgggttgttgatcatttcaccatcgaaagaacaagaaccccagatatggagccctcttcctgattgtgcagcccttactattataaggagttgctactgctgctagaaaaattaacaataactagcttcaacacacagtattgtttttgtttccacatccagccaataggtggaccgaggtgatctgcccttgtcggcgtccccgctttactgacctcacctgcagcattgtaatctgtatagaaagaaaattcacctgctgcctattgcttgtattcaatcaaaggaactctaaaaaaaagagtgttacagaagaatgttttgagaaagcaaagggatgaatcgattcatcatcatttactaaag

SEQ ID NO: 210522 - DNA, 3617 bp, Zea Mays
ccgatgcggatgcggatgccgatgccgatgccgaagcgcacctgtctcttctccttgccgaccctccacccccagccgaagtgaggccaccaatcacacagccgctccccccgctcgtcctcctcccctgcccctgcctccgcccccgcccccgcccccgccccgccacgccagcatttggattggattgccggcggccgagtggaggcggagatccatccggactccggtgagtccgttcccgctgccgtgcttgatccaggcacgcatgacatcacatcagttcagctagatgcctgaaggagaagttcagtagcacaccactacctcacaaaacagctcttctgctcgtgcaaaagtatccagggtccagatgggttcagacaagcagattggtagcccacgccaactcttggaaacactaaagatgggcagagttaggactatcctgacacatacatacccgtaccctcacgagcactccaggcatattatgactgcagtgattattgcctgtctcttctttatatcgtctgacaacatgcacacgctcatacataaactggataacaatatcaagtggtggtccatgtatgtttgcctcattggcttcttctatttcttctcatctccttttcttggaaggaccattcagcccagctactcaaattttaaccgctggtatgttgcttggatttgctttgcatccctgtaccatcttcctagcttccagtcaatgggggttgatatgcgcatgaacctctcgcttttcttgacaatatatttctcctcagtgcttttcatcattgcctttcatatcatatttattggtctctggtacattgggttggttgcacgcttggcaggaacgaggccaggcgtatggacaattctccagaactgtacagtaatcagcattgcatgttgtgtgttctacagtcattgtgggaatcttgctgtgcacaagagcaaatcttttggtagtagttctgatcccaatttgcttgcttttcttaaaaatgaaaacgggagtacctggatatcaaattttctccgtatgaatcagttgaaagatgagatatgttcgtcttggtttgctcctgttggatctgcaagtgactatcctattctggcaaaatgggttatctacggggaggtgggctcttacccacccgtcaacagatttggaggatgagaaactgaagaggcatatgaaaccagattttctggacatggtaccttggtattcagggacatcagctgatttattcaagacagcatttgatcttatggtctctgtgactctttttgttgggcgatttgacatgcgcatgatgcaggctgcaatgaaaggaccaacaggcaacactccaaatgatgacctattgtatgaccacttcaatgaaagggaagacctttggtttgactttgttgcagacaccggtgatggagggaattcatcatatacagttgcccgactgttagcccaaccatctattaggactgttatcggtggctctatgcatactcttccacgtgggaacttacttattatcggcggagatcttgcgtacccaaacccttcatcatttacatacgagaggcgcttctttaggccttttgagtatgctctgcaacctccaccttggtacagagatgaacatatagctttggataagcctgagcttcctcctggtgtatcaaagatgactgaatatgatggaccacagtgtttcataattcctggaaatcatgactggtttgatgggcttcatacttttatgagatatatatgtcataaaagctggttaggtggatggtttctgcctcagaagaagagttattttgcattgcatcttcccaagggttggtggatatttggtcttgatttatctctccatggcgatgttgatgtataccaattcaagttctttgctgatgtttgtcagaataaggttggagagaatgattctgtgattgtagtaacacatgagccaaactggcttcttgattggtactggaatgagactacaggcaagaatgtatcacacttaattcaggaatacctgaaaggaagatgtaaacttcgcatggcaggggatttacaccattttatgaggcactctgccactcgatcagaaaagaataattttgtgcaacacttgcttgttaatggatgtggtggtgcctttttgcacccaacacatgttttcagaaactttgagaggttctctggaaccacctatgaatgcaaggcagcttatccatcctatgatgagtctactgggattgcattgggtaacatattgaagttccgcaaaaagaattggcagtttgacatcattggcggttttatatacttcattttggtgttttcaatgttcccacagtgtaatcttgttcgtatcttaaatgaagaaacttggtctgggcgtctgaaaagcttctcaggcacaatatggagtgctttgctttatatttttgagcactcttatgtctcttcagtaggaagtcttactttattgacggcgtcatattcattcgtaccatccaaactatcaaggaggagaagagctattataggcggcctccatgttttggcccatttaactgcagcactacttttaatgttgctgctggagttgggcattgaaatttgtattcgtaaccatttattggcaacttcaggttatcacactctgtatgaatggtatcgatccatggaaagtgagcattttccagatcctactggtcttcgtgctcgtttggagcaatggactctgggactgtatccagcatgtataaaatatcttatggcagcctttgacgtccctgaggtcatggctgtgacaagaataaatatatgcaagaacggaatgatgtctctttcgcggagtgttctgatcatgtactacacttctgtgtttatctatttctggattttctcgactccagttgtttctctcatatttggtagttacctatacatctgcatcaattggttccacatacactttgatgaagccttctcgtcgctgcgcatcgcaaactacaaatccttcacaaggttccatgttaagaaggatggtgatctagaaatatttactcttgcagttgacaaggtcccaaaggactggaagttggatccgaggtgggaatcagagggacgagggcctcatcagctcagccatgaccggaagcatccaagcaagtggaggtcagcctcatcaactgaccctgtgagatctgtacgggttgttgatcatttcaccatcgaaagaacaagaaccccagatatggagccctcttcctgattgtgcagcccttactattataaggagttgctactgctgctagaaaaattaacaataactagcttcaacacacagtattgtttttgtttccacatccagccaataggtggaccgaggtgatctgcccttgtcggcgtccccgctttactgacctcacctgcagcattgtaatctgtatagaaagaaaattcacctgctgcctattgcttgtattcaatcaaaggaactctaaaaaaaagagtgttacagaagaatgttttgagaaagcaaagggatgaatcgattcatcatcatttactaaag

SEQ ID NO: 210523 - DNA, 3522 bp, Zea Mays
ccgatgcggatgcggatgccgatgccgatgccgaagcgcacctgtctcttctccttgccgaccctccacccccagccgaagtgaggccaccaatcacacagccgctccccccgctcgtcctcctcccctgcccctgcctccgcccccgcccccgcccccgccccgccacgccagcatttggattggattgccggcggccgagtggaggcggagatccatccggactccggtgagtccgttcccgctgccgtgcttgatccaggcacgcatgacatcacatcagttcagctagatgcctgaaggagaagttcagtagcacaccactacctcacaaaacagctcttctgctcgtgcaaaagtatccagggtccagatgggttcagacaagcagattggtagcccacgccaactcttggaaacactaaagatgggcagagttaggactatcctgacacatacatacccgtaccctcacgagcactccaggcatattatgactgcagtgattattgcctgtctcttctttatatcgtctgacaacatgcacacgctcatacataaactggataacaatatcaagtggtggtccatgtatgtttgcctcattggcttcttctatttcttctcatctccttttcttggaaggaccattcagcccagctactcaaattttaaccgctggaacgaggccaggcgtatggacaattctccagaactgtacagtaatcagcattgcatgttgtgtgttctacagtcattgtgggaatcttgctgtgcacaagagcaaatcttttggtagtagttctgatcccaatttgcttgcttttcttaaaaatgaaaacgggagtacctggatatcaaattttctccgtatgaatcagttgaaagatgagatatgttcgtcttggtttgctcctgttggatctgcaagtgactatcctattctggcaaaatgggttatctacggggagttagtttgcagcggatcctgtgctggcccatcggatgaaatctctcctttgtactcattatgggctacatttgttggcctctatatcgctaactttgttgtggagagatcaactggatttggaggatgagaaactgaagaggcatatgaaaccagattttctggacatggtaccttggtattcagggacatcagctgatttattcaagacagcatttgatcttatggtctctgtgactctttttgttgggcgatttgacatgcgcatgatgcaggctgcaatgaaaggaccaacaggcaacactccaaatgatgacctattgtatgaccacttcaatgaaagggaagacctttggtttgactttgttgcagacaccggtgatggagggaattcatcatatacagttgcccgactgttagcccaaccatctattaggactgttatcggtggctctatgcatactcttccacgtgggaacttacttattatcggcggagatcttgcgtacccaaacccttcatcatttacatacgagaggcgcttctttaggccttttgagtatgctctgcaacctccaccttggtacagagatgaacatatagctttggataagcctgagcttcctcctggtgtatcaaagatgactgaatatgatggaccacagtgtttcataattcctggaaatcatgactggtttgatgggcttcatacttttatgagatatatatgtcataaaagctggttaggtggatggtttctgcctcagaagaagagttattttgcattgcatcttcccaagggttggtggatatttggtcttgatttatctctccatggcgatgttgatgtataccaattcaagttctttgctgatgtttgtcagaataaggttggagagaatgattctgtgattgtagtaacacatgagccaaactggcttcttgattggtactggaatgagactacaggcaagaatgtatcacacttaattcaggaatacctgaaaggaagatgtaaacttcgcatggcaggggatttacaccattttatgaggcactctgccactcgatcagaaaagaataattttgtgcaacacttgcttgttaatggatgtggtggtgcctttttgcacccaacacatgttttcagaaactttgagaggttctctggaaccacctatgaatgcaaggcagcttatccatcctatgatgagtctactgggattgcattgggtaacatattgaagttccgcaaaaagaattggcagtttgacatcattggcggttttatatacttcattttggtgttttcaatgttcccacagtgtaatcttgttcgtatcttaaatgaagaaacttggtctgggcgtctgaaaagcttctcaggcacaatatggagtgctttgctttatatttttgagcactcttatgtctcttcagtaggaagtcttactttattgacggcgtcatattcattcgtaccatccaaactatcaaggaggagaagagctattataggcggcctccatgttttggcccatttaactgcagcactacttttaatgttgctgctggagttgggcattgaaatttgtattcgtaaccatttattggcaacttcaggttatcacactctgtatgaatggtatcgatccatggaaagtgagcattttccagatcctactggtcttcgtgctcgtttggagcaatggactctgggactgtatccagcatgtataaaatatcttatggcagcctttgacgtccctgaggtcatggctgtgacaagaataaatatatgcaagaacggaatgatgtctctttcgcggagtgttctgatcatgtactacacttctgtgtttatctatttctggattttctcgactccagttgtttctctcatatttggtagttacctatacatctgcatcaattggttccacatacactttgatgaagccttctcgtcgctgcgcatcgcaaactacaaatccttcacaaggttccatgttaagaaggatggtgatctagaaatatttactcttgcagttgacaaggtcccaaaggactggaagttggatccgaggtgggaatcagagggacgagggcctcatcagctcagccatgaccggaagcatccaagcaagtggaggtcagcctcatcaactgaccctgtgagatctgtacgggttgttgatcatttcaccatcgaaagaacaagaaccccagatatggagccctcttcctgattgtgcagcccttactattataaggagttgctactgctgctagaaaaattaacaataactagcttcaacacacagtattgtttttgtttccacatccagccaataggtggaccgaggtgatctgcccttgtcggcgtccccgctttactgacctcacctgcagcattgtaatctgtatagaaagaaaattcacctgctgcctattgcttgtattcaatcaaaggaactctaaaaaaaagagtgttacagaagaatgttttgagaaagcaaagggatgaatcgattcatcatcatttactaaag

SEQ ID NO: 210524 - DNA, 1424 bp, Zea Mays
aaaaagtttaaccgtagcgagacgcacatgcacccaagacaagcaccgaagatggcttgacgcccgaatccagaccctcgtctgttatggcggcggcggaggcggcgccaccgccgatactcgagctggacccgtcgcacgatcgagccgtcagcgttgtcgaggacatcgtgcgtctagagcggaggatctttccgaagcacgaatcgctggcgcggtccctgcacgacgagctaaagcggcggaactccgggctgatctacaagacgtccagcgccgacgagggggaggtcatcgggtatgccatgtacacctgcaacacatccctctgcgccaccatcaccaagctcgccgtgaaggagaactgcaggcggcagggccacggcgaggcgctgctggcgggcgcagtggagcggtgccggcggcggaaggtccagcggctctccctccacgtcgaccccacgaggacggctgccgtggcgctgtaccgcaaggccgggttccaggtcgacaccaccgtcgagggctactacgcgcctcacagggacgcctaccggatgttcttggatctgtagtagaaccgtcgaggacgagaaaaccagcccatgtgttccggcagctgctgccggcttgtagctggtctggtctggtgatacaatacctcgtgagtaggatacagccaacagccgagcagggtggatgattcgaagctgtaagaacgatctgctagaaagttttcataccaccaaggtaattcccgctggattctgaaaataatgtttccgtattatatgagcataaggtttcagtaactgcaactgtagttaggatatcactttggctgtatggtagtaattcagttcatagatgctgccacatcagttcctcctccattgtcaaggtagctcggcaagaatttggtggacaattttgaccttatggcaatgctgattcacagcaggagggagcaaaccaatcccgcaagtgtgcctggcccatcggaaggccgatgcgctggagtctcggagaacacccagcgggcagtgcctatgcaaggccggcggcggcgacggcgggtcagctcacaggaagattgctcgggacggacggagagggaggctttgcgtcaaggaagaagtcgttggtggtactcattacccagtggtcatgttcaaactcttatccaccttttttttttgaaaggggtcttatccacctcatttaggctttgttcggttagctctcaatccatgtggattgagcgagattggatggatttgaatctcaaataagtcaaacttcttctcaattttttccaatctcatccaatccatgtgttttagaaataaccgaacaagcccttacagggtagaatagaatacgggagtggattatccatgggtgaatcttcagctcaattcacg

SEQ ID NO: 210525 - DNA, 1251 bp, Zea Mays
cccaagacaagcaccgaagatggcttgacgcccgaatccagaccctcgtctgttatggcggcggcggaggcggcgccaccgccgatactcgagctggacccgtcgcacgatcgagccgtcagcgttgtcgaggacatcgtgcgtctagagcggaggatctttccgaagcacgaatcgctggcgcggtccctgcacgacgagctaaagcggcggaactccgggctgatctacaagacgtccagcgccgacgagggggaggtcatcgggtatgccatgtacacctgcaacacatccctctgcgccaccatcaccaagctcgccgtgaaggagaactgcaggcggcagggccacggcgaggcgctgctggcgggcgcagtggagcggtgccggcggcggaaggtccagcggctctccctccacgtcgaccccacgaggacggctgccgtggcgctgtaccgcaaggccgggttccaggtcgacaccaccgtcgagggctactacgcgcctcacagggacgcctaccggatgttcttggatctgtagtagaaccgtcgaggacgagaaaaccagcccatgtgttccggcagctgctgccggcttgtagctggtctggtctggtgatacaatacctcgtgagtaggatacagccaacagccgagcagggtggatgattcgaagctgtaagaacgatctgctagaaagttttcataccaccaagagaaaatcgaaagcccaatctgattcagcatcgattcaagtaccccttaggcaatgctgattcacagcaggagggagcaaaccaatcccgcaagtgtgcctggcccatcggaaggccgatgcgctggagtctcggagaacacccagcgggcagtgcctatgcaaggccggcggcggcgacggcgggtcagctcacaggaagattgctcgggacggacggagagggaggctttgcgtcaaggaagaagtcgttggtggtactcattacccagtggtcatgttcaaactcttatccaccttttttttttgaaaggggtcttatccacctcatttaggctttgttcggttagctctcaatccatgtggattgagcgagattggatggatttgaatctcaaataagtcaaacttcttctcaattttttccaatctcatccaatccatgtgttttagaaataaccgaacaagcccttacagggtagaatagaatacgggagtggattatccatgggtgaatcttcagctcaattcacg

SEQ ID NO: 210526 - DNA, 1201 bp, Zea Mays
cccaagacaagcaccgaagatggcttgacgcccgaatccagaccctcgtctgttatggcggcggcggaggcggcgccaccgccgatactcgagctggacccgtcgcacgatcgagccgtcagcgttgtcgaggacatcgtgcgtctagagcggaggatctttccgaagcacgaatcgctggcgcggtccctgcacgacgagctaaagcggcggaactccgggctgatctacaagacgtccagcgccgacgagggggaggtcatcgggtatgccatgtacacctgcaacacatccctctgcgccaccatcaccaagctcgccgtgaaggagaactgcaggcggcagggccacggcgaggcgctgctggcgggcgcagtggagcggtgccggcggcggaaggtccagcggctctccctccacgtcgaccccacgaggacggctgccgtggcgctgtaccgcaaggccgggttccaggtcgacaccaccgtcgagggctactacgcgcctcacagggacgcctaccggatgttcttggatctgtagtagaaccgtcgaggacgagaaaaccagcccatgtgttccggcagctgctgccggcttgtagctggtctggtctggtgatacaatacctcgtgagtaggatacagccaacagccgagcagggtggatgattcgaagctgtaagaacgatctgctagaaagttttcataccaccaaggcaatgctgattcacagcaggagggagcaaaccaatcccgcaagtgtgcctggcccatcggaaggccgatgcgctggagtctcggagaacacccagcgggcagtgcctatgcaaggccggcggcggcgacggcgggtcagctcacaggaagattgctcgggacggacggagagggaggctttgcgtcaaggaagaagtcgttggtggtactcattacccagtggtcatgttcaaactcttatccaccttttttttttgaaaggggtcttatccacctcatttaggctttgttcggttagctctcaatccatgtggattgagcgagattggatggatttgaatctcaaataagtcaaacttcttctcaattttttccaatctcatccaatccatgtgttttagaaataaccgaacaagcccttacagggtagaatagaatacgggagtggattatccatgggtgaatcttcagctcaattcacg

SEQ ID NO: 210527 - DNA, 1181 bp, Zea Mays
cccaagacaagcaccgaagatggcttgacgcccgaatccagaccctcgtctgttatggcggcggcggaggcggcgccaccgccgatactcgagctggacccgtcgcacgatcgagccgtcagcgttgtcgaggacatcgtgcgtctagagcggaggatctttccgaagcacgaatcgctggcgcggtccctgcacgacgagctaaagcggcggaactccgggctgatctacaagacgtccagcgccgacgagggggaggtcatcgggtatgccatgtacacctgcaacacatccctctgcgccaccatcaccaagctcgccgtgaaggagaactgcaggcggcagggccacggcgaggcgctgctggcgggcgcagtggagcggtgccggcggcggaaggtccagcggctctccctccacgtcgaccccacgaggacggctgccgtggcgctgtaccgcaaggccgggttccaggtcgacaccaccgtcgagggctactacgcgcctcacagggacgcctaccggatgttcttggatctgtagtagaaccgtcgaggacgagaaaaccagcccatgtgttccggcagctgctgccggcttgtagctggtctggtctggtgatacaatacctcgtgagtaggatacagccaacagccgagcagggtggatgattcgaagctgtaagaacgatctgctagaaagttttcataccaccaaggagggagcaaaccaatcccgcaagtgtgcctggcccatcggaaggccgatgcgctggagtctcggagaacacccagcgggcagtgcctatgcaaggccggcggcggcgacggcgggtcagctcacaggaagattgctcgggacggacggagagggaggctttgcgtcaaggaagaagtcgttggtggtactcattacccagtggtcatgttcaaactcttatccaccttttttttttgaaaggggtcttatccacctcatttaggctttgttcggttagctctcaatccatgtggattgagcgagattggatggatttgaatctcaaataagtcaaacttcttctcaattttttccaatctcatccaatccatgtgttttagaaataaccgaacaagcccttacagggtagaatagaatacgggagtggattatccatgggtgaatcttcagctcaattcacg

SEQ ID NO: 210528 - DNA, 1040 bp, Zea Mays
attttctgcttaagaagaaaaggggcctccgagtttccccgggactatgatggtgcgtgcctgcagatgcggctgtcgtacagtcccgcagctcatatattcctcttcctggtgcagtggacggactgcagcctcgcaggggctcttggtctgctgagaatcctcatatacaagaattactatatattcggcatgagcagctgtgatatttccttctttgctgcaactgcaaagggggatcactgatgtcgaggacaagaagcagaaggccgtatgcatggagaagtacagaaagaaagatgaggatggacgggacaccttatctgatattgatgttgagagggaagaggagtgtgggatttgcatggagatgaacagcaaagttgtgttgcccaactgcacccatgctatgtgtatcagatgttaccaggactggagttcaagatcgcagtcctgcccattctgccgtgacaacctgaagaagacctgtcctagtgacctgtggatctatgttgaggaccaagatgtggtcgacatggagacggtgtcgagcgagaacctcagacggctgttcatgtacataagcaagctgcctctgattgtcccagacgtcatcttcagcgtgtatgattcccacatcaaatgacttccgacgcgaccttcccgacgaccttcagccagtgcccagctccagttaatcttatgcccccatgtcctccattttcatgctttgctcaagcttttggaagtgcctgaactgatttggaaccgaaagccttccggtggtgctttagaaacttgtttagtgcctgcatgcatctttaatcatatgcagccactctgtacatatctgacttggctcagttaataggggactgtgcttgccccaaatggaggcagggccgtttgtgtctttctcatgtttccattagcgaagcaacgcaaagttctgggcattggaaggtttctgctgcaatgttagaatgctctctatacttaattagtctggatctactagtaataaggtataaaagtatcag

SEQ ID NO: 210529 - DNA, 1021 bp, Zea Mays
ggggacaggtgcccagacccacgggattctcacgcatcccgaacgcggccacgctcgccgcgggcacacgcggcgcgctgtgctcacccctgtctgcctgcgcgcccggcacgcccgcgcccactcacgcccggccctgccccgcgccctcatcgtctcctcccggcctcccctcaaagcccaccaccgctgcccccacgccacccaccccaccccacccccgcccctaccgcgcggtgcccgagacccagaggccagaccccggctacctttcttcacctccttcccatcgcaatcgcaagcccccggctccggcgctcggcggtcggccaggttcgggagatcacttcgtcgcggcgaggagggagggggtcgccgttagcgcgcggcacttggatgagaagggcagcggtggaggaggatgcggaaggcgtacagggactccatcaaggtgctcgaagctgacatccagcacgccaacaccctggcctccgagtttccccgggactatgatggtgcgtgcctgcagatgcggctgtcgtacagtcccgcagctcatatattcctcttcctggtgcagtggacggactgcagcctcgcaggggctcttggtctgctgagaatcctcatatacaaggtttatgtggatggcacaacaaccatgtcgactcatgagaggaaatccagcatcaaagaattctatgctgtgatatttccttctttgctgcaactgcaaagggggatcactgatgtcgaggacaagaagcagaaggccgtatgcatggagaagtacagaaagaaagatgaggatggacgggacaccttatctgatattgatgttgagagggaagaggagtgtgggatttgcatggagatgaacagcaaagttgtgttgcccaactgcacccatgctatgtgtatcagatgttaccaggactgggttcattgtattatatcagcattaagattgaatgctgtctatgttccagataccatactttgacgataacattggttttcc

SEQ ID NO: 210530 - DNA, 1927 bp, Zea Mays
aagcttattattagcttatataagaactcagtagaaatggagttcttcacagagtacggagaggcaagccagtaccagatccaagaagtcattggtaaagggagctacggagtagttgctgcagctgtggacacccgcaccggtgagcgggttgctatcaagaagatcaatgatgtgtttgagcacgtctcggatgccacacgcatactgcgggagatcaagctcctccggttgcttcgtcacccagacatagtcgagattaagcacatcatgctccctccttctcggagggagttccaagacatctatgttgtttttgagctcatggagtcggatctccatcaagtgatcagggcgaatgatgacctcacccctgaacatcaccagtttttcctgtaccaacttcttcgagctctcaagtacatacatgccgctaatgtattccatcgtgatctaaagcccaagaatatactggctaactcggactgcaaactgaaaatatgtgactttggacttgcccgtgcatcattcaatgatgccccttcagctatattttggacagactatgtggcaacaaggtggtaccgggcacctgaactatgtggttcctttttctccaaatacactcctgcaattgatatttggagcattgggtgcatatttgctgaacttctcactggaaggccactatttcctgggaagaatgttgtacaccaattagatattataacagatcttcttgggactccatcatctgagaccttatcccggattcgaaatgagaaggccaggagatatttgagctgcatgcggaaaaaatatcccgtgccctttactcataaatttcgacatgctgatcctttggctcttcgtcttctagagcgtttgcttgcatttgatcctaaagaccggcctagtgcagaagaggctctagctgatccatactttgcatcccttgctaatgtggaacgtgagccatcaagacacccgatttctaaacttgagtttgaatttgaaagaaagaagctggccaaagatgatgttagagaactgatctatcgagagattttggagtatcatccacagatgctggaggagtacatgaaaggcggagaacagattagcttcctctatccaagcggagtcgaccgcttcaaactgcagttcgctcatcttgaggagcattacagcaaaggagaaagaggttccccactgcaaagaaagcatgcttccttaccaagggaaagagtggttgtatccaaggatggcaatactgaacaacaaattaatgaccaggagagaagcgcagattctgttgcccgcactaccgtgagccctccaaggtcagaggatgctgacatggatgatgtgaaacccacaagcttaagctctcggagctacctgaagagtgcaagcataagcgcttccaagtgcgtcgttgtcagaaataaacacccagagccagaggatgatggaatacctgaggagatggaaggcaccgtcgatggattgtctgaaaaggtctccaggatgcactcctaaggcaggactgtccatggcgacagcaatctcgacacaagatttctgtctggtgcactgtaatgccgacgacacactgtttggatcttgtgtacacccacagctagttcaactaagatgtagcactagttcgtccatggaggaagcagaatggacgatgaagtgtggtcagcctgtcgaccatgaggtgttttcttccaatggagtctagggtatgtttgagttctacaacggcttgtgccgtacgaagtgtcagcagtgtacgaggaggaggatatcgttgtcagtacacattttgcctgtctagaaaattatgagtactttctccgatcacaagtacatgtacatccatgtttgtcttaagataaaaaaagaaaattcacaaata

SEQ ID NO: 210531 - DNA, 2470 bp, Zea Mays
ttttcttttctctacaaattagaagaaagccgtccatccaatcccaactggtataacaagatcccgctcattcccatcacgcccatcattttccgttcttcaatccgtcaatccagtccccatccccacggcgccgacgactcgggggcttccccccttggacttggcccgggtgggagtagcacgtcggggaagggaagcaagcgtccgcgagtaaggacagaaaaccgaagggaggagtggagaggaggagcttgcttggagcgggtggacgtgtggtgtgtatatagttaagcgggcgggcgggcgggcagccaatgccgtcgggcgcgcagggctaggagcatgggcggagggggcgcgatcgtgcacggcttccgccgctggttccaccgccggagcgaaggctccacctccaactccaaccagtcgtccctcgccggcgagggggaagcggacgacggctcatccgatctcgaggtcatcgaggacccggatctcctcggcctccgcgccatccgcgtgcccaagcgcaagatgccgctgcccgtcgagagccacaggaagaactcagtagaaatggagttcttcacagagtacggagaggcaagccagtaccagatccaagaagtcattggtaaagggagctacggagtagttgctgcagctgtggacacccgcaccggtgagcgggttgctatcaagaagatcaatgatgtgtttgagcacgtctcggatgccacacgcatactgcgggagatcaagctcctccggttgcttcgtcacccagacatagtcgagattaagcacatcatgctccctccttctcggagggagttccaagacatctatgttgtttttgagctcatggagtcggatctccatcaagtgatcagggcgaatgatgacctcacccctgaacatcaccagtttttcctgtaccaacttcttcgagctctcaagtacatacatgccgctaatgtattccatcgtgatctaaagcccaagaatatactggctaactcggactgcaaactgaaaatatgtgactttggacttgcccgtgcatcattcaatgatgccccttcagctatattttggacagactatgtggcaacaaggtggtaccgggcacctgaactatgtggttcctttttctccaaatacactcctgcaattgatatttggagcattgggtgcatatttgctgaacttctcactggaaggccactatttcctgggaagaatgttgtacaccaattagatattataacagatcttcttgggactccatcatctgagaccttatcccggattcgaaatgagaaggccaggagatatttgagctgcatgcggaaaaaatatcccgtgccctttactcataaatttcgacatgctgatcctttggctcttcgtcttctagagcgtttgcttgcatttgatcctaaagaccggcctagtgcagaagaggctctagctgatccatactttgcatcccttgctaatgtggaacgtgagccatcaagacacccgatttctaaacttgagtttgaatttgaaagaaagaagctggccaaagatgatgttagagaactgatctatcgagagattttggagtatcatccacagatgctggaggagtacatgaaaggcggagaacagattagcttcctctatccaagcggagtcgaccgcttcaaactgcagttcgctcatcttgaggagcattacagcaaaggagaaagaggttccccactgcaaagaaagcatgcttccttaccaagggaaagagtggttgtatccaaggatggcaatactgaacaacaaattaatgaccaggagagaagcgcagattctgttgcccgcactaccgtgagccctccaaggtcagaggatgctgacatggatgatgtgaaacccacaagcttaagctctcggagctacctgaagagtgcaagcataagcgcttccaagtgcgtcgttgtcagaaataaacacccagagccagaggatgatggaatacctgaggagatggaaggcaccgtcgatggattgtctgaaaaggtctccaggatgcactcctaaggcaggactgtccatggcgacagcaatctcgacacaagatttctgtctggtgcactgtaatgccgacgacacactgtttggatcttgtgtacacccacagctagttcaactaagatgtagcactagttcgtccatggaggaagcagaatggacgatgaagtgtggtcagcctgtcgaccatgaggtgttttcttccaatggagtctagggtatgtttgagttctacaacggcttgtgccgtacgaagtgtcagcagtgtacgaggaggaggatatcgttgtcagtacacattttgcctgtctagaaaattatgagtactttctccgatcacaagtacatgtacatccatgtttgtcttaagataaaaaaagaaaattcacaaata

SEQ ID NO: 210532 - DNA, 2065 bp, Zea Mays
ctcgtcttgcgccgtcaaacttcagttattagctctatatctcggcaattgctggcatcgtccgcgttatactgatcctgtggggaaatcttctctaagttgcccacttgtgtttttgataatctgatcagctgaccagggcaccggctcggcttcaatgagaactcagtagaaatggagttcttcacagagtacggagaggcaagccagtaccagatccaagaagtcattggtaaagggagctacggagtagttgctgcagctgtggacacccgcaccggtgagcgggttgctatcaagaagatcaatgatgtgtttgagcacgtctcggatgccacacgcatactgcgggagatcaagctcctccggttgcttcgtcacccagacatagtcgagattaagcacatcatgctccctccttctcggagggagttccaagacatctatgttgtttttgagctcatggagtcggatctccatcaagtgatcagggcgaatgatgacctcacccctgaacatcaccagtttttcctgtaccaacttcttcgagctctcaagtacatacatgccgctaatgtattccatcgtgatctaaagcccaagaatatactggctaactcggactgcaaactgaaaatatgtgactttggacttgcccgtgcatcattcaatgatgccccttcagctatattttggacagactatgtggcaacaaggtggtaccgggcacctgaactatgtggttcctttttctccaaatacactcctgcaattgatatttggagcattgggtgcatatttgctgaacttctcactggaaggccactatttcctgggaagaatgttgtacaccaattagatattataacagatcttcttgggactccatcatctgagaccttatcccggattcgaaatgagaaggccaggagatatttgagctgcatgcggaaaaaatatcccgtgccctttactcataaatttcgacatgctgatcctttggctcttcgtcttctagagcgtttgcttgcatttgatcctaaagaccggcctagtgcagaagaggctctagctgatccatactttgcatcccttgctaatgtggaacgtgagccatcaagacacccgatttctaaacttgagtttgaatttgaaagaaagaagctggccaaagatgatgttagagaactgatctatcgagagattttggagtatcatccacagatgctggaggagtacatgaaaggcggagaacagattagcttcctctatccaagcggagtcgaccgcttcaaactgcagttcgctcatcttgaggagcattacagcaaaggagaaagaggttccccactgcaaagaaagcatgcttccttaccaagggaaagagtggttgtatccaaggatggcaatactgaacaacaaattaatgaccaggagagaagcgcagattctgttgcccgcactaccgtgagccctccaaggtcagaggatgctgacatggatgatgtgaaacccacaagcttaagctctcggagctacctgaagagtgcaagcataagcgcttccaagtgcgtcgttgtcagaaataaacacccagagccagaggatgatggaatacctgaggagatggaaggcaccgtcgatggattgtctgaaaaggtctccaggatgcactcctaaggcaggactgtccatggcgacagcaatctcgacacaagatttctgtctggtgcactgtaatgccgacgacacactgtttggatcttgtgtacacccacagctagttcaactaagatgtagcactagttcgtccatggaggaagcagaatggacgatgaagtgtggtcagcctgtcgaccatgaggtgttttcttccaatggagtctagggtatgtttgagttctacaacggcttgtgccgtacgaagtgtcagcagtgtacgaggaggaggatatcgttgtcagtacacattttgcctgtctagaaaattatgagtactttctccgatcacaagtacatgtacatccatgtttgtcttaagataaaaaaagaaaattcacaaata

SEQ ID NO: 210533 - DNA, 1358 bp, Zea Mays
gcttgccatcgatagtttcgttacgcctcttttaatctctccgctccttcgtatcctccccttccagtcttccactcgtaaaccactacctgcgatctccgcacccgcgctcaccggctcaccgctatctactccgcatccgccggccgccggcgagcccctcctcctccacgatccgtgcttccccggaggcaactccatgaattacatcgactccatcccgcccctcaacggagggaattacgagttatggcgagagaagcttgagctggcgcttgcgttgttagatattgatctggctatcactgatccctgtcccatcgctccggtagacccggtgcaggaagagaacgagagcgatgatgatttcaacgctcgtgtgcgcaatcatgcaccaataaaaatgaagtatgacctatacaaggtaaaatgggatcaatcgaaccgcaagtgtctgatggtgattaagagctctattatggatacaatcaggggagcattcccagcatgtaccaccgctacagagtatcttagtaaggtggagagtcactttactatctcttcaaaggcttatgcatgcacaataattgaaaggctacttaccgataaatacactggcggtggagtaagagagcatatattgaagatggccagcatggcttccaagcttaaacctatggaaatggcgctcccagatgagtttctggtctatttgatttttgcctctctgcctaaagaatttgaagcttttgagattaattataactcacaaccagacaattggggcattgagaaactgattgccatgtgtgtgcaagaagaggaaagaattaaggcttcacgtggtgattctatcaactatgttgggatatataaggcacatggcaaggctccacagaatgatcaccatctgaaaaataaagaggtggacaagaatgattgctactggtgcgaaaagtcagggcatcatcagaaggattgtccatccttcctgaagcacttgatcaataaagggattccatacgaggaggacccttcaaagaggagaaagatgcattaaagtcgtcaatggtgttgatgatgaagttgaagtgatagaacttccattattattgaataatagcttcattcttcacttgaataatgttctctatgtatcatctttcctgtcatgcgaatttaagctctctaatttattagaaatagaaaaatagatcctttcatgtaatgatatcgtgatattccatgttactccttttttgggtcgatgtagagacctccattgcatatgactggtattcaactaacaatatataggtcaaatatttcgaaattgactacctatgactgctgtttca

SEQ ID NO: 210534 - DNA, 914 bp, Zea Mays
cagcacggtgcatacccaatcagttcccgttcccctcgtcgacacctgcagtgccaagttgcatcgactcctccccggtcctccaccgcccgccgccgatggatgtggatgtggacgaggccaccgccacccctgcctccgcctctgccaagcccgcttccaacggcgaggccccctccggcgcccgcgaggtggatgtcggcgaggagtacacgctcgccggcgttctgcgcagcttcgtcgacggcgtctggtacccggacgagccgctgctccggcggctccgggcggcgtcctgcgaggccgcgccgcggctgaagggggcgtctcggaactcagcgcgggatctgctcgagtggacaaggcagggcagcggcctccgcgccatcctcgtcatctcggtcgggacaatcatgcctatagcattgactggccttttaatcttcatgttctttctgctaattgccactgctaatgcgatcatcgtctcagccctgatgtcactggccgctgctggcggattcttggctatcttctttgcttgcttggttgcagtgtatattggagcagtaggagttgctatctttgccatttctgccattgtcatctcatcagttgttggagttatgattactactggttgggttgggttcttctggatgatctggttcaccgcaaggaagagcatggacctgacgaagcattccatcagcatgacgagctcggcagtccaatcctattccgcgtcccgccaagtgaagcagaagcatgtcgactgaggctagttggttgcgtcttgcgtcctgtatgaagaagccctcgggtcgatctgggtgaattacggtatgcagtatgtacatgccgattcatgagttgataataaaactatcactatattttttttcctttttcca

SEQ ID NO: 210535 - DNA, 1574 bp, Zea Mays
ttgagtttcttaaactccacaccacctaagtcaacacatcaccaatctcaaagcaacgggcacgctgaggagggcgtcagggcgagacaacccgctcgccgtggaccgtggtgccgccgcgcgcccgctgccctgctcccctccaccttccgcgcccttgcactgctgcctccagtatactgcgtcggcgaagcttccagaattccttgcctagggtttctccgggcagccttcgatggggcctcccttcttccttctcttcctcgtcctcacggccgctgcggtcgtgtcctcggccccccggcgggaggcgttccgccgggacccagggcacccgcactggcaccatggcgctttccacgatgtcgaggacagtgtccgcgccgacgtccgccgcatgctccacacccgagcagaggttccatttcaagtgcctcttgaggttaatgttgttcttattggtttcaatggtgatggagggtatagatactctttggatgggcacaagctcgaagaattcctaaaaatgggtttcccacttcacaggccctcttgctttgagacaggggagccaattgatatcgagcatcatattatgtacaatgttatatcggctggacaaccggagctgatatctctcgagaagtcactgaaggaggccatgcaacctgcaggaattgcaagagatagtgaatatggcagggaattgcctctatttgaagtagaagcgactgcagtggaatcgatatttcagaggctatactcattcatttttgacatggagcctggttatcctgcaaatgacatggataggcctgttcctgttgcgatatttattgttaattttgataaggttagaatggatcctcgaaacaaagaagttaatctcgatagtttaatgtatggtacaattggtggactaacagaacaagaactaaaaaaacaagaagcagaatacatttaccgttaccgttacaatggtggtggggcaactcaagtttggctaagttctggaagatttgttgtaatagatctttcagcgggcccttgtacatatgggaaaatagaaactgaagaaggcagtgtcagctataggtcaatgccacggctgtcacaaataatcttcccaagaggacttgctgccccaagtgctagttcaacgcaagatattttcattgggcagctcggaggtgcaattgcaactaccattgagcatgtgatagctcctgatataagatttgaaactgttgacatggcagtgaggttgcttgtacctattattgtgctacagaaccacaataggtacaacattcttcaagaaggccataactatagtatagatgttcaagctatagaaagggaggttaaaaagatggtccaccctggtcaggaggtaataataatttctggttcgcatgcgctgcaccagcatgaaaagttagctgttgcagtttccaaagcaacacgtagccattctcttcatgaaacaaagagtgatggccggtttcatgtccgtaccaaaacttacttggatggagcaatacttaaagagcattgcaatggctgtgttcagc

SEQ ID NO: 210536 - DNA, 1992 bp, Zea Mays
tctggcctttcaagggaaggtgtcaagatttgttgtaatagatctttcagcgggcccttgtacatatgggaaaatagaaactgaagaaggcagtgtcagctataggtcaatgccacggctgtcacaaataatcttcccaagaggacttgctgccccaagtgctagttcaacgcaagatattttcattgggcagctcggaggtgcaattgcaactaccattgagcatgtgatagctcctgatataagatttgaaactgttgacatggcagtgaggttgcttgtacctattattgtgctacagaaccacaataggtacaacattcttcaagaaggccataactatagtatagatgttcaagctatagaaagggaggttaaaaagatggtccaccctggtcaggaggtaataataatttctggttcgcatgcgctgcaccagcatgaaaagttagctgttgcagtttccaaagcaacacgtagccattctcttcatgaaacaaagagtgatggccggtttcatgtccgtaccaaaacttacttggatggagcaatacttaaagaggaaatggagcggtctgctgatgtgctgtctgctggtctattagaagttgcaaatccttctctctcaagtagattcttcctaaagcagcattggactgatggagaagatgatgtaaaagactctattaagcacaggcccttgtgggaatcttacatgcccaaaaataataaaggaaggagaggaactggaaagaagaaacatggaagtctgtacagaacttatgggaccagagtgatcccagtttttgtattatcactggccggtgtcgatgctgaacttctcatggaagaggagagtcttgtttggacaagtaaagatgttgttattgtgcttgagcataacaatgaaaagattcctctaagctatgtgtcagaaacgactaggcagtttgctcttccatctatcgcacagcgccacatcttggctggtctggcatcagcagttggcggtctgagtgcaccatatgaaagagcatcacgtattcatgaaagacatgtagtgaactggctgtgggctgcaggctgtcatccgtttggaccattctcgaactcctcacagatcagtcaaattcttcaggatgtagcactgagaactacaatttatgctcaagtcgatgctgctcttcgcaaaataagagacacatcagagtttgtccaatcttttgcatcagagcatcttaagacgccattaggagaacttgtgaaaggtaataaaaacaagtccaccactgagttatgggtagagaaattctataagaaggtaaccaatctaccggagccttttccccatgatcttgttgagaagttagaagaatacctggataaacttgaagggcaactcgtggacttgtcttccttattgtatgaccaccggctggtcgatgcatatcaaaacagtaccgatatcctgcaaagcactatttttacacaacagtatgtggaacgtgttctagctaacgagagagacaagatgaaatgctgtagcattgaatatagtcatccaaagcagtcatcccaggcttttgtctatggagggatccttctggctggatttcttgtgtattcactggttattttcttctcttcacctgttcgctaattttatgtccagatgcagaaagtcttggatgctttatggtaggctaggtttgtctggggctgtcaatcttcatgagggaatggcctgaactgtcttggatacagaagggctttggcacagttttagtgctctatttctcgacacacaagcaatcagacggctgatatatatgtaactgattcttgtctgcgataaactatagtcgatttcacagaagagctggtgcatgctatgaaaatatgaaatactttcatcccattttgcaacttgttactgcagaactgcacataacaccactgacagaaacccccgtttgttaataagccccccag

SEQ ID NO: 210537 - DNA, 1821 bp, Zea Mays
caggagatctgcaagtcaaccgaacagacattcgctggaagctctgctcggagtgaggtcgctgcgcatctaccacacgatgccgccgcctctccgctgtctccttctcgccttcgtcgtcgtcctctccggcttcccccgtctcgcccaccccttcacggctctcgagtctgaccagatcgcccgcttccaggaatacctccgcatccgaactgcgcacccatcccccgactacgccggcgccagcgccttcctcctacactacgccgcttcgctcggtctccacaccaccacgctccacttcaccccgtgcaagaccaagcccctgctcctcctcacctggcgaggctccgatccctccctcccctccgtgctcctcaactcccacatggactccgtccccgcggagcccgagcactgggcgcaccctccattcgccgcgcaccgcgacccgaccacgggccgcatctacgcgcgcggcgcacaggacgacaagtgcctccccgtccagtacctcgaggcgatccggggcctgcaggccgcggggttcgctcccgcccgcaccatccacatctcgcttgtccccgacgaggagatcggcggcgcggatgggttcgacaagttcgcccgatcggaggagttccgcgccctcaacatcgggtttatgctcgacgaggggcaggcgtcgccgacggacgtgttcagagtcttttacgcggacaggctggtgtggaggctcgtcgtgaaggcggcgggggcgccagggcatgggtcgaggatgttggacggcgccgccgttgacaatttgatggattgcgtggagaccatcgctgcgttcagggatgcgcagttcaggatggtgaagtccggggagaagggtcctggggaggtggtctcagtcaaccctgtgtacatgaaggccggcataccaagccccacgggtttcgtgatgaacatgcaaccttcagaagcggaggtcggctttgacctccgccttcctccaaccgaagacatcgagcagatcaagcggagggtcgaagaggaatgggcaccatctcacaaaaacctgacctacgagctggtgcagaaaggtccggcgacggatgtgtccggacgtcccgtatccacagcgacgaacgcgtcgaacccgtggtggctgacgttcgagagggccatcgcctccgcgggtggggagctgtctaagcctgagatcctgtcttcgaccacggactcacgctttgcgcggcagctgggcatccctgccctcgggttttctccgatgaccaggacgcccatactgctacatgaccataacgagtttctggaagacagagtgttcctgaggggcatccaagtgtacgaacatgtcatcagagcactaagctcgttccaaggctgattcgtaaaaaaaaaagaaaagaagaaggaaaagtggcagtgctgttgcgtggagtgtaacatagcaggttttgtaataattggttcagtcacaaacacgccaaaggaaacattccgaaactattgggatctgtgaaactgttgttgtgggaagaagactagcagctgggtcgtgtgatgagctgattgatgttcgggcttgttgcttgatatatctccaataatgcgtatatcccagacgttcaacacttgaaagtgcaagcgcggcttaggccttaaaaagaggagtttcatgacacacttaccaaaatcgtcaagatgaatggctgtgttcggtctgcgtgactgatcgaaccacgtcgaccttgcacgagcacacgggttcgtgtgcgtccctgtgagtaggaagaaccggagccgcgg

SEQ ID NO: 210538 - DNA, 571 bp, Zea Mays
tacaaaacaagatttgatatgataattctacatcttgcaggccctctcgctagaccgtttcgttgcttagaatcatcgagaatctgttattacatcctactttttttctatcaagattaggtcgctgaaacacttggaacaaacagagcttgatctgaagcgctacaccctgaaggatcaggatgtttacgctcttccatctactgcaaaatccaattggaaggatatctactgcatctacttccaaaacagcatgatgcaatacttgacgacaaaggaaaaggtccaagagctacaattgaatctccacctaaaaggttcaaacatggacctctgcgtattaaagaaaggtcgaacacaagatcttccaacaactgaagattttctcagattatcagcaactttttaggttgtagaatgccctctatataattatatataactgctcaactcttatgaagacatttcatgtaaatataacaaggtagcttgaaatgttgcaacaaacatactaccttctgccagtgctcacttaactctattttactttatataaatctgctatgctcta

SEQ ID NO: 210539 - DNA, 1652 bp, Zea Mays
aaaacttcttctttcacagacttaagttggctctatcacctatccaaatctacgagctgacattttgcattctttgcgatgccaaccgaaacctggaccaagcacaagtttccctttgaggctctcagtttgtttgaagggtcacactaaagcaatcaattgtgtagattggtcaccgactcatgggcatcttcttgcttctgctggaatggatcacacggttcatgtatggaatgtatgggacaaagggaataccactgctcgtgttttgaaacatcacactgctgctgtaaaggatgtaaggtggtcacttcataggccctttttactttctggagggcttgattgttccttacagctagttgatgttgttgagggaaaagtaatggaagtattcaaggaggatcaagctgtggaggttatcaagttcaatccaagcaaccccgatctcttcctatctggtgggtccaagggttcccttaaactctgggatattcgatgtggtctggtaacaaaagaatttcagagaagccttggaaccatccttgacattgacttcagtgctgatggaagacaatttatctcttcaactgacacaaccagaagcaatattagtgagaacactataattgtttgggatgtcctgcgacaagttcctttatctaaccaggtttataccgaagcattcacatgcccgtgtgtaaggtaccacccacgtgaagcatcatttgttgcacagtccaatgggaactacattgctattttttcagcaaggccacccttcaagctgaacaagtacacgcggtttgaaggacatggagtgtggggtttccctgtgaagtgcagcttttcccttggcgggagagaactcgcatctggttcatccgatgggtccatttacttctatgattacaggtcggcaaggcttttgaggaaaatagaagccttcaaagaggcgtgcactgatgtcgcgtaccacccagtaatgcctaatgtgatcgctgcttgtagctgggctggtgaaatatctgtctttgagtgacatgattataatgctgtgtggagaagcatcagcagttcagaaccgctagcatatatatatatatatatatatatatatatcttctgtgactcaaacaccagttaatggtcatagcagattccaaaataaaaataatttgctgtatggagttcatcgtctgaatttcagtctcagcctcgcctatgaacagattatttgtggtttcaaacaaagccttgttctttctgttcaaagtagatgaaacatcatagcacattgattgtagtggcaacatggaccgagaagaagataagtgagttgaagaggctgctgagcgggcaaagcgtatagctgaactttcaccgccgcctgagccgtatgatcccgaagtcgatccggccatgaaggaagcattagaaacgataaggatcgccaacgaagctgtcaacagactcctaaatgaagctaccgataagatattgaaagaggactgaattcttgtgtactaaaaaatgtaatattcgtgtatgagtcgaacatcgaacgtttgtatgtatattaatgtaatatatttcttttgcgatgcatgaaatctatgtacataccgttttgagccttcggcgaaaaaaca

SEQ ID NO: 210540 - DNA, 1920 bp, Zea Mays
ccgctcttcgtctacaatggcaattatctccccctgcagtcttggacgcagggaatacttgaaaccccggctcccgatggatctcctctctgctgcgtacggtgctacctctgacgatgaggatgccgcggaccgacccttctccatgccggttgccaccagcgctgccactggcatctccatccagcggcagatacatttccaagagggagcgcgctctcctggcctcatcaggggcacatattgaatccggatcatccctgcctctgacgagagtggattttgaatctgcagttggctctatcacctatccaaatctacgagctgacattttgcattctttgcgatgccaaccgaaacctggaccaagcacaagtttccctttgaggctctcagtttgtttgaagggtcacactaaagcaatcaattgtgtagattggtcaccgactcatgggcatcttcttgcttctgctggaatggatcacacggttcatgtatggaatgtatgggacaaagggaataccactgctcgtgttttgaaacatcacactgctgctgtaaaggatgtaaggtggtcacttcataggccctttttactttctggagggcttgattgttccttacagctagttgatgttgttgagggaaaagtaatggaagtattcaaggaggatcaagctgtggaggttatcaagttcaatccaagcaaccccgatctcttcctatctggtgggtccaagggttcccttaaactctgggatattcgatgtggtctggtaacaaaagaatttcagagaagccttggaaccatccttgacattgacttcagtgctgatggaagacaatttatctcttcaactgacacaaccagaagcaatattagtgagaacactataattgtttgggatgtcctgcgacaagttcctttatctaaccaggtttataccgaagcattcacatgcccgtgtgtaaggtaccacccacgtgaagcatcatttgttgcacagtccaatgggaactacattgctattttttcagcaaggccacccttcaagctgaacaagtacacgcggtttgaaggacatggagtgtggggtttccctgtgaagtgcagcttttcccttggcgggagagaactcgcatctggttcatccgatgggtccatttacttctatgattacaggtcggcaaggcttttgaggaaaatagaagccttcaaagaggcgtgcactgatgtcgcgtaccacccagtaatgcctaatgtgatcgctgcttgtagctgggctggtgaaatatctgtctttgagtgacatgattataatgctgtgtggagaagcatcagcagttcagaaccgctagcatatatatatatatatatatatatatatatcttctgtgactcaaacaccagttaatggtcatagcagattccaaaataaaaataatttgctgtatggagttcatcgtctgaatttcagtctcagcctcgcctatgaacagattatttgtggtttcaaacaaagccttgttctttctgttcaaagtagatgaaacatcatagcacattgattgtagtggcaacatggaccgagaagaagataagtgagttgaagaggctgctgagcgggcaaagcgtatagctgaactttcaccgccgcctgagccgtatgatcccgaagtcgatccggccatgaaggaagcattagaaacgataaggatcgccaacgaagctgtcaacagactcctaaatgaagctaccgataagatattgaaagaggactgaattcttgtgtactaaaaaatgtaatattcgtgtatgagtcgaacatcgaacgtttgtatgtatattaatgtaatatatttcttttgcgatgcatgaaatctatgtacataccgttttgagccttcggcgaaaaaaca

SEQ ID NO: 210541 - DNA, 3928 bp, Zea Mays
tttagagagcacttaaaagaataaagaatttttttacgtaacggaatatagagtaagttggagagagtctcaatgacattgtcgccggtccttgatctccatggctctagcgtttagccgcagcagcggccagcacgtgcacgccggcgaggatagcgcggtcccggcggttaccaccacacaggtcactgacactagctctcaatgaaattgcggacccgcaacacagtgggaggttacctcccagctcgggcccactccagtccagcggtccagccccgtgggtacaccatacacggtcccctcgcctccctccgagaaggaagaagctcaggcgaagcgaggcagagggatgtcgtgacgacgaaaccgaagccgagaacggaagcgagccttacatatacccggccccgtcccagtgccctcggcttccgccccagataccaaaccctaaccttagtcggccgttccgcaggcccgccggcggcgacgccttgtgtgccgcgtccgtgattctcttgcacagggaagcgtttggaaggggactccctgcctagtgcactggccgcagcgacgcgcggccgaggcgcggatcggggaggggaggacggctgtggcgagatggcgggtgacgtcgcgacctcgccagccccggcgccgctgtccgtgtcctcatcgtcgcagaaccaccaccaccacggccccacgaccgcccgcggtctcctctgccacgccggcgccggtgcctccgctggtgtggtggcggcgacgttcgtgtgcccactcgatgtcatcaagaccaggttccaggtccacggctggcccaagcttgccacaggtacaattggaggtgatgactccctccaacaattccttgtgaattttgcttcaatttgttgctttttgagttagaaacacgcacaaacctgtttggaacagcgagcttatcctggtgttattgagttgtgctgaggatgtaggaggggtgtatatgctgggaagtatggaatgtttgcatgggaagaggtggcgcattgtagtcaacctatgtgatttttgtgcttggttttgtctgtgatgtcatgtggacaatttgaaattcagagaggttagagaaaacctgcttagtatggggagacttcttaagttttcgcttgtggtgtctcttggtgacctggaccatccaagattcggggaattgtgagagaatctttttagtaactgaggatccacatttaggttttgtaacagttcaaatatttttcttggacggatgtcttatccttaaggtttactattgttgggttgtgtagttgtctaacggtcatttgtatccccctgcatgatttgaagtatcagtgctttcatgggaatgggacaaggggaggtatcacgagtgttgtgttgtcgttgtgaatttacaatgtcatgcaggttcgagagtggaaaaaacatgcaaactctcactagcagggtttgtacttattcgtctatgcacgtgaaaaagtcagagattagacatatattcgaagttccaaacaatgcacacaagattaagtgtctgtgggcatgatgtctattgtcattttccattatgaatgtcttttttgacatatatggagttagttctttggttatacgtgtaaaatagagtatacctaatatttcttaatctggtttttttgagatttgtattgagttttgcttgtattatgttatgtagaaccaatgcacaacatgcataccatgaatacaaaaaagtttaaaactgtcagaatgtcctcacgctggcagatcatcgcatacatgatacatatgccccatgtgttgcttgttagttatcaataccaaattcgtcgaagtttcaaacaatgcacacaaaactgtaagtgtgtctctgggcatgacatgtctactgtcattttgcgttatgattatgaatgtcttgtttgccatatatggagttagttctttggttatacatgtaaaataatgtattagctgatattccaagcctggtgtttttgaggtacacatcaagttttgctgatattatactacgtctaagtgtctaactgaacaagcatattgtgaatgcaaataaatttaaactgctataatgtaaccatgagtgctatgagtatagatgttctcatgctggcagattatcacatacatatgtgctttgtatttcttgttactaccaaacttgtgatgcttagctcattttttatgctacatctgtgttctgcactagaacagttttttttttgaaaatgtacagcagggcttcccctgctgtggtagatatttattaatataaagaagaaagcggacaaagagcatgagcagtcgctcccaagacataaaccagaaataaactaactagagcacagggaaaagaactatctgctatctataggaatttacaagcgaggagaaaagagttgatttctcttcagaaaagcggttagcttgcagaagggtttcggcgcggaattcttttttccagccaaggaaagatggccgtctttatcatagcagctgcactagaacagttgtattgttgtatcaggaaatgccttgagctattaccagtgttcttaaggcgcctaggcgagcaagtggaccagaaaaccgccttagcgcctaggcgacgcctaggcgggtatggcgagcaaggcggccagttttgcctgggcgcctggacgcctaggcgacgccttaagaacactggctattacatttgaattggctttttatgtgttgtgtgaatcaatactaggtagtgtaattattgggagcttgcagcagattgctcaacaagaaggtttccggggaatgtatcgcggcctatccccaactattctggcactcttgcctaactgggcggtttactttactgtgtatgagcagcttaaaagttttctttcttccaacgatggaagccatcaactttctttaggggcaaatgttgttgctgcatcatgtgctggagctgcaacaactattgtaacaaatccactttgggttgtgaagacaagatttcagacccaaggaattagagccgggccaatcccgtataaaggtacacttgctgccttgagaagaatagcacatgaagaaggcatccgagggctatacagtggcctggtccctgccttggctggtatcagtcacgttgctattcagttccctgtgtacgagaagataaaagcttatctggctgagcgagataatactactgtagaagcattgagttttggtgatgtcgctgttgcttcgtctctggctaaagtagctgcgtcaacattgacatatcctcatgaggttgttcgatcaaggctgcaagaccagcgagcaaactctgatgccagatacaaaggtgtaatagactgcgtcagaaaggtttatcataaagagggtgtggctggcttctaccgtggatgtgccacaaatctgttgcggacgacccctgctgcagtgataactttcactagcttcgagatgatccataggtcccttcttgatctattccctgctgaacctgaacctcacatccaacctctaaagcattgaccatacaacatctgtaccctatccatgcggcagattaggaccccagtaaccatccagcaacagcaatgttgtttactgtgccagatggctcttgtaaaagagaattgtttttttcccagataatagctgccattcaaaagttgaaacaatagtgtaggcagagcattagcatctgtgtacgtaatagatttgttagcatgcatttggggtggaggtatatgagcgatgttgggtattttttttatgatgatgacgaaaagaaaaatgttacgacatatgaaggaatgattactatattctttttcacacctggtgtgctgtgatcgtgattcgtgaatccgtgattctc

SEQ ID NO: 210542 - DNA, 1328 bp, Zea Mays
cttctgcatcaacgacaggccgaaggacgctcacacaaggacgactgaagctatgctccagtgtgagatatgcttatccatggtggagagataaagaaattgattctcaagccaagaggtcgcaaggactgtgcccacttactcctgaggaggcatcacttgttttgaaagctctaggatttcaaaaggatgctcttatgtacatcgcagctggtgaaatttatgggggagataggagactagaaccactacggtctgcttttccaaaccttgtacgaaaggagatgctgctagactctgaagttctgcatcaattccaaaatcactcttcccagatggctgcacttgacttcattgtatccacagctagcgatgttttcattcccactttcgatggtaacatggcaaagcttgttgaaggtcaccgaaggttcctgggttttcggagaagtgtggtgctagaccgccggaaattagttgaacttctagatctgtacaccaacaagacaatctcttgggacaaatttgcatcttctgttcgggaagctcataaggaccgtgtagctcaaccatcctgcaggcgaaaacttgaaaacagaccaaaagaagaggattacttctatgctaacccccatgaatgcctagccaattcaaccttgtgcagctaaactgagtttctggtttctgttaggtgaccagatgtgagcgtgaaatcattaccaggcaggaattggcacacggttgttttgatgtcgtgttgtcgagggaccgaagccagatttacacagcccatcacgatcttttgacttcgaattccttattatcctgttgtataggtcagtttttagcttctgtattgattcgttcgctttccaacatgccaaaaggggcctgtttggagcatgtaaattttggtttgttgtctaccatttttcttcatcggtgtctaactcgtgctgctaggccgaagggttagctgtttcatcttttggttttgtttctctaattttacaaattcttagtggaattatcacctttttaaaactgtgctgtttcaatacaggagtgctgaacctgtctcatttgtctctcttttcttttttggaaaaggttgtccagtttgcttggtgcatcagccttctcgatgaatgctttactgtgtaaacccttccgtgagatcatctacaggagtttctaaaagaatctaaaaaaacaattagaaaatcaagagtttttaagtggctaaaaaaggtatgagcatatttgttgagctgttgctctcaagatacaatacggtttgacatccgtcttctctaactattttcaaa

SEQ ID NO: 210543 - DNA, 1434 bp, Zea Mays
gagccatccaaccatcctctctcccttctgcatcaacgacaggccgaaggacgctcacacaaggacgactgaagctatgctccagtgtgaggtctggcagcgtctgcttcaagcatcttatctggtccaggtcgttcagaattgatcacagaccccataatcctctctaaaagatatgcttatccatggtggagagataaagaaattgattctcaagccaagaggtcgcaaggactgtgcccacttactcctgaggaggcatcacttgttttgaaagctctaggatttcaaaaggatgctcttatgtacatcgcagctggtgaaatttatgggggagataggagactagaaccactacggtctgcttttccaaaccttgtacgaaaggagatgctgctagactctgaagttctgcatcaattccaaaatcactcttcccagatggctgcacttgacttcattgtatccacagctagcgatgttttcattcccactttcgatggtaacatggcaaagcttgttgaaggtcaccgaaggttcctgggttttcggagaagtgtggtgctagaccgccggaaattagttgaacttctagatctgtacaccaacaagacaatctcttgggacaaatttgcatcttctgttcgggaagctcataaggaccgtgtagctcaaccatcctgcaggcgaaaacttgaaaacagaccaaaagaagaggattacttctatgctaacccccatgaatgcctagccaattcaaccttgtgcagctaaactgagtttctggtttctgttaggtgaccagatgtgagcgtgaaatcattaccaggcaggaattggcacacggttgttttgatgtcgtgttgtcgagggaccgaagccagatttacacagcccatcacgatcttttgacttcgaattccttattatcctgttgtataggtcagtttttagcttctgtattgattcgttcgctttccaacatgccaaaaggggcctgtttggagcatgtaaattttggtttgttgtctaccatttttcttcatcggtgtctaactcgtgctgctaggccgaagggttagctgtttcatcttttggttttgtttctctaattttacaaattcttagtggaattatcacctttttaaaactgtgctgtttcaatacaggagtgctgaacctgtctcatttgtctctcttttcttttttggaaaaggttgtccagtttgcttggtgcatcagccttctcgatgaatgctttactgtgtaaacccttccgtgagatcatctacaggagtttctaaaagaatctaaaaaaacaattagaaaatcaagagtttttaagtggctaaaaaaggtatgagcatatttgttgagctgttgctctcaagatacaatacggtttgacatccgtcttctctaactattttcaaa

SEQ ID NO: 210544 - DNA, 2096 bp, Zea Mays
ctaaaaatgattttttattaaaataaaaaaatttcggccactatggcggttggcttcatcgtcaccgcgctacacgctacactcgaccagttcctactccccaggccaacaaaatcacctcccgcacctccgcgattcttctcgaagactcgaaccgcctggaatcagaatcgccgttgtcgggaatcgctccgatgcccgcggcgatcgggaggcggccgcccgaacgccgggtctagacctcgcgtgcgatggcgaggtcgaggcctagggtttggctcgtggcgggctgcgccgccgtcatcctgtgggcctccgtcgcgcagctcgtcgccgtcggccgctttctcctccttttcggcctcgtgggcgacgccgatccctcgccgccaccttccgcgcttccgcccccgagaatatacatgagcaatggttatctgaagatatcttgtaatgggggtctgaatcagatgcgctcagagatttgtgacatggtggcagttgctcgtcttctaaatctcactatggttgtccccgaacttgacaagagatcattctgggctgatcaaagtaattttggagatatatttgacgtgaggcatttcatcaactctttgagagataaggtgcacatcattgaacagcttccagagaagcttggtccaagagattcaaacattattatacttgaaatgccacctgtgagctggtcagatgaaaaatattacttgcatcagatcctaccgctgttcaacaaatacagcatcatccattttaacaaaacagatgctcgcatagccaataatggtatcagtacagagcttcaattgcttagatgccgtgttaattttcatgcactgaaattcacacctcaaattgagggattagggaataaactggtacataaactgcgagccaagggatcatttgtagccttgcatttacgctatgagatggatatgctggcgttttctggttgcaaccatggcctttcacctgaagaagccgaggagctcaaaaaaatgaggtctggcagcgtctgcttcaagcatcttatctggtccaggtcgttcagaattgatcacagaccccataatcctctctaaaagatatgcttatccatggtggagagataaagaaattgattctcaagccaagaggtcgcaaggactgtgcccacttactcctgaggaggcatcacttgttttgaaagctctaggatttcaaaaggatgctcttatgtacatcgcagctggtgaaatttatgggggagataggagactagaaccactacggtctgcttttccaaaccttgtacgaaaggagatgctgctagactctgaagttctgcatcaattccaaaatcactcttcccagatggctgcacttgacttcattgtatccacagctagcgatgttttcattcccactttcgatggtaacatggcaaagcttgttgaaggtcaccgaaggttcctgggttttcggagaagtgtggtgctagaccgccggaaattagttgaacttctagatctgtacaccaacaagacaatctcttgggacaaatttgcatcttctgttcgggaagctcataaggaccgtgtagctcaaccatcctgcaggcgaaaacttgaaaacagaccaaaagaagaggattacttctatgctaacccccatgaatgcctagccaattcaaccttgtgcagctaaactgagtttctggtttctgttaggtgaccagatgtgagcgtgaaatcattaccaggcaggaattggcacacggttgttttgatgtcgtgttgtcgagggaccgaagccagatttacacagcccatcacgatcttttgacttcgaattccttattatcctgttgtataggttgtccagtttgcttggtgcatcagccttctcgatgaatgctttactgtgtaaacccttccgtgagatcatctacaggagtttctaaaagaatctaaaaaaacaattagaaaatcaagagtttttaagtggctaaaaaaggtatgagcatatttgttgagctgttgctctcaagatacaatacggtttgacatccgtcttctctaactattttcaaa

SEQ ID NO: 210545 - DNA, 1507 bp, Zea Mays
gcacacacagacacaggcccggggagacgatgatgactagtagccagcagagaatcgaagtgcagtagtagtgtaatgtagctagcgtgtatacaatacaatacgtgcctgtcgtctaccttatatgaaaggcacctcgggcatttcaaccttttcccttctctcgctccctgtcgcaccttcgtctctctctctctctctctccctcctcctcctcctcctcctcctcctccttgctctctctatggtgttggcggccgcggcgcggcgcagcaccacgggaggagaggaggcatgagaggatggtgacgtcgctccgtccgcaccgccacaccacccatgggcgccgtccgccgccgccgtcgccagcgttcgcctcagccaacatcagctgccgcccgtcgtcgtcctgacgcccatggcacaggacccctcccgcccgcaccggcacagtagtaaggacaccgccgcgcagcagcccgagcccgagcaccagcacgagcacgagcagcagccgccagcagagatactgcaccagctcgcgccgcaggcgcaaccgcaaccgccccacgacgtccatgaaccagcagcagcggccagcagcagcagcagcagcgacgccgggtcctcgtggctgcagctcggaatcgggggcccgtccccgtcctcgccgccgcgccggaaacggccgaggcgcgacgacgacgacgacgacgcgggcccttcgacggcgacgtcgtccgtgcagcccgctgccgcgccgcctcctcagctcccgccgcagctactgctgtctctgcagccagcagggcgcccgtcgtcgtcctcgtcctcggcgccggcgccggcgccggcgcgggcagtggcgccgccgccccccgcgcacgaggccggcacgtggttcctgctccgggcggccccgaaccagagggaggagccgccgttgccgcacatccccaggagctacttgagggttagagacgggaggatgatgacagttagagtagtgatgaggtacctggttaacaagctgggccttgacgatgattcacagttagagattacctgccgagggcagcgcctccaaccgacgatgaccctgcagcaggtccgcgacaccatttggcggccagcagtgccggctgaggccgcagcggttttgccggcccccggctcacggagcactgaccacatcatgacgctgcattactgcaggagctagcatgcgcctctggccggtggtgagcggagcaacgagaggcacagccaacttaattttcacgctgtaattaattagatttttcactgcccactgcaggcaggcactgatccccccgttttttccccctccgcccctaacatctaatcctcctcaccacagagttcacagagaaagaagaacagtagaacaccaaggatcaatatatagtgtaacaccacccaaatgtaacttattttacttcaaaaccctgaggaattattcattcatatttattcagttcaaaga

SEQ ID NO: 210546 - DNA, 800 bp, Zea Mays
tcgtcgttcattgggctgccctgtaatacaatactgcggaaagtccctattttgttgcaagtgattagatgcagtttgtgcagctgtgacctgcaccattgcagtcctctttgtttgttcaaattagattttaaactccacacctcatggaatttgagtatttcagggctttcatgattgaaaatgtaccccaaattagcttataccccgaatcgtatggccctcttctgactggtgaagaagaagtaattggaggaagaaagagagatggcacacctctatgagcgcaggaagttcccgtaccctggcgatgatgaggcggtcgaggagtttgtaaagagcggaggtgctcttggaaccacaattggacccaggggattcgctgacgccaatatggattctgaaaacatgcagaagcagctgcagtctaagaagttcgagcaggaagcacagaaactgtggattcggatgaggaatgaggtcgtacaggagctccaggagaaggggtttgatatcgagtgaatttgaaaacctgcagtatggtcggcgctgaggatgttaaaacttaaaaccacttgccatctaaattggagaactgtataacttaggaataaaagagtttgtagctatctttttaactaactatctggtgcattcttggtgctgctagattgtaccgaaaataatttttgctgtcttgtggagaacagaggatctcatttgaatatttgatcctcttttaatgtttcttattgcctgatcatcacaaaattgtgcttctggaaattactcatgttttg

SEQ ID NO: 210547 - DNA, 911 bp, Zea Mays
agcgtcagacatctccggagcccggacggacgcttttctatcccaagcctatctatttatcggttcgcccgccgcactacgctcccaccgtgtgatagctgctgctcttggcctgctacgacctcacggccacctctgtcctgtcccactagactagctgcagctagcgcctcttcccctcgccgccgccccctatccgagagcgacgagcatggcgcactccctcgccgcctccttctcgccggccgccgcgcggcgccaggtgacaaatgtgatttcaagccggagctcggtttccttccagagccacaggatgacttctgtatccatccgttcaagaccaagttctcttcgtttcaagatttgctgttcggctaagaaggagacagtcgacaaggtctgtagtatagtgaaggagcagctggctcttcccgatgggactgctatcactggcgaatcaaaattcgccgaacttggtgctgattcactggatacggttgaaattgtgatgggcctcgaggaggcgttcaacataaccgtcgacgaaacaagcgcacaggacatcgcgacggtgcaggacgctgcagacctcatcgagaaactcatgctggaagcgcctccaaaggttgtctagatcgatccatcagtcttgcgattggcgacttggcgttttatgttaaattgttcatgttacccaatttgttctttattgatggttcaagataagatttttgtatggatgttgctgaggtataaattagatgctccaaaggctgcatggagcagatgaagacgatgtattccacttcccatttgcatgttgtacttccatagagagatcaatgaactgttatgaagagtcactgcaactgtggcttttgatctttgtgaagtcacatacagtaaaagaa

SEQ ID NO: 210548 - DNA, 900 bp, Zea Mays
gtttcaacgagatacgactctattctccagtcatccgtcaggtcagctgagacgcaggtgacaaatgtgatttcaagccggagctcggtttccttccagagccacaggatgacttctgtatccatccgttcaagaccaagttctcttcgtttcaagatttgctgttcggctaagaaggagacagtcgacaaggtctgtagtatagtgaaggagcagctggctcttcccgatgggactgctatcactggcgaatcaaaattcgccgaacttggtgctgattcactggatacggttgaaattgtgatgggcctcgaggaggcgttcaacataaccgtcgacgaaacaagcgcacaggacatcgcgacggtgcaggacgctgcagacctcatcgagaaactcatgctggaagcgcctccaaaggttgtctagatcgatccatcagtcttgcgattggcgacttggcgttttatgttaaattgttcatgttacccaatttgttctttattgatggttcaagataagatttttgtatggatgttgctgaggtataaattagatgctccaaaggctgcatggagcagatgaagacgatgtattccacttcccatttgcatgttgtacttccatagagagatcaatgaactgttatgaagagtcactgcaactgtggcttttgatctttgtgaagtcacatacagtaattgttgttagatttgcaaatacaaggctgtctgtcaggtgctaacgcattgtggtgtttcaccacaagcgttgatgaattcccttcgttgtgattgattggctgattgctcgataacaacttgacttttggtaaatcagatcggataggatcacgttggatttatgggattcaattaaattatagaaaaatcacaaaaa

SEQ ID NO: 210549 - DNA, 1818 bp, Zea Mays
cgccctactcgagcgggctttcttcttcgagtcaataggaaccaaaatcccccaaccgccccagcgcacggcccggccgtctcaggcgtccgcggagatgacgcagcaggacgtggagatggcggcgcgccacgggaccggcgccgacggagcgggattctaccctcagccgcggaacggcgccggcggcgagacgctcgacgacgacggcaagaagaagcgcacgggaacggtatggacggcaagcgcgcacatcatcacagccgtcatcggctccggcgtgctctccctcgcctggtcgactgcacagctgggctgggtcgtggggccgctcaccctgatgatctttgccttgatcacgtactacacctctagccttcttgctgactgctaccgcagcggcgatcagctcaccggcaagaggaactacacctacatggacgctgttgccgcgtacctgggtcgatggcaagtcctgtcctgtggtgttttccaattcagtctcatcgtcgattgagaaaccccttttggctgaatggcgatgagcagggccgtgcacaaggcaaactgcttccacaacaagggccacgcggccgactgcagcacctacgacaccatgtacatggtcgtatttgggatcgttcagatcttcttctctcagctccctaacttcagcgacctttcgtggctgtccatcgtcgccgccatcatgtcgttctcttactccagcatcgccgtcggcctctcgttggcgcggaccatttcaggccgtagtggtacgaccactctgaccggcactgagatcggagtcgacgttgattcagcccagaaggtctggctcgcgcttcaagctcttggcaacatcgcgttcgcttactcctactccatgattctcatcgaaatccaagacacggtgaagtctcctccagccgagaacaagacgatgaagaaggcgacgctgatgggcgtgacgaccaccacggcgttctacatgcttgctggctgcctcgggtactcggcattcgggaacgcggcgccagggaacatcctgaccgggttcggcttctacgagccctactggctgatcgacttcgccaacgtctgcatcgtggtgcacctggtgggcgcgtaccaggtcttctcccagcccatcttcgcggccttggagacggcggccgccaagcgctggccgaacgccaggttcgtcacgcgcgagcaccccctcgtggccggcaggttccacgtcaacctgctcaggctgacgtggaggacggcgttcgtggtggtgagcacggtgctcgccatcgtgttgcccttcttcaacgatatcctgggcttcctcggcgccatcggcttctggccgctcaccgtgtactacccagtggagatgtacatccggcagcggcgtatacagaagtacaccagcaggtgggtggcgctgcagctgctcagcttcctgtgcttcctggtctcgctcgcctcggcggtcgcgtccatcgagggagtcaccgagtcgctcaaacactacgttccctttaagaccaagtcgtgatgactgactgagcttcaattctccggtccctgtacaatgcaatggcctaccaccttgcagtggtcgctaagggttatatagtccacatgaaaaactgatgtacatagaaaatcctgaccttcaaaaacagatttggtgtgtgattgttttgcaccgttatatctgattttgaagactaggattttatatgtgtacgtgtataccaaactttcatgtgtaccaaataccatgggctaatgaaaaactgatacaattgagtcccgtgc

SEQ ID NO: 210550 - DNA, 3134 bp, Zea Mays
cacgagcacaagcatgctagccgccaggacccctgtctcgctctcgctccaccaccgcatcgtcgccggcggccaccgggggcgatgcgtcgggggcagccaaaggaggcgcggtggcgcgccgtgccgccagttcacccaggcgctccagagcctctggaggcacagtcccccgatccctcctcctgcgcctcccgctgccggcgctgccaccagcggcgaggccgaaccctcgcggcagccgccggtactcgagaacgctgccttcgaggagtactataaggttcagcaaattgtccgcgaggaggagtgggatgccttcatgagtgttctacggaaaccattaccagcgacttttagaatcaatgcctgttgccagttttataaagatatctgttcaaagttagaaaatgaatttaggcgatctttggagagtgagtcttgcatggcacctgaatttctcccggaaggaattgaggaaaaatcaggcactcgaaagttttcatgagtttctgaagcatgagagtgaggttggtaacataactagacaagaggctgttagcatggttccaccactgtttctgaatgtacaacctgatcaccatattcttgatatgtgtgctgctccaggctctaaaacttttcagttacttgagatgattcaccaatcaaaagaactaggtctacttccaggagcattggtacgtttctccctaagttgcatctggcactaaaactattgctcgtgtaactcttgatgatttttggagtcatgttagttgttagtattcaattttgttacatgtagctagtagaactagtcgttttataatttccaaagacttatgagaaattaatactttagttatattgatatggcctaggaccaacttggcccagtaaacggctcagtctggcctgtaggccgtggcgccggcatggtaaggactaaggaggacctagagcctaggtggctaggaggtctatctcctgtagtcctgtactacccctgtccctaagtcagtccctatatatagaggccccatgtacccttgcaacttaaggagaagtagatcaaagggacaaagggttagcccatcttttcttcccctgacttgggcgttgtcctactggtcactcttcctgtcctctcatttctccccaaatccccctccctaatctggggcaatctaagtactaacatatatattctcccttgttcttgtgagactggttaggtgatagccaacgatctcaatatgcgaagatgtgacctccttatccataatacaaagagaatgtgcaccgccaacctaatagtaacaaaccatggagcagaaaacttcccctattgttctcttgcaaaggattgttcaggttcatataaagatccctgcaaactacaaaagctagaattcgaccgcatactttgtgatgttccgtgtagtggtgatgggactattcgcaagggtcatgacatgtggagaaagtggaactcaggcatgggtaaccaacttcatcttctgcaagtaaatattgcaatgcgtggtattgcgttacttaaagtgggtggaaggatggtctattcgacttgttcattgaatcctgttgaaaatgaagctgtcatagctgagctccttcgaagaagtggaaactctgttgaactccttgatgtttctagcgagctacctgaattggttcggcgtcctgggcttagcacttggaaggtacaagatcgagaatcttggtttcagagtcacgatgaagttccacacaataggaagaatgtagtatttccaagcatgtttcctgcaagtaatagcaccgaggaaagccataccgtgtgtggtgatgttgaagtgaacataaataatatgaacagcttctcaagaaatatcaacattgaagaaacaagcaaacttaatcaagatatggatggagtttctgttagtcccactaaaattttggaatgcacttctaacattgtgagttcaaagtttccactgcatcggtgcatgaggattgttcctcatgaccagaacagcggggcatttttcatcgcagttcttcacaaattatcgcccttgaatggcagtcagataaaggatactaaaattcagcacagacttgggacagacagaactatacagttccagaaagagcccaagccagaaacacgaccctatgaaactactttgacacgccgtcagcacaatgtttctgaagttgatgatactgaagtgcttggtaggggacagaaattaggcacagacagccaaacttcaaaggataagaactcaagcgaggtcgaaatagttagcattctagcagagtcaggagatagaatggagttgcaaaagcaaagcaggtgggaaggggttgatcctgtcttagttttgaacgatgaagcggtgataaagagtatacaatccttctttggcatcaaggaatcattcccactcgaaggtcatctggtgactagaagtcctgataatgcaaggagaatatattacgtatcaaaatcagttaaagagattttggagctgaattcaaaagttggtgggcagctgaagatagcttcacttggtgttaaaatgtttgaaaggcatagatcaaaggatccctgtccatgtgcatataggttgtcttatgatggattatcgctggtgcttccatccatcagcaagaggatactatatgcatccgcactcgagttccaccgccttgtacagtaccgaagcataagctttgctcattttaccgacaccagattcggggagcaggctgcgtccttgacgcctggttgctgtgttgtagtgttactcgaagggaataggcgtgtagattccatttgtaaggatccctccacaattgccgttgtttgctggagagggaaggggaccattaacgttatggtttctccctcggataggaaggatctccttgaaaggatggcgtatcgatttggatgatggatgggataaaggtgggagcatatcctgtacgcaaagaagtcatgtgctcccaggcacaaaatgcatccagccgatccgttctgtatctaacggtgttatgacatttttgcaaataagtcttcccacgcttcccacattagtgttgttcattaaaaaaac

SEQ ID NO: 210551 - DNA, 2400 bp, Zea Mays
atgctagccgccaggacccctgtctcgctctcgctccaccaccgcatcgtcgccggcggccaccgggggcgatgcgtcgggggcagccaaaggaggcgcggtggcgcgccgtgccgccagttcacccaggcgctccagagcctctggaggcacagtcccccgatccctcctcctgcgcctcccgctgccggcgctgccaccagcggcgaggccgaaccctcgcggcagccgccggtactcgagaacgctgccttcgaggagtactataaggttcagcaaattgtccgcgaggaggagtgggatgccttcatgagtgttctacggaaaccattaccagcgacttttagaatcaatgcctgtcttgcatggcacctgaatttctcccggaaggaattgaggaaaaatcaggcactcgaaagttttcatgagtttctgaagcatgagagtgaggttccaccactgtttctgaatgtacaacctgatcaccatattcttgatatgtgtgctgctccaggctctaaaacttttcagttacttgagatgattcaccaatcaaaagaactaggtctacttccaggagcattggaccaacttggcccagtaaacggctcagtctggcctgtaggccgtggcgccggcatggattgttcaggttcatataaagatccctgcaaactacaaaagctagaattcgaccgcatactttgtgatgttccgtgtagtggtgatgggactattcgcaagggtcatgacatgtggagaaagtggaactcaggcatgggtaaccaacttcatcttctgcaagtaaatattgcaatgcgtggtattgcgttacttaaagtgggtggaaggatggtctattcgacttgttcattgaatcctgttgaaaatgaagctgtcatagctgagctccttcgaagaagtggaaactctgttgaactccttgatgtttctagcgagctacctgaattggttcggcgtcctgggcttagcacttggaaggtacaagatcgagaatcttggtttcagagtcacgatgaagttccacacaataggaagaatgtagtatttccaagcatgtttcctgcaagtaatagcaccgaggaaagccataccgtgtgtggtgatgttgaagtgaacataaataatatgaacagcttctcaagaaatatcaacattgaagaaacaagcaaacttaatcaagatatggatggagtttctgttagtcccactaaaattttggaatgcacttctaacattgtgagttcaaagtttccactgcatcggtgcatgaggattgttcctcatgaccagaacagcggggcatttttcatcgcagttcttcacaaattatcgcccttgaatgtcagataaaggatactaaaattcagcacagacttgggacagacagaactatacagttccagaaagagcccaagccagaaacacgaccctatgaaactactttgacacgccgtcagcacaatgtttctgaagttgatgatactgaagtgcttggtaggggacagaaattaggcacagacagccaaacttcaaaggataagaactcaagcgaggtcgaaatagttagcattctagcagagtcaggagatagaatggagttgcaaaagcaaagcaggtgggaaggggttgatcctgtcttagttttgaacgatgaagcggtgataaagagtatacaatccttctttggcatcaaggaatcattcccactcgaaggtcatctggtgactagaagtcctgataatgcaaggagaatatattacgtatcaaaatcagttaaagagattttggagctgaattcaaaagttggtgggcagctgaagatagcttcacttggtgttaaaatgtttgaaaggcatagatcaaaggatccctgtccatgtgcatataggttgtcttatgatggattatcgctggtgcttccatccatcagcaagaggatactatatgcatccgcactcgagttccaccgccttgtacagtaccgaagcataagctttgctcattttaccgacaccagattcggggagcaggctgcgtccttgacgcctggttgctgtgttgtagtgttactcgaagggaataggcgtgtagattccatttgtaaggatccctccacaattgccgttgtttgctggagagggaaggggaccattaacgttatggtttctccctcggataggaaggatctccttgaaaggatggcgtatcgatttggatgatggatggtaattttactcttgtcaccttcgtcattgtaattttattgcctggttgttttacctgcccgtggggttccaagtcaaggacagaacagcagcagctggctgcagtagtttaatgggcttgagcgcaatcaaaatcacatcgctttttttt

SEQ ID NO: 210552 - DNA, 3843 bp, Zea Mays
atgctagccgccaggacccctgtctcgctctcgctccaccaccgcatcgtcgccggcggccaccgggggcgatgcgtcgggggcagccaaaggaggcgcggtggcgcgccgtgccgccagttcacccaggcgctccagagcctctggaggcacagtcccccgatccctcctcctgcgcctcccgctgccggcgctgccaccagcggcgaggccgaaccctcgcggcagccgccggtactcgagaacgctgccttcgaggagtactataaggtgagtttagtcttcctatttggagttatagtgtcgcgtacaaaatggcatggtttcagggtcctgttcttctggatgtgtgtcagtgttcagcaaattgtccgcgaggaggagtgggatgccttcatgagtgttctacggaaaccattaccagcgacttttagaatcaatgcctgttgccagttttataaagatatctgttcaaagttagaaaatgaatttaggcgatctttggagagtgagtcttgcatggcacctgaatttctcccggaaggaattgaggaaaaatcaggcactcgaaagttttcatgagtttctgaagcatgagagtgaggttccaccactgtttctgaatgtacaacctgatcaccatattcttgatatgtgtgctgctccaggctctaaaacttttcagttacttgagatgattcaccaatcaaaagaactaggtctacttccaggagcattggtacgtttctccctaagttgcatctggcactaaaactattgctcgtgtaactcttgatgatttttggagtcatgttagttgttagtattcaattttgttacatgtagctagtagaactagtcgttttataatttccaaagacttatgagaaattaatactttagttatattgatatggcctaggaccaacttggcccagtaaacggctcagtctggcctgtaggccgtggcgccggcatggtaaggactaaggaggacctagagcctaggtggctaggaggtctatctcctgtagtcctgtactacccctgtccctaagtcagtccctatatatagaggccccatgtacccttgcaacttaaggagaagtagatcaaagggacaaagggttagcccatcttttcttcccctgacttgggcgttgtcctactggtcactcttcctgtcctctcatttctccccaaatccccctccctaatctggggcaatctaagtactaacatatatattctcccttgttcttgtgagactggttaggtgatagccaacgatctcaatatgcgaagatgtgacctccttatccataatacaaagagaatgtgcaccgccaacctaatagtaacaaaccatggagcagaaaacttcccctattgttctcttgcaaaggattgttcaggttcatataaagatccctgcaaactacaaaagctagaattcgaccgcatactttgtgatgttccgtgtagtggtgatgggactattcgcaagggtcatgacatgtggagaaagtggaactcaggcatgggtaaccaacttcatcttctgcaagtaaatattgcaatgcgtggtattgcgttacttaaagtgggtggaaggatggtctattcgacttgttcattgaatcctgttgaaaatgaagctgtcatagctgaggtatctactgtagttgcttacttttagctgttgaacataaagctgttatttattttgtgacttatagcctagatacgagcaaaatctctgcgttgagcagtttatgttagagttgatatctccttaggactaatgactgagtcttaaggggcatggggacccaccacctctatgggtatgtacaaccttgacaccatagtagatggtacgatttttttttaaagtagaagacacaacgaagacacatgtagttacactgggggtgtatctaaaccttatgtcttaattaataaaaattctctaagacatgactctttatgtgtgtttactagtgaagctgtgtcttaggcttagaaaaccgagctagaggtgtgtcttcatttttttacacttaccccataggcacacattaatatgcattgtacatgccctaactaatgcacaccgtgatcggaggtgctgactgcttcctactggctcggtcccatccgatgcgatgccataagaggggttcctggtgaccaaaaacgtgtgcgaggacaccactcagaatgaatgtgctcccctaatctaccaatcgagagggcatggcagtcaggtgaagaccgatgcacatggcactccactgcacatccctgccctaatgatctgctgctaattgagccattgagctccttcgaagaagtggaaactctgttgaactccttgatgtttctagcgagctacctgaattggttcggcgtcctgggcttagcacttggaaggtacaagatcgagaatcttggtttcagagtcacgatgaagttccacacaataggaagaatgtagtatttccaagcatgtttcctgcaagtaatagcaccgaggaaagccataccgtgtgtggtgatgttgaagtgaacataaataatatgaacagcttctcaagaaatatcaacattgaagaaacaagcaaacttaatcaagatatggatggagtttctgttagtcccactaaaattttggaatgcacttctaacattgtgagttcaaagtttccactgcatcggtgcatgaggattgttcctcatgaccagaacagcggggcatttttcatcgcagttcttcacaaattatcgcccttgaatggcagtcagataaaggatactaaaattcagcacagacttgggacagacagaactatacagttccagaaagagcccaagccagaaacacgaccctatgaaactactttgacacgccgtcagcacaatgtttctgaagttgatgatactgaagtgcttggtaggggacagaaattaggcacagacagccaaacttcaaaggataagaactcaagcgaggtcgaaatagttagcattctagcagagtcaggagatagaatggagttgcaaaagcaaagcaggtgggaaggggttgatcctgtcttagttttgaacgatgaagcggtgataaagagtatacaatccttctttggcatcaaggaatcattcccactcgaaggtcatctggtgactagaagtcctgataatgcaaggagaatatattacgtatcaaaatcagttaaagagattttggagctgaattcaaaagttggtgggcagctgaagatagcttcacttggtgttaaaatgtttgaaaggcatagatcaaaggatccctgtccatgtgcatataggttgtcttatgatggattatcgctggtgcttccatccatcagcaagaggatactatatgcatccgcactcgagttccaccgccttgtacagtaccgaagcataagctttgctcattttaccgacaccagattcggggagcaggctgcgtccttgacgcctggttgctgtgttgtagtgttactcgaagggaataggcgtgtagattccatttgtaaggatccctccacaattgccgttgtttgctggagagggaaggggaccattaacgttatggtttctccctcggataggaaggatctccttgaaaggatggcgtatcgatttggatgatggatgggataaaggtgggagcatatcctgtacgcaaagaagtcatgtgctcccaggcacaaaatgcatccagccgatccgttctgtatctaacggtgttatgacatttttgcaaataagtcttcccacgcttcccacattagtgttgttcattaaaaaaac

SEQ ID NO: 210553 - DNA, 3172 bp, Zea Mays
atgctagccgccaggacccctgtctcgctctcgctccaccaccgcatcgtcgccggcggccaccgggggcgatgcgtcgggggcagccaaaggaggcgcggtggcgcgccgtgccgccagttcacccaggcgctccagagcctctggaggcacagtcccccgatccctcctcctgcgcctcccgctgccggcgctgccaccagcggcgaggccgaaccctcgcggcagccgccggtactcgagaacgctgccttcgaggagtactataaggttcagcaaattgtccgcgaggaggagtgggatgccttcatgagtgttctacggaaaccattaccagcgacttttagaatcaatgcctgttgccagttttataaagatatctgttcaaagttagaaaatgaatttaggcgatctttggagagtgagtgatatgcatggagaagatgctataactcccttgccttggtatccatgcagtcttgcatggcacctgaatttctcccggaaggaattgaggaaaaatcaggcactcgaaagttttcatgagtttctgaagcatgagagtgaggttggtaacataactagacaagaggctgttagcatggttccaccactgtttctgaatgtacaacctgatcaccatattcttgatatgtgtgctgctccaggctctaaaacttttcagttacttgagatgattcaccaatcaaaagaactaggtctacttccaggagcattggtacgtttctccctaagttgcatctggcactaaaactattgctcgtgtaactcttgatgatttttggagtcatgttagttgttagtattcaattttgttacatgtagctagtagaactagtcgttttataatttccaaagacttatgagaaattaatactttagttatattgatatggcctaggaccaacttggcccagtaaacggctcagtctggcctgtaggccgtggcgccggcatggtaaggactaaggaggacctagagcctaggtggctaggaggtctatctcctgtagtcctgtactacccctgtccctaagtcagtccctatatatagaggccccatgtacccttgcaacttaaggagaagtagatcaaagggacaaagggttagcccatcttttcttcccctgacttgggcgttgtcctactggtcactcttcctgtcctctcatttctccccaaatccccctccctaatctggggcaatctaagtactaacatatatattctcccttgttcttgtgagactggttaggtgatagccaacgatctcaatatgcgaagatgtgacctccttatccataatacaaagagaatgtgcaccgccaacctaatagtaacaaaccatggagcagaaaacttcccctattgttctcttgcaaaggattgttcaggttcatataaagatccctgcaaactacaaaagctagaattcgaccgcatactttgtgatgttccgtgtagtggtgatgggactattcgcaagggtcatgacatgtggagaaagtggaactcaggcatgggtaaccaacttcatcttctgcaagtaaatattgcaatgcgtggtattgcgttacttaaagtgggtggaaggatggtctattcgacttgttcattgaatcctgttgaaaatgaagctgtcatagctgagctccttcgaagaagtggaaactctgttgaactccttgatgtttctagcgagctacctgaattggttcggcgtcctgggcttagcacttggaaggtacaagatcgagaatcttggtttcagagtcacgatgaagttccacacaataggaagaatgtagtatttccaagcatgtttcctgcaagtaatagcaccgaggaaagccataccgtgtgtggtgatgttgaagtgaacataaataatatgaacagcttctcaagaaatatcaacattgaagaaacaagcaaacttaatcaagatatggatggagtttctgttagtcccactaaaattttggaatgcacttctaacattgtgagttcaaagtttccactgcatcggtgcatgaggattgttcctcatgaccagaacagcggggcatttttcatcgcagttcttcacaaattatcgcccttgaatggcagtcagataaaggatactaaaattcagcacagacttgggacagacagaactatacagttccagaaagagcccaagccagaaacacgaccctatgaaactactttgacacgccgtcagcacaatgtttctgaagttgatgatactgaagtgcttggtaggggacagaaattaggcacagacagccaaacttcaaaggataagaactcaagcgaggtcgaaatagttagcattctagcagagtcaggagatagaatggagttgcaaaagcaaagcaggtgggaaggggttgatcctgtcttagttttgaacgatgaagcggtgataaagagtatacaatccttctttggcatcaaggaatcattcccactcgaaggtcatctggtgactagaagtcctgataatgcaaggagaatatattacgtatcaaaatcagttaaagagattttggagctgaattcaaaagttggtgggcagctgaagatagcttcacttggtgttaaaatgtttgaaaggcatagatcaaaggatccctgtccatgtgcatataggttgtcttatgatggattatcgctggtgcttccatccatcagcaagaggatactatatgcatccgcactcgagttccaccgccttgtacagtaccgaagcataagctttgctcattttaccgacaccagattcggggagcaggctgcgtccttgacgcctggttgctgtgttgtagtgttactcgaagggaataggcgtgtagattccatttgtaaggatccctccacaattgccgttgtttgctggagagggaaggggaccattaacgttatggtttctccctcggataggaaggatctccttgaaaggatggcgtatcgatttggatgatggatgggataaaggtgggagcatatcctgtacgcaaagaagtcatgtgctcccaggcacaaaatgcatccagccgatccgttctgtatctaacggtgttatgacatttttgcaaataagtcttcccacgcttcccacattagtgttgttcattaaaaaaac

SEQ ID NO: 210554 - DNA, 3419 bp, Zea Mays
atgctagccgccaggacccctgtctcgctctcgctccaccaccgcatcgtcgccggcggccaccgggggcgatgcgtcgggggcagccaaaggaggcgcggtggcgcgccgtgccgccagttcacccaggcgctccagagcctctggaggcacagtcccccgatccctcctcctgcgcctcccgctgccggcgctgccaccagcggcgaggccgaaccctcgcggcagccgccggtactcgagaacgctgccttcgaggagtactataaggttcagcaaattgtccgcgaggaggagtgggatgccttcatgagtgttctacggaaaccattaccagcgacttttagaatcaatgcctgttgccagttttataaagatatctgttcaaagttagaaaatgaatttaggcgatctttggagagtgagtcttgcatggcacctgaatttctcccggaaggaattgaggaaaaatcaggcactcgaaagttttcatgagtttctgaagcatgagagtgaggttggtaacataactagacaagaggctgttagcatggttccaccactgtttctgaatgtacaacctgatcaccatattcttgatatgtgtgctgctccaggctctaaaacttttcagttacttgagatgattcaccaatcaaaagaactaggtctacttccaggagcattggtacgtttctccctaagttgcatctggcactaaaactattgctcgtgtaactcttgatgatttttggagtcatgttagttgttagtattcaattttgttacatgtagctagtagaactagtcgttttataatttccaaagacttatgagaaattaatactttagttatattgatatggcctaggaccaacttggcccagtaaacggctcagtctggcctgtaggccgtggcgccggcatggtaaggactaaggaggacctagagcctaggtggctaggaggtctatctcctgtagtcctgtactacccctgtccctaagtcagtccctatatatagaggccccatgtacccttgcaacttaaggagaagtagatcaaagggacaaagggttagcccatcttttcttcccctgacttgggcgttgtcctactggtcactcttcctgtcctctcatttctccccaaatccccctccctaatctggggcaatctaagtactaacatatatattctcccttgttcttgtgagactggttaggtgatagccaacgatctcaatatgcgaagatgtgacctccttatccataatacaaagagaatgtgcaccgccaacctaatagtaacaaaccatggagcagaaaacttcccctattgttctcttgcaaaggattgttcaggttcatataaagatccctgcaaactacaaaagctagaattcgaccgcatactttgtgatgttccgtgtagtggtgatgggactattcgcaagggtcatgacatgtggagaaagtggtaataacaggatctttgttttgtctgctgttttatgcttccctgtatgtatcctcaggtcgcaatctgttattgttgttcaggaactcaggcatgggtaaccaacttcatcttctgcaagtaaatattgcaatgcgtggtattgcgttacttaaagtgggtggaaggatggtctattcgacttgttcattgaatcctgttgaaaatgaagctgtcatagctgaggtgctgactgcttcctactggctcggtcccatccgatgcgatgccataagaggggttcctggtgaccaaaaacgtgtgcgaggacaccactcagaatgaatgtgctcccctaatctaccaatcgagagggcatggcagtcaggtgaagaccgatgcacatggcactccactgcacatccctgccctaatgatctgctgctaattgagccattgagctccttcgaagaagtggaaactctgttgaactccttgatgtttctagcgagctacctgaattggttcggcgtcctgggcttagcacttggaaggtacaagatcgagaatcttggtttcagagtcacgatgaagttccacacaataggaagaatgtagtatttccaagcatgtttcctgcaagtaatagcaccgaggaaagccataccgtgtgtggtgatgttgaagtgaacataaataatatgaacagcttctcaagaaatatcaacattgaagaaacaagcaaacttaatcaagatatggatggagtttctgttagtcccactaaaattttggaatgcacttctaacattgtgagttcaaagtttccactgcatcggtgcatgaggattgttcctcatgaccagaacagcggggcatttttcatcgcagttcttcacaaattatcgcccttgaatggcagtcagataaaggatactaaaattcagcacagacttgggacagacagaactatacagttccagaaagagcccaagccagaaacacgaccctatgaaactactttgacacgccgtcagcacaatgtttctgaagttgatgatactgaagtgcttggtaggggacagaaattaggcacagacagccaaacttcaaaggataagaactcaagcgaggtcgaaatagttagcattctagcagagtcaggagatagaatggagttgcaaaagcaaagcaggtgggaaggggttgatcctgtcttagttttgaacgatgaagcggtgataaagagtatacaatccttctttggcatcaaggaatcattcccactcgaaggtcatctggtgactagaagtcctgataatgcaaggagaatatattacgtatcaaaatcagttaaagagattttggagctgaattcaaaagttggtgggcagctgaagatagcttcacttggtgttaaaatgtttgaaaggcatagatcaaaggatccctgtccatgtgcatataggttgtcttatgatggattatcgctggtgcttccatccatcagcaagaggatactatatgcatccgcactcgagttccaccgccttgtacagtaccgaagcataagctttgctcattttaccgacaccagattcggggagcaggctgcgtccttgacgcctggttgctgtgttgtagtgttactcgaagggaataggcgtgtagattccatttgtaaggatccctccacaattgccgttgtttgctggagagggaaggggaccattaacgttatggtttctccctcggataggaaggatctccttgaaaggatggcgtatcgatttggatgatggatgggataaaggtgggagcatatcctgtacgcaaagaagtcatgtgctcccaggcacaaaatgcatccagccgatccgttctgtatctaacggtgttatgacatttttgcaaataagtcttcccacgcttcccacattagtgttgttcattaaaaaaac

SEQ ID NO: 210555 - DNA, 2413 bp, Zea Mays
atgctagccgccaggacccctgtctcgctctcgctccaccaccgcatcgtcgccggcggccaccgggggcgatgcgtcgggggcagccaaaggaggcgcggtggcgcgccgtgccgccagttcacccaggcgctccagagcctctggaggcacagtcccccgatccctcctcctgcgcctcccgctgccggcgctgccaccagcggcgaggccgaaccctcgcggcagccgccggtactcgagaacgctgccttcgaggagtactataaggttcagcaaattgtccgcgaggaggagtgggatgccttcatgagtgttctacggaaaccattaccagcgacttttagaatcaatgcctgttgccagttttataaagatatctgttcaaagttagaaaatgaatttaggcgatctttggagagtgagtcttgcatggcacctgaatttctcccggaaggaattgaggaaaaatcaggcactcgaaagttttcatgagtttctgaagcatgagagtgaggttggtaacataactagacaagaggctgttagcatggttccaccactgtttctgaatgtacaacctgatcaccatattcttgatatgtgtgctgctccaggctctaaaacttttcagttacttgagatgattcaccaatcaaaagaactaggtctacttccaggagcattggaactcaggcatgggtaaccaacttcatcttctgcaagtaaatattgcaatgcgtggtattgcgttacttaaagtgggtggaaggatggtctattcgacttgttcattgaatcctgttgaaaatgaagctgtcatagctgagctccttcgaagaagtggaaactctgttgaactccttgatgtttctagcgagctacctgaattggttcggcgtcctgggcttagcacttggaaggtacaagatcgagaatcttggtttcagagtcacgatgaagttccacacaataggaagaatgtagtatttccaagcatgtttcctgcaagtaatagcaccgaggaaagccataccgtgtgtggtgatgttgaagtgaacataaataatatgaacagcttctcaagaaatatcaacattgaagaaacaagcaaacttaatcaagatatggatggagtttctgttagtcccactaaaattttggaatgcacttctaacattgtgagttcaaagtttccactgcatcggtgcatgaggattgttcctcatgaccagaacagcggggcatttttcatcgcagttcttcacaaattatcgcccttgaatggcagtcagataaaggatactaaaattcagcacagacttgggacagacagaactatacagttccagaaagagcccaagccagaaacacgaccctatgaaactactttgacacgccgtcagcacaatgtttctgaagttgatgatactgaagtgcttggtaggggacagaaattaggcacagacagccaaacttcaaaggataagaactcaagcgaggtcgaaatagttagcattctagcagagtcaggagatagaatggagttgcaaaagcaaagcaggtgggaaggggttgatcctgtcttagttttgaacgatgaagcggtgataaagagtatacaatccttctttggcatcaaggaatcattcccactcgaaggtcatctggtgactagaagtcctgataatgcaaggagaatatattacgtatcaaaatcagttaaagagattttggagctgaattcaaaagttggtgggcagctgaagatagcttcacttggtgttaaaatgtttgaaaggcatagatcaaaggatccctgtccatgtgcatataggttgtcttatgatggattatcgctggtgcttccatccatcagcaagaggatactatatgcatccgcactcgagttccaccgccttgtacagtaccgaagcataagctttgctcattttaccgacaccagattcggggagcaggctgcgtccttgacgcctggttgctgtgttgtagtgttactcgaagggaataggcgtgtagattccatttgtaaggatccctccacaattgccgttgtttgctggagagggaaggggaccattaacgttatggtttctccctcggataggaaggatctccttgaaaggatggcgtatcgatttggatgatggatgccctaacgacgactatggagcttgccttggcatcttgacaaggacctaccttcctatttggttggctgctaattaaaacttggtataccacattaattaattctaggcatgtgtgttttgtttcacattataaagtgggatttgtcaaactttgttacgaatagcaggttcttagtaatttacacacgtcggttggttgggcctggacgaaggaaggatttgtacagatcagatgagag

SEQ ID NO: 210556 - DNA, 3425 bp, Zea Mays
atgctagccgccaggacccctgtctcgctctcgctccaccaccgcatcgtcgccggcggccaccgggggcgatgcgtcgggggcagccaaaggaggcgcggtggcgcgccgtgccgccagttcacccaggcgctccagagcctctggaggcacagtcccccgatccctcctcctgcgcctcccgctgccggcgctgccaccagcggcgaggccgaaccctcgcggcagccgccggtactcgagaacgctgccttcgaggagtactataaggtgagtttagtcttcctatttggagttatagtgtcgcgtacaaaatggcatggtttcagggtcctgttcttctggatgtgtgtcagtgttcagcaaattgtccgcgaggaggagtgggatgccttcatgagtgttctacggaaaccattaccagcgacttttagaatcaatgcctgttgccagttttataaagatatctgttcaaagttagaaaatgaatttaggcgatctttggagagtgagtcttgcatggcacctgaatttctcccggaaggaattgaggaaaaatcaggcactcgaaagttttcatgagtttctgaagcatgagagtgaggttggtaacataactagacaagaggctgttagcatggttccaccactgtttctgaatgtacaacctgatcaccatattcttgatatgtgtgctgctccaggctctaaaacttttcagttacttgagatgattcaccaatcaaaagaactaggtctacttccaggagcattggtgatagccaacgatctcaatatgcgaagatgtgacctccttatccataatacaaagagaatgtgcaccgccaacctaatagtaacaaaccatggagcagaaaacttcccctattgttctcttgcaaaggattgttcaggttcatataaagatccctgcaaactacaaaagctagaattcgaccgcatactttgtgatgttccgtgtagtggtgatgggactattcgcaagggtcatgacatgtggagaaagtggaactcaggcatgggtaaccaacttcatcttctgcaagtaaatattgcaatgcgtggtattgcgttacttaaagtgggtggaaggatggtctattcgacttgttcattgaatcctgttgaaaatgaagctgtcatagctgaggtatctactgtagttgcttacttttagctgttgaacataaagctgttatttattttgtgacttatagcctagatacgagcaaaatctctgcgttgagcagtttatgttagagttgatatctccttaggactaatgactgagtcttaaggggcatggggacccaccacctctatgggtatgtacaaccttgacaccatagtagatggtacgatttttttttaaagtagaagacacaacgaagacacatgtagttacactgggggtgtatctaaaccttatgtcttaattaataaaaattctctaagacatgactctttatgtgtgtttactagtgaagctgtgtcttaggcttagaaaaccgagctagaggtgtgtcttcatttttttacacttaccccataggcacacattaatatgcattgtacatgccctaactaatgcacaccgtgatcggaggtgctgactgcttcctactggctcggtcccatccgatgcgatgccataagaggggttcctggtgaccaaaaacgtgtgcgaggacaccactcagaatgaatgtgctcccctaatctaccaatcgagagggcatggcagtcaggtgaagaccgatgcacatggcactccactgcacatccctgccctaatgatctgctgctaattgagccattgagctccttcgaagaagtggaaactctgttgaactccttgatgtttctagcgagctacctgaattggttcggcgtcctgggcttagcacttggaaggtacaagatcgagaatcttggtttcagagtcacgatgaagttccacacaataggaagaatgtagtatttccaagcatgtttcctgcaagtaatagcaccgaggaaagccataccgtgtgtggtgatgttgaagtgaacataaataatatgaacagcttctcaagaaatatcaacattgaagaaacaagcaaacttaatcaagatatggatggagtttctgttagtcccactaaaattttggaatgcacttctaacattgtgagttcaaagtttccactgcatcggtgcatgaggattgttcctcatgaccagaacagcggggcatttttcatcgcagttcttcacaaattatcgcccttgaatggcagtcagataaaggatactaaaattcagcacagacttgggacagacagaactatacagttccagaaagagcccaagccagaaacacgaccctatgaaactactttgacacgccgtcagcacaatgtttctgaagttgatgatactgaagtgcttggtaggggacagaaattaggcacagacagccaaacttcaaaggataagaactcaagcgaggtcgaaatagttagcattctagcagagtcaggagatagaatggagttgcaaaagcaaagcaggtgggaaggggttgatcctgtcttagttttgaacgatgaagcggtgataaagagtatacaatccttctttggcatcaaggaatcattcccactcgaaggtcatctggtgactagaagtcctgataatgcaaggagaatatattacgtatcaaaatcagttaaagagattttggagctgaattcaaaagttggtgggcagctgaagatagcttcacttggtgttaaaatgtttgaaaggcatagatcaaaggatccctgtccatgtgcatataggttgtcttatgatggattatcgctggtgcttccatccatcagcaagaggatactatatgcatccgcactcgagttccaccgccttgtacagtaccgaagcataagctttgctcattttaccgacaccagattcggggagcaggctgcgtccttgacgcctggttgctgtgttgtagtgttactcgaagggaataggcgtgtagattccatttgtaaggatccctccacaattgccgttgtttgctggagagggaaggggaccattaacgttatggtttctccctcggataggaaggatctccttgaaaggatggcgtatcgatttggatgatggatgccctaacgacgactatggagcttgccttggcatcttgacaaggacctaccttcctatttggttggctgctaattaaaacttggtataccacattaattaattctaggcatgtgtgttttgtttcacattataaagtgggatttgtcaaactttgttacgaatagcaggttcttagtaatttacacacgtcggttggttgggcctggacgaaggaaggatttgtacagatcagatgagag

SEQ ID NO: 210557 - DNA, 3005 bp, Zea Mays
atgctagccgccaggacccctgtctcgctctcgctccaccaccgcatcgtcgccggcggccaccgggggcgatgcgtcgggggcagccaaaggaggcgcggtggcgcgccgtgccgccagttcacccaggcgctccagagcctctggaggcacagtcccccgatccctcctcctgcgcctcccgctgccggcgctgccaccagcggcgaggccgaaccctcgcggcagccgccggtactcgagaacgctgccttcgaggagtactataaggtgagtttagtcttcctatttggagttatagtgtcgcgtacaaaatggcatggtttcagggtcctgttcttctggatgtgtgtcagtgttcagcaaattgtccgcgaggaggagtgggatgccttcatgagtgttctacggaaaccattaccagcgacttttagaatcaatgcctgtcttgcatggcacctgaatttctcccggaaggaattgaggaaaaatcaggcactcgaaagttttcatgagtttctgaagcatgagagtgaggttccaccactgtttctgaatgtacaacctgatcaccatattcttgatatgtgtgctgctccaggctctaaaacttttcagttacttgagatgattcaccaatcaaaagaactaggtctacttccaggagcattggaccaacttggcccagtaaacggctcagtctggcctgtaggccgtggcgccggcatggtaaggactaaggaggacctagagcctaggtggctaggaggtctatctcctgtagtcctgtactacccctgtccctaagtcagtccctatatatagaggccccatgtacccttgcaacttaaggagaagtagatcaaagggacaaagggttagcccatcttttcttcccctgacttgggcgttgtcctactggtcactcttcctgtcctctcatttctccccaaatccccctccctaatctggggcaatctaagtactaacatatatattctcccttgttcttgtgagactggttaggtgatagccaacgatctcaatatgcgaagatgtgacctccttatccataatacaaagagaatgtgcaccgccaacctaatagtaacaaaccatggagcagaaaacttcccctattgttctcttgcaaaggattgttcaggttcatataaagatccctgcaaactacaaaagctagaattcgaccgcatactttgtgatgttccgtgtagtggtgatgggactattcgcaagggtcatgacatgtggagaaagtggaactcaggcatgggtaaccaacttcatcttctgcaagtaaatattgcaatgcgtggtattgcgttacttaaagtgggtggaaggatggtctattcgacttgttcattgaatcctgttgaaaatgaagctgtcatagctgagctccttcgaagaagtggaaactctgttgaactccttgatgtttctagcgagctacctgaattggttcggcgtcctgggcttagcacttggaaggtacaagatcgagaatcttggtttcagagtcacgatgaagttccacacaataggaagaatgtagtatttccaagcatgtttcctgcaagtaatagcaccgaggaaagccataccgtgtgtggtgatgttgaagtgaacataaataatatgaacagcttctcaagaaatatcaacattgaagaaacaagcaaacttaatcaagatatggatggagtttctgttagtcccactaaaattttggaatgcacttctaacattgtgagttcaaagtttccactgcatcggtgcatgaggattgttcctcatgaccagaacagcggggcatttttcatcgcagttcttcacaaattatcgcccttgaatggcagtcagataaaggatactaaaattcagcacagacttgggacagacagaactatacagttccagaaagagcccaagccagaaacacgaccctatgaaactactttgacacgccgtcagcacaatgtttctgaagttgatgatactgaagtgcttggtaggggacagaaattaggcacagacagccaaacttcaaaggataagaactcaagcgaggtcgaaatagttagcattctagcagagtcaggagatagaatggagttgcaaaagcaaagcaggtgggaaggggttgatcctgtcttagttttgaacgatgaagcggtgataaagagtatacaatccttctttggcatcaaggaatcattcccactcgaaggtcatctggtgactagaagtcctgataatgcaaggagaatatattacgtatcaaaatcagttaaagagattttggagctgaattcaaaagttggtgggcagctgaagatagcttcacttggtgttaaaatgtttgaaaggcatagatcaaaggatccctgtccatgtgcatataggttgtcttatgatggattatcgctggtgcttccatccatcagcaagaggatactatatgcatccgcactcgagttccaccgccttgtacagtaccgaagcataagctttgctcattttaccgacaccagattcggggagcaggctgcgtccttgacgcctggttgctgtgttgtagtgttactcgaagggaataggcgtgtagattccatttgtaaggatccctccacaattgccgttgtttgctggagagggaaggggaccattaacgttatggtttctccctcggataggaaggatctccttgaaaggatggcgtatcgatttggatgatggatgccctaacgacgactatggagcttgccttggcatcttgacaaggacctaccttcctatttggttggctgctaattaaaacttggtataccacattaattaattctaggcatgtgtgttttgtttcacattataaagtgggatttgtcaaactttgttacgaatagcaggttcttagtaatttacacacgtcggttggttgggcctggacgaaggaaggatttgtacagatcagatgagag

SEQ ID NO: 210558 - DNA, 2206 bp, Zea Mays
atctgttcaaagttagaaaatgaatttaggcgatctttggagagtgagtcttgcatggcacctgaatttctcccggaaggaattgaggaaaaatcaggcactcgaaagttttcatgagtttctgaagcatgagagtgaggttggtaacataactagacaagaggctgttagcatggttccaccactgtttctgaatgtacaacctgatcaccatattcttgatatgtgtgctgctccaggctctaaaacttttcagttacttgagatgattcaccaatcaaaagaactaggtctacttccaggagcattggtgatagccaacgatctcaatatgcgaagatgtgacctccttatccataatacaaagagaatgtgcaccgccaacctaatagtaacaaaccatggagcagaaaacttcccctattgttctcttgcaaaggattgttcaggttcatataaagatccctgcaaactacaaaagctagaattcgaccgcatactttgtgatgttccgtgtagtggtgatgggactattcgcaagggtcatgacatgtggagaaagtggaactcaggcatgggtaaccaacttcatcttctgcaagtaaatattgcaatgcgtggtattgcgttacttaaagtgggtggaaggatggtctattcgacttgttcattgaatcctgttgaaaatgaagctgtcatagctgagctccttcgaagaagtggaaactctgttgaactccttgatgtttctagcgagctacctgaattggttcggcgtcctgggcttagcacttggaaggtacaagatcgagaatcttggtttcagagtcacgatgaagttccacacaataggaagaatgtagtatttccaagcatgtttcctgcaagtaatagcaccgaggaaagccataccgtgtgtggtgatgttgaagtgaacataaataatatgaacagcttctcaagaaatatcaacattgaagaaacaagcaaacttaatcaagatatggatggagtttctgttagtcccactaaaattttggaatgcacttctaacattgtgagttcaaagtttccactgcatcggtgcatgaggattgttcctcatgaccagaacagcggggcatttttcatcgcagttcttcacaaattatcgcccttgaatggcagtcagataaaggatactaaaattcagcacagacttgggacagacagaactatacagttccagaaagagcccaagccagaaacacgaccctatgaaactactttgacacgccgtcagcacaatgtttctgaagttgatgatactgaagtgcttggtaggggacagaaattaggcacagacagccaaacttcaaaggataagaactcaagcgaggtcgaaatagttagcattctagcagagtcaggagatagaatggagttgcaaaagcaaagcaggtgggaaggggttgatcctgtcttagttttgaacgatgaagcggtgataaagagtatacaatccttctttggcatcaaggaatcattcccactcgaaggtcatctggtgactagaagtcctgataatgcaaggagaatatattacgtatcaaaatcagttaaagagattttggagctgaattcaaaagttggtgggcagctgaagatagcttcacttggtgttaaaatgtttgaaaggcatagatcaaaggatccctgtccatgtgcatataggttgtcttatgatggattatcgctggtgcttccatccatcagcaagaggatactatatgcatccgcactcgagttccaccgccttgtacagtaccgaagcataagctttgctcattttaccgacaccagattcggggagcaggctgcgtccttgacgcctggttgctgtgttgtagtgttactcgaagggaataggcgtgtagattccatttgtaaggatccctccacaattgccgttgtttgctggagagggaaggggaccattaacgttatggtttctccctcggataggaaggatctccttgaaaggatggcgtatcgatttggatgatggatgggataaaggtgggagcatatcctgtacgcaaagaagtcatgtgctcccaggcacaaaatgcatccagccgatccgttctgtatctaacggtgttatgacatttttgcaaataagtcttcccacgcttcccacattagtgttgttcattaaaaaaac

SEQ ID NO: 210559 - DNA, 2377 bp, Zea Mays
catgagagtgaggttggtaacataactagacaagaggctgttagcatggttccaccactgtttctgaatgtacaacctgatcaccatattcttgatatgtgtgctgctccaggctctaaaacttttcagttacttgagatgattcaccaatcaaaagaactaggtctacttccaggagcattggtgatagccaacgatctcaatatgcgaagatgtgacctccttatccataatacaaagagaatgtgcaccgccaacctaatagtaacaaaccatggagcagaaaacttcccctattgttctcttgcaaaggattgttcaggttcatataaagatccctgcaaactacaaaagctagaattcgaccgcatactttgtgatgttccgtgtagtggtgatgggactattcgcaagggtcatgacatgtggagaaagtggtaataacaggatctttgttttgtctgctgttttatgcttccctgtatgtatcctcaggtcgcaatctgttattgttgttcaggaactcaggcatgggtaaccaacttcatcttctgcaagtaaatattgcaatgcgtggtattgcgttacttaaagtgggtggaaggatggtctattcgacttgttcattgaatcctgttgaaaatgaagctgtcatagctgaggtgctgactgcttcctactggctcggtcccatccgatgcgatgccataagaggggttcctggtgaccaaaaacgtgtgcgaggacaccactcagaatgaatgtgctcccctaatctaccaatcgagagggcatggcagtcaggtgaagaccgatgcacatggcactccactgcacatccctgccctaatgatctgctgctaattgagccattgagctccttcgaagaagtggaaactctgttgaactccttgatgtttctagcgagctacctgaattggttcggcgtcctgggcttagcacttggaaggtacaagatcgagaatcttggtttcagagtcacgatgaagttccacacaataggaagaatgtagtatttccaagcatgtttcctgcaagtaatagcaccgaggaaagccataccgtgtgtggtgatgttgaagtgaacataaataatatgaacagcttctcaagaaatatcaacattgaagaaacaagcaaacttaatcaagatatggatggagtttctgttagtcccactaaaattttggaatgcacttctaacattgtgagttcaaagtttccactgcatcggtgcatgaggattgttcctcatgaccagaacagcggggcatttttcatcgcagttcttcacaaattatcgcccttgaatggcagtcagataaaggatactaaaattcagcacagacttgggacagacagaactatacagttccagaaagagcccaagccagaaacacgaccctatgaaactactttgacacgccgtcagcacaatgtttctgaagttgatgatactgaagtgcttggtaggggacagaaattaggcacagacagccaaacttcaaaggataagaactcaagcgaggtcgaaatagttagcattctagcagagtcaggagatagaatggagttgcaaaagcaaagcaggtgggaaggggttgatcctgtcttagttttgaacgatgaagcggtgataaagagtatacaatccttctttggcatcaaggaatcattcccactcgaaggtcatctggtgactagaagtcctgataatgcaaggagaatatattacgtatcaaaatcagttaaagagattttggagctgaattcaaaagttggtgggcagctgaagatagcttcacttggtgttaaaatgtttgaaaggcatagatcaaaggatccctgtccatgtgcatataggttgtcttatgatggattatcgctggtgcttccatccatcagcaagaggatactatatgcatccgcactcgagttccaccgccttgtacagtaccgaagcataagctttgctcattttaccgacaccagattcggggagcaggctgcgtccttgacgcctggttgctgtgttgtagtgttactcgaagggaataggcgtgtagattccatttgtaaggatccctccacaattgccgttgtttgctggagagggaaggggaccattaacgttatggtttctccctcggataggaaggatctccttgaaaggatggcgtatcgatttggatgatggatgggataaaggtgggagcatatcctgtacgcaaagaagtcatgtgctcccaggcacaaaatgcatccagccgatccgttctgtatctaacggtgttatgacatttttgcaaataagtcttcccacgcttcccacattagtgttgttcattaaaaaaac

SEQ ID NO: 210560 - DNA, 1459 bp, Zea Mays
gcaacgggcgcagcgcacagcaggcgcaaacgcaacacagagcagcgacccaacctacgaacccagagttcccgccaggcccagagcccagagcccagagccccacccgcccccgcgcccgcgggctccaggccgagccgaagctaggcgcgatgtcgctgtcaccggcggacggcgcagcgtactggctgcggtggcaggtcctcgtctgcggcgcgctcatcgcgctgcccacggtggccgcggcggcgctgctgccgcggctgcggagctcagcgccgcccctgcgcgcggccgacctctgggttccttgctgggcgcgcctccacccgggctggctccttgcctaccgcgccgtcgcgctcgccgccgctgtagcgcttctcgcgcgcctcgtcgtcgcgcgcggcatcaccgtcttctacttctacacccagtggacgtttctattagtcaccatatattttgcgtttgccacagctatatcagcccatggatgtttggtttactcaaggaaaagtttgaggaaagccgacgaatcccgtggacttcttaatgctgatgtcgaaaatcgtgatgtttccaattctgtttctggagagaggaaaacagatgagacaaatatgatgatgagctattatgaacaaatagtgaatgagagaagagctgggttctggggccggtgcatggaaatcatataccagactagcgcaggtgcaacaatgttgactgatgtcacatattggggccttcttgtgccatttttctaccgtgacaagtttgggttagctttgttcactgatggcatgcactccttaaatgctgtttttctacttattgacacacttctcaacaacatgtggattttcagccctttccctggtaccgaatgtctttctttgttttctggagctgcgcctatgtaacattccagtgggtccttcatgcttgtggaggcgtatcctggtggccgtacccatttctggacctttcatcatctggagctcctctatggtacctcggcatggccatcgctcatgtcccctgcttcttcctgtattggttgatcgtcaaggcgaagcacacttatttccaacggatgttcccacatgcttatgttagggcaacatagacccatttatctaatcacaggttaggataaactcataaacatgtataaataaatatctgtatcatactacttctgcacctgccgggcttaagtgtacacctgtatagtctcgtgaatttacagcccctttgagatgggtatgagacctgagaacacgccaggaccggcatgttgatcaatgaatcgcagaggttcactgtcacctgggaacacggtcttgtgctctgtgcctctgtgtgttcctttccttcgcttgaacttgaagtgcacattggaagcacgcccatggtttccctttcccccaaggatgatgtattgcattttatg

SEQ ID NO: 210561 - DNA, 1085 bp, Zea Mays
accgtacgtagcagagcatcagtttcataaacaagtccatacgtactacttcaccttcaagcagcagcagcagccatggcagcacccaccgtcgtctccttgctcgccatggccgtggtggcgatagcagcgcttcaagctacggctgccggtccgccgccaccgccaccgtacggcaggccgacgaactgtgttcagacgttatacgagtttgccacagctatatcagcccatggatgtttggtttactcaaggaaaagtttgaggaaagccgacgaatcccgtggacttcttaatgctgatgtcgaaaatcgtgatgtttccaattctgtttctggagagaggaaaacagatgagacaaatatgatgatgagctattatgaacaaatagtgaatgagagaagagctgggttctggggccggtgcatggaaatcatataccagactagcgcaggtgcaacaatgttgactgatgtcacatattggggccttcttgtgccatttttctaccgtgacaagtttgggttagctttgttcactgatggcatgcactccttaaatgctgtttttctacttattgacacacttctcaacaacatgccctttccctggtaccgaatgtctttctttgttttctggagctgcgcctatgtaacattccagtgggtccttcatgcttgtggaggcgtatcctggtggccgtacccatttctggacctttcatcatctggagctcctctatggtacctcggcatggccatcgctcatgtcccctgcttcttcctgtattggttgatcgtcaaggcgaagcacacttatttccaacggatgttcccacatgcttatgttagggcaacatagacccatttatctaatcacagcccctttgagatgggtatgagacctgagaacacgccaggaccggcatgttgatcaatgaatcgcagaggttcactgtcacctgggaacacggtcttgtgctctgtgcctctgtgtgttcctttccttcgcttgaacttgaagtgcacattggaagcacgcccatggtttccctttcccccaaggatgatgtattgcattttatg

SEQ ID NO: 210562 - DNA, 759 bp, Zea Mays
atgaggaacaaaatcaacctgggttcaaatcagaaagtttttccagatgcagctgctatggcaaatgactctaaacaagatgacgcatttgatcttccatcagatgactcagacgacaatgactttgaccccaatatgcctgaagagcatgtggttggtaaggatgaagaatcgtctgaagaggatgaggatggaggatcagactctgatgactcagactttttgacatgttctgatgattcggaacctttgatagacaagaaggttgatgacctcagattaccttctgaagattcagaggatgatgactatgatccagcaggtcctgattcagataaagatgtcgaaaagaagtcaagttctgatgaatctgacttcacatctgactcagatgatttttgtaaggagatttcaaaatctggacatgatgaagtttcatcacctctattacccgatgccaaggtgggtgatatggaaaagattactgctcaagctaaaacaacaagttctgctgacgaccctatggagactgaaatagaccagggtgtggttttaccagattcaaggagacggcaagctgaacggttggactacaaaaagttgtatgatgtcgatcgaggagcacgacagggtgaaaggactggacccgatcgagagcgccaccgccagctgatcatttttgtcggatggtgcaagcaagcaccacacaagtccatctattgctcacaactcacaagtgcctgcttccatcatcagtac

SEQ ID NO: 210563 - DNA, 1637 bp, Zea Mays
agtagtagcgggcgacgcggccgcgaggcaggcaggtagaccacgccgcacgccagccagcggccagcgcccgccccgccgcgcttcggcattttcccattttctctctctgccgccgctccctcccgcggcggactcgataccccgcctctcctctcgcgaactagggggcagcgggcaggtgccggcaggcggctcgatcccttcctcctccctcgtcgcggggactgctgctgctgctgccgtgaccgcgagcatggccaccggcgccgttacgccgccgccgctggctggcgcgcggcgattcccccgtggacgaagcttcctccaccggcgcctcgctacctcgcctatgaaagatgaatctgtgatttccacagatggtggaaatgaggagacagacactgacagcctccatgttgctagaggattgtctcatcctgggctttcgtcaagtttatccaataaggcatcagtggtcccaacccctttgcttccttctggacaatctgatctccggttcaatcgtcttcgaccctcaattgatgaaagtgattgcaaatacaaaagattatttggctgctatgttgctcgtgaggctgtgatcgatgaggaatactggatcgctgcatggttgagagcagaagatcagtatgaaaatgagtcaggcaatcgctatgttgaaagctttaaaagaaagtttgcatcaaaggtacttgtgtaaacaacttagtagtgttttctatgtgcttaaacataattgagatatgatgtacatcttatttgtagcaagtaatgttaagaaattacaataacctctgttcaaaaagatttgttgacgcacgttataaaatattcacattaatttgtcacatcctaatagtttctattctggctcacatgtatgagagtctgtcatctcattgcaggaattccatgcattaaagaagagatgcaacacacaacatagagagaagtatatctgtcttgtcgcggtaaagaacgatgacatcaggcgaactgtcctgaatagtgttgttggtaccttagatgtatgtgtaaggcatcctctatatggggagaaatttcctgaggagcctggaaaaccgtctcttcactgtcgaatttatcagcctgatcagccaaaatttgggtatgtaacaaatgtatgtgttgctaaatatgcaaggcgtcaagggattgctagcaacatgctgttattggccatagatgctgcaaaacttaacggtgctgaaaatatttacattcatgtgcataaagataacttaccagcatggaggctctatgatcagattggattcaagatcgttgatcaggatgacgattgtcgttcatcagacctgtgcttactctccttcagttcataaggcttgctgactagataggaatagaagggacatggcccctagttccatctccctgtccagggaaatgccatcagtcctcgcgatttggaaaggcgggatggtatgtgccaagtaataccttcaccaccttgtatatgatgaaagtgtttccaaatgtttgcggctttcgagattgtcactagatcggtggcagttcagatccaccagaatgtttgaggtatttgtatacatcaaaagcttctgtcgtgt

SEQ ID NO: 210564 - DNA, 1438 bp, Zea Mays
gtctggcccacagaacaagcgaaacggatagaccaaaaaaaggaggaagaatactagtagtagcgggcgacgcggccgcgaggcaggcaggtagaccacgccgcacgccagccagcggccagcgcccgccccgccgcgcttcggcattttcccattttctctctctgccgccgctccctcccgcggcggactcgataccccgcctctcctctcgcgaactagggggcagcgggcaggtgccggcaggcggctcgatcccttcctcctccctcgtcgcggggactgctgctgctgctgccgtgaccgcgagcatggccaccggcgccgttacgccgccgccgctggctggcgcgcggcgattcccccgtggacgaagcttcctccaccggcgcctcgctacctcgcctatgaaagatgaatctgtgatttccacagatggtggaaatgaggagacagacactgacagcctccatgttgctagaggattgtctcatcctgggctttcgtcaagtttatccaataaggcatcagtggtcccaacccctttgcttccttctggacaatctgatctccggttcaatcgtcttcgaccctcaattgatgaaagtgattgcaaatacaaaagattatttggctgctatgttgctcgtgaggctgtgatcgatgaggaatactggatcgctgcatggttgagagcagaagatcagtatgaaaatgagtcaggcaatcggaattccatgcattaaagaagagatgcaacacacaacatagagagaagtatatctgtcttgtcgcggtaaagaacgatgacatcaggcgaactgtcctgaatagtgttgttggtaccttagatgtatgtgtaaggcatcctctatatggggagaaatttcctgaggagcctggaaaaccgtctcttcactgtcgaatttatcagcctgatcagccaaaatttgggtatgtaacaaatgtatgtgttgctaaatatgcaaggcgtcaagggattgctagcaacatgctgttattggccatagatgctgcaaaacttaacggtgctgaaaatatttacattcatgtgcataaagataacttaccagcatggaggctctatgatcagattggattcaagatcgttgatcaggatgacgattgtcgttcatcagacctgtgcttactctccttcagttcataaggcttgctgactagataggaatagaagggacatggcccctagttccatctccctgtccagggaaatgccatcagtcctcgcgatttggaaaggcgggatggtatgtgccaagtaataccttcaccaccttgtatatgatgaaagtgtttccaaatgtttgcggctttcgagattgtcactagatcggtggcagttcagatccaccagaatgtttgaggtatttgtatacatcaaaagcttctgtcgtgt

SEQ ID NO: 210565 - DNA, 2442 bp, Zea Mays
aattagagattccagaacttgtcatgtcatcaaagggcaaataacatttttgtgcatcattatattcttagcgtcatggcaatcattttttagatgttgaaaatgattgaaagaaaaagaattccttttctaagggcctcctaaaagaatctgaagggttgaacaattttgctagtaaatttgataataaaatccatctaggtgtttgtccaggctagggtcttccttaggccttgttcgtttgtgtcggattgcacccggaatcgttccacctaatcaaagtttatataaattagagaagcaatccggttaagaatcgttcggacccatcaatccggcacaaacgaacaagcccttagggggtgtttggtttgaagagtcaatccattctagatgaggtggtgcatcataagtcaattccacaaatttgatagaatgaactcattcctcatattattactaattattagtttatgaggaatgaaatggtaatggatcaactcattccactccacaaaccaaacaaaaaagtgaggactgagaagatgatggactacctcattcctcaaaccaaacacaacaacaacaacaacaacaacaacaaagccttttgtcccaagcacgttggggtaggctagagatgaaaccccgtatgaaaacctcagagctcaacccccaaagaaaaaaggggaaacaaaggcaaaggagaaccgaaaaacgacgaaacggggaaacacataaaagagataaaacccacaagaaccagcaagatctaaatgggcacaagaaaaggtcaaacgattaaggaggaaaagcgaaactataaatcaaggttctggcacgtgaattgcacacttccaccccttcctatccacggcgagctctttatcaatatttcactccttcaggtccctcttcacagcctctgtccacgtcaaggttggtcgacctctacctctcttcacattctcgggacgcctaattattccgatatgcattggtgcctcttcaggtcttcgttggatatgtccaaaccatctcaaacgatgttgcataagcttctcctcaattggcgctacttctactctctctcgtatgacatcattccggactcggtctctccttgtgtggccacatatcaagcgcaacatacgcatctctgccacacatagttgttggacatgtcgaccaaacacactattagttttttattcaagatgcaaatcctatgagcgtgctaaaaagaagctgacaatagaagaagcaccgaatattctgactattgcactgaaaagatatcagtctggcaagtttggaaagatcagcaaagccatcagatttccagaaaccctcaacttggctcgctatatgaacccagatactgatgacatatcgccagtttacagcctctatgcagtggttgtccatcatgatgtcatgaatgctgccttctctggccattatgtatgttatgttaaagatacacagggaaagtggtttaaggcagacgacagccaggtgaaacctgtatctctggacaatgtcatgtcaaagtgtgcttatatgctgctgtatgcaaggctatgtcggacccagcacacccgaagcaggccaagcagagggtggttccaggaggaccaacatggcgaggaggttccttcaacgggcaccaagctggccagcggcacagcgacgacgcggaagacgacgacgccacacatgctgcatttgacgaatatagatacgcaccatattcgccttcagattctccgagccctagcgagagttcatccctcttcagcaactccgacgcagggtcgcacagcaccgacagcagcgagagcacgaggaactcgacaagcaccgaggagtacgagtacgtgttcggagccgctgatcagatgtaccgcgtgggaggggggacacctgtggagggtggctatccgacgtattcccgttcgaggtccagcttgaatgccagctcatcggggcgggaggcatacagcgcgggtacctacgctgagcacaggactcagggcggcggtcccggtgggctttgggttgagggcgatgagagcccgtccttgttatacactgacagaagtaaacagccgtcgaacagtacgttaagagaccagtataggcagttagataggagcgatgagcgaacatgaccctgggcaaaccaggggcggtgttttattgagaagaccatctagggacaggaccgcccagacattttattgatgttgcagggtttgggctgtagtctgtagagaaataaatagtgtaatgtagcctgtaatatgtatctcgctgcaaacgtgtaaaaaagggaagaggaatgtcgtagttcataaaagttaaatgcctagattgatgatatagttccgaggaacctgtaacaaaacgttgcattttgcatgtgatcggcggagtaga

SEQ ID NO: 210566 - DNA, 2180 bp, Zea Mays
tgagagtcacgtgaacacgaggtcgctgccgaatgcaagtgcttgcctttggccctcgtcaccgtcggccgcgcaatgtcaaataagcgcacaccagaggagtggtccaacgcactcgacaccctcaaggcatcgctccgctccggcacgcccggcttggacaagagcacgcaggcgctagtgaagttctgctacgacaacctggagagcgacatggtgagggaatgcttcctgacctgtgcgctatggccggaggaccacaacatctccaaggaggagctcgtgcagagctggataggactcggcctgctccccgatctcagcgacatcgaagaggcccacaggttcgggctctcggtgattgccatcatgaaggccgcgtgcctgctggagcccggggacaaccaccgctacaacatgttcccgtcagacactcacgtcaggatgcacgacgtcgtgcgcgacgcggcgctccggttcgcgcccgccaagtggctggtccgcgcaggcgctgggctcagggagcccccgcgcgaggaggcgctgtggcggggcgcgcagcgcgtgtccctgatgcacaacaccatcgaggacgtgccggcgaaggtgggtggcgccctcgcggacgcgcagccggcgtcgctgatgctccagtgcaacaaggccctgccgaagaggatgctccaggcgatccagcatttcaccaagctcacgtacctggacctcgaggacaccggcattcaggacgccttccccatggagatctgctgtttggtcagcttgaagcacctcaacctatccaagaacaagatcctgtcgctgccgatggagctgggcaacctgagccagctcgagtacttctacctgcgcgacaactactacatccagatcaccataccaccggggctgatctcgcggcttgggaagctgcaggtgctggaggttttcaccgcgagcatcgtctccgtcgcggacaactacgtcgcgccagtcattgacgacctcgagagcagcggcgcgcgcatggcgtcgctcggcatctggctcgacaccacccgcgacgtggagcgcctcgcgcggctagcgccgggcgtgcgcgcccggtcgctgcacctgcgcaagttagaagggacgcgcgccctgccgctgctgtccgcggagcacgcgccggagcttgccggcgtgcaggagagcctgcgggagctggtggtctactcctccgatgtcgacgagatcacggccgacgcgcacgtgcccatgctggaggtcatcaagtttgggttccttacgaagctgcgcgtcatggcgtggtcccacgccgccgggtccaacctccgcgaggtcgccatgggcgcgtgccacagtctaactcacttgacgtgggtgcagaacctcccctgcctagaatcgctgaacctcagcgggtgcaacgggctgacgagactgctgggtggcgcggaggacagcggcagcgccacggaggaggtgatcgtgttcccgcgtctgaagctgctggccctgctggggctgccgaagctggaggccgtgcgagtcgagggagagtgcgcgttcccggagctgcggcgcctgcagacgagggggtgcccgcggctgaagaggattcctatgcgcccggcgcgcgggcagcagggtaccgtgcggatcgagtgcgacaagcactggtggaacgctctacagtgggcgggcgaggacgtcaaggcctgctttgtccctgtgctgtgagtgagtcatttcactaggcggacggagctgcaattttggcgccagttgatatgttcgacgaccacggtccacgggttgtaccacggttcaaggcaagatgagcgatgaaatcggaaatatctctcgaacagcgaaaaggcggtttgttttggatttcttctaagaacaattcaaattttggcttaattcccgttatgttgagagctggtgacctggttaaaggcgcttttgtcaggactctggcttcttaaaaacacttccggatctaattcctctagctttttgtctttcctaaagaagttgtagccattttataatttgtttggcaaaacaacttattctatatttatttcgaatgatgtacgatacaactcatgttttttattgctctggctcccgataataaaaaactgcgccaacttagggctcttgaccag

SEQ ID NO: 210567 - DNA, 2718 bp, Zea Mays
actgacacgcacgcctcacgcaacaaaggcgagacagagcaccagctcaccgccccaccgattcaaaggcgctcggatcctctgacgtcgacgttccctgccagctcccggctgccgccctcgctccttccgccatctgcgctgctctgcggcgccagagccggcgcccgcccgctgccgccctcgacggaccgggacacggggccccaccgttctctttcctgcgctgcgctgcgcggcggctgtgctgctgatcagttaatgtgcctgtgaggctgtgacaggcggcgtcgagcgagtccgaggcgggctaactaaacccgccgtctctcgaggcggcgcccgcggagggccaggtggagggccgaggaaggtggaggcggtgaggcgatggggggcgccaaggcggaggacaagcccgccgccgccaccgctgaagacgattggtgttaccagtttggaaacaagaatgcgtttgactcgaaggccccgaaaaaatcaccacttgcattgagagtggttgtctttgccatgactgtgttatgtgggatatctatttggtcaatgtgtatgaagcagctagggagtgatggctggtcaagaatagtgaagatcgaagttgtggaacaaccatgtaataagtctacagttcctccttctgaggttcaatttgcgcattaccctcaaccgacaacttacagcagggaggaatgcaagtgcaatgctgtccggttctttgcgattatatcatcacagcgatctggaagtggctggtttgaaacccttcttaacagccacatgaatgttagctccaacggtgaaattttctctagaaaagaaaggagaagtaacatttcctctatagtaaatgccatggatagagtgtacagcttggattggaacagtagtgcttccaagaatgagtgcactgctgctattggcttcaagtggatgcttaatcaggtgatgactaaaacatgcagtatagataatttaattggatatcattttgttcatttattttttcattcagtcccagtacattcacaactaggtgctagatgtgctcgaagcagtttcaaaccaagtttttttagtttggatctaagcccattagcagctctacttagaatctacatggcaagcatattcctttttgggacctcatctaattcgtcttttttgatgaatgttcatggtggacagattgactaataaaaccatgaaatactagccgccagggcatagagagttctctagagactgaaaccaaacaagcattcttctgaccggtatgtttccagggtctcgtggcgaatcacgtggccgtagtggactacttcaatcgaagaggagtctctgcaatatttctcttcagaaggaatctgctccgccagttggtatcacagctagcgaataaccacgacagattcctgaagcagttaaacggaacacacaaggcgcatgtccacacagagcatgaggcccatatactcgcgagatacaagcccaggctgaacacgtcgtcgctaatacggaaactgaaacaggctgatgagtacacacgcgacgcccttgagaacctaaataacacccgccacatcactgtctactacgaggacatcgtccgcaacagaacaaggcttctcgacgccctggatttcctcggagtgccgaggagggagctggcgagtcggcacgtgaagatacacacgaagcccctgtcggagcagatcgagaactgggacgaagtctacagcgccctcaacggtacccagtacgagggcttcctgaatgccgctgactatacgtaatatgacgtcacggtctccacgtctcttgatgtagatgtaggtgtgtaggtatagcgccccagctgtgattcctttgttcttgttttcgagtagccggccggccttctgcgtgcctgcctggcaggagttttgatgcgggggatggaggcgctttgccatggttgcgttcgagctcctggctagcccacccactagctttcctcatgtccatgtaacgaccctcgagcttctctcatctttggccgtccgcttgtaatgcttgtcgtcagtgatctcacccatgccatgccatgccatgccatgccttcgagggacaaagctgtgcacttgaacttgaggcttgtcttttcattgggtgtttgcggtgggcaagcaagacgctgcagttaaggattattggaaggtggaaggacttgttggagttgctcttataagatttgttccggtattctttgtaggacgggcggcgtattattgcacccatgggcgatgccgcgatggcaatgaaatccgctggcgggattttcagctatccggtactgtttgcatgtacaacgactcaggataaaaaaggtctcttttcatattggagtcatcccgtgttgaccaatagttaactatgagtcatttgttgggggtctttttaccaaaggttctccaaacacccaaggtatattggcggttggttggaggctttgattggtcagatgaacgaagggaaatcttgaatgcttgttcagtacgtttatataagaaagaagacggaaatgcttaggggccctagtggattttgtagtttgtatgtataggaatggagggcatgattgtaattttatacgaaattatacaccggatcatcactatacacagaggtacattgtcatgtatggggacaaggtacccg

SEQ ID NO: 210568 - DNA, 1727 bp, Zea Mays
tcagctggctgttaaggtcaatgcatatgatggcgttcagattgtggactcattacattcgtcaaagtatcatatagctacacttgcagaatgtgatagttgctgctgtacagatcctccaacttctcaatttgttgataatgaaaacacaaaaaatctactgaaagagaagcataccaagcctattaattttcctggtccaataaaaatgcttggtgatgggcacacagtgacagtaattaatgttcaaagcaagttgagcccaccttacatgcacagcaaagatcctggggatgcggaaaggttatctactccaggagagaacaataaggagagtagtttctatcataattgtgaaaggcattgttatcagcctatattaccatggataaatggtgatggtagtactaatagcactctctatgaaggtttaagtcgccgagttattggttatgtcatgcactatccaggactatcggaggaagatgttatccgtaggatggatgtattgaatcctcagacttgcaggaccctgctagaaaagctaacgctcgatgggaaccttcatgttcgggtttttgaagaacctgtgccaatggctccgaccacactgcaggatccagacttgtgagggcatcaagatttggaatgtttaaatgttaccgtccccagaactggtaaggccatctcgtggtaagaccatctccgccgtgtaaatagtcgtgcaaagtactattttgcacctgtttgcagagtaaaatttaaaatagagagtaagatagggagtggaatagagagtctgctggtctgctggagagctaaggcccttaactgaaccatcatcacttgtctgtttctgagccgtgcttgctctaaggccgtgctgattgtcgtgcttaggagcaggcatattatggttgtgcaaaacattgttttgcactgtataattattatttacaaagtggtgtttgaaatagggaatgtgatatgaggtgtgatagggaggctggagatagactaagactcattttcaggccgccgttgtctctgggttctgtcgtcgtaggttcatgcatgaaagatgtaccttaggttatgtccaacagcttacgaatcagttcgcacatgcgcattttgtgcgaccacatcccattatgtatacttccagcaaattgtcgcgtaaaatgtgtggtcgttcgtgtggccacacgttctcttctctgcaggagagggtgcgcactctcatgctcgagacactataaatgggcgttttttgttgcgcaaatgagcgccatggcgcatgcgctttcgcattcggccaccactggacataaccttagtctccagtaatttactcatctttcattttaaatctcactctataaatagtgcagttcataaaataatatttttacatggtcatatgcataatatggtgaccatagccttactagaggtagtatccgtagttgtttactcaaaaggagcatgatgaaagcatctacaccttaatttgattttgatagttaaagataacataattattatgactaagggtgttttatagaaacactattataatgtctgcgcattgcgatgtacatcaatcacatttgatgctatagtgcaatagttatacgacattcgagggagctgtgtcaagttagtgtgatggatgctccccataaaaaaattaaaattaaattagatcctatcataaaaaataa

SEQ ID NO: 210569 - DNA, 1928 bp, Zea Mays
ttgtgcgcagatggatgggtttaccttgccaccatttgagtcaacctgcatctttagggacaacgatattataaggggacaaaggctgaaggtgacaaattctggaaagcatatagattacagcaagaaggaacaaaatggatctaaaaagttgaagctgtcagttattgatattgaagctaagaaagcaactccacaacatgaaactaccactaccttagtggagcagcaaaaatcagaggggaactatcaaactgagttgaaatgtgaggcaaaggtgacaaactatgatgctcaaagtgacacaaaaaagttggagagtcgaagtgctcgccgcaagaaaattaaaaggctaatgaaacaaagaggaaaattacaaatagaaaagaatgtgcatggagattcaccaatagctgctgattgtccatcatcaagcaatcaagatggcttgcctgtcccatcaagcaatcaaaatggatcacatgttcatttttcaagcctcaaagcagatgaggacgaatctgaaacgtcggatgagattgtcccagttgtggttcggcctggtcacattcgctttgagccagcaggcagagaacccgacaaatcgccagcaaaagaattacagggcacattccaatggagtggaacattgagcaaaaagaagggccagaagtggggaataaatagctcaaacaagaaaaatgccgatgtcggctatcatgcaggaatagctggaagcaacacagaagttaataatcttgtcatggacattaaggttactgaaaatggcttctgtgctgtcagtaatagaaggatcgatgaaggcagtaatgttgagatgtccagtgtgaaggctgttgctaatgaagaaaagtctagaggtgtaccttttgatttcgagagcttgtaccccctaacgcaacttccaaaggagggagatctgattgcataccgattggttgagctgtcttccatgttgtgtccggagctgtcttcgttccgtgttggaaaagttgtgttatatgatcccatatcattgcgtatcattctcttacccgttcaagagtatccaatcaccaccgaggaaaacgaagacaaggacgagccagatatgcttgtggacttgtcaccgtacaaggaagatggctccttggagatcgagtactcttcacttcttgatgtaaggctactgaagggtattgaaccagtccccggggctttcagtactcccttggcagaaacatgcaatgaagttggatcggcactggccaaaggaaggccagttaccttacacaaaaatgaaggcaatattgagagccagaaatcacccttggttgcaaacaacactaatggtaaagaacacaaactaggaaagtcagaaaagacggtttgggaaaaaaatgacgaacccggtgatgaggtcgatgttcagcaaaatggctggggaacatggaaacaaaatagtacgtcagcttggtcttatagagcccttaggagcagcgcccttggcccgacgatggcacttctacgagggaagaacaaccagaggggtaaaccaccctatcgaaagaagggcaagtaattgcctatgtgtttagtgtttaagttcaacgatacctatgtaatcctgtgttggtccaatcttttagcagttgatcttatttatgtaaaatttggcgaggaagagtgactgccgttgctgccctggtcattttgaagtctggccaagcgaattgttatcgtttgcaaaggatcgttatgatttgctccgacacttgtcaaatgctggttttagagttttgcatgtgcactaaaaatgttcataattccatatctgccacaaaaggttgtagcaccaaacgctccacctaaggccttgttcagttatttccattacatatgaattgggtgggattggaaaaaattaa

SEQ ID NO: 210570 - DNA, 1819 bp, Zea Mays
ttgtgcgcagatggatgggtttaccttgccaccatttgagtcaacctgcatctttagggacaacgatattataagggttaaacaaaaatcctgtacgaagcacatagagcacaatgatgtgcactgtattcaagatcatgagataatagagaagagatcacttccagttgatggcaaaatccttgcaatccaggataaggaggatgtctgtaaacaccaagaagaagaggcacatgacgatcaccagcttgaagaaaatgccactgctagccatagcacagaaaataatggtacaagtttgaagaggaagcggaatgatggggttgcagatatacctgagagctcaaagggacaaaggctgaaggtgacaaattctggaaagcatatagattacagcaagaaggaacaaaatggatctaaaaagttgaagctgtcagttattgatattgaagctaagaaagcaactccacaacatgaaactaccactaccttagtggagcagcaaaaatcagagggggcacattccaatggagtggaacattgagcaaaaagaagggccagaagtggggaataaatagctcaaacaagaaaaatgccgatgtcggctatcatgcaggaatagctggaagcaacacagaagttaataatcttgtcatggacattaaggttactgaaaatggcttctgtgctgtcagtaatagaaggatcgatgaaggcagtaatgttgagatgtccagtgtgaaggctgttgctaatgaagaaaagtctagaggtgtaccttttgatttcgagagcttgtaccccctaacgcaacttccaaaggagggagatctgattgcataccgattggttgagctgtcttccatgttgtgtccggagctgtcttcgttccgtgttggaaaagttgtgttatatgatcccatatcattgcgtatcattctcttacccgttcaagagtatccaatcaccaccgaggaaaacgaagacaaggacgagccagatatgcttgtggacttgtcaccgtacaaggaagatggctccttggagatcgagtactcttcacttcttgatgtaaggctactgaagggtattgaaccagtccccggggctttcagtactcccttggcagaaacatgcaatgaagttggatcggcactggccaaaggaaggccagttaccttacacaaaaatgaaggcaatattgagagccagaaatcacccttggttgcaaacaacactaatggtaaagaacacaaactaggaaagtcagaaaagacggtttgggaaaaaaatgacgaacccggtgatgaggtcgatgttcagcaaaatggctggggaacatggaaacaaaatagtacgtcagcttggtcttatagagcccttaggagcagcgcccttggcccgacgatggcacttctacgagggaagaacaaccagaggggtaaaccaccctatcgaaagaagggcaagtaattgcctatgtgtttagtgtttaagttcaacgatacctatgtaatcctgtgttggtccaatcttttagcagttgatcttatttatgtaaaatttggcgaggaagagtgactgccgttgctgccctggtcattttgaagtctggccaagcgaattgttatcgtttgcaaaggatcgttatgatttgctccgacacttgtcaaatgctggttttagagttttgcatgtgcactaaaaatgttcataattccatatctgccacaaaaggttgtagcaccaaacgctccacctaaggccttgttcagttatttccattacatatgaattgggtgggattggaaaaaattaa

SEQ ID NO: 210571 - DNA, 3031 bp, Zea Mays
gttgagattctgtccccagccggccagccctcgcagcagtcttccctgaccgtccacccatcacctcactggctcactcatcactccctcagcacctcggccctctgcagtctgcgtctgccccctcttccaggtcccagcgctgtctagatccagatgggagctccaccgctgcccttctccctgccccacgccgctctcctctgatcccgcactccccgaagtccccactgccggcgcgatccccgcattccctaccgcctgctagccccaccacccgctgaagccgtccatacaggccattgcgctgcccggaatcccggcgtgaacagccgttgctgcagtgcggcctggagctccgcctgttccccgcttccgcccgccaccgcctttcataaaaacagcccctcctcctgcgcctggagtgcggagccgtcaccgctgtctctctccacgggacacgccgccgccgggagggaagaacccgactcccgggcttgaagttgccgcacccccgccgtccgacgtacacaggttggggttgtgtctgaggagaaactccttgacctattggagatagccatgtcatcaaacactgctgaaacagtcaaaaggtcgagagagctgatggattctggtgttgatccaatggcattaatgtcacaattagctgggctcataatggacatcattgctgggacctatagattggcagaccctacatgcggtggagatggaattggtggtcgaaatataactgatgctgaattggaaagattacaacaagcgttgaggattctttctgatgctgaaaaacagataagactttcaagcgagcgttcgacatggttcactgctgctttactccagcttggttccggtcacaattcagaaataactcaatcaagaagcagcagtaagcaaagcgctaaggcaaccagcgaaaccatgatggaagcaatgagagaatcttctgcaagcaggagtacagctcatcatttatccacttttcctgattcaaagaaaatagtggatctgaaaacaaccagtgggcactccagtcctcatgcttcactgtcctccaggatgagacacaatgaaaacatgatttatgccgagcatatgtctgttgatagagcattattggattctgctcaaacaagtatttcttctgagcaaaagggtatgcatagtggaatctcagataaccttacccgaatttggatgaagtgcatagagaattgccactccaagacattgcggcaacttctctatgatcatgggaaattaacatctgtcaaagaatgtgaaggtaccattgttgcttttatagcatttgaggacaatgatataaagtttcgagcccaaagatttattagcagcatcagaaattcaatggaaactgtactgaaatgcaatgtggaagtcaggatttgtttgatgcaagaatttcttgctgggggactaaagcatgagacatacccagatgagacagctgaatctgatgtcttgagttgttcaacgaacagtgaacgtcgaaagggtgttctgaatctatcaggtgctggtggagtgcagccaaacaatgttcccatgatcatctctgaggaaacttcaggaatgcatagaacaagagggcaggatgtttctattgaacagttgaaggtatcagcttttgatgaacaaaggttagagagtgcatggctccaggctgctgaaaaacccatgcctggtatgttaaatcaaggtagacctgagagaaatcaaattcttccacaaaatggtggtcagcatcatggtaggtcctcaatggccaccgttgttccgtcaaggcatgttgacaaggatctatctaatgaactgaaagccttaaagatcagtgacagtcatggaccccataatggtcaagatgtacagatggagagtggttatgccatttcaccaagccttttgcatagaaataaccatttggcaaattgtgacaatgagagcgttgtttctgagtccggagcacccggttgccatgggctgttcccatgctggaaaactgaaaaaacgaaaaggagaaagggaaaagggcagacacggttgaggtcatcttaagttggcaattgacgacgataaaaggagcattgtggccctggattgtagaggaacatttgaagagatgcacgtgcctcacgaaactgccttacttcatttcttctagaggatttatgaagaccaattcgttattccatgcatttaatgctgccgctgagggttcagcattctctacgcgtggactcagcagagggtgataaaaagttgcagagatgttggacatgcggattttaacaagccattctgatccatctatgcttcttgtacagacatttggatgctgaggcgtatacgtgaagcggtcagcaaaattaggaaacattgaacaaaggaagaccttgcgtcgataagctgtggttttatcaagtttgtacaaaaactgcaatcaactgtggtgttgacgttgctgtaggccctatttgtttccttgataaggtgataatggatcacaatccaaatatttattgacaataagttaaagactttaaataagtttagtttaaaaataaatggaaatagaatctgattctagatccttaaattttatagtataaaatttataactcattaccacctttatttttaggattatataatctagcttgtgaattatttaagtacctattgacctgcttatggattatcatagtttagatatctagaatacataattcacctaataatctgtgttgtttatttacctttcaatttatttaaactagattatataatctagaggttaaacagggccttaataagccgtgtttatctcaccataaaacacataatatatatgttggggaccttcggcgtccgaaggtcctcaaaaacatgatttaatagtgtttctggagtataatgtgcaaacaggtatcttcggactcgaatcggtatcacagagggagaagctcaaagcatacgaaggttg

SEQ ID NO: 210572 - DNA, 5097 bp, Zea Mays
gttgagattctgtccccagccggccagccctcgcagcagtcttccctgaccgtccacccatcacctcactggctcactcatcactccctcagcacctcggccctctgcagtctgcgtctgccccctcttccaggtcccagcgctgtctagatccagatgggagctccaccgctgcccttctccctgccccacgccgctctcctctgatcccgcactccccgaagtccccactgccggcgcgatccccgcattccctaccgcctgctagccccaccacccgctgaagccgtccatacaggccattgcgctgcccggaatcccggcgtgaacagccgttgctgcagtgcggcctggagctccgcctgttccccgcttccgcccgccaccgcctttcataaaaacagcccctcctcctgcgcctggagtgcggagccgtcaccgctgtctctctccacgggacacgccgccgccgggagggaagaacccgactcccgggcttgaagttgccgcacccccgccgtccgacgtacacagtgggatgtactacattggtctgcttggacagcagttctctttttaatttgtaaatatctctctcgttcttcagttatggccactatagttgaagggtgtgttggtcccagtgagcttcacctgaagaaggaacttattgccttgagaaaggcacgtttcttgcgtgatcccgaaacatgctcatcctggaggtccccgttaagctctaaatcattcttgtcaacttctggtgttataaatcataatgaggtaggcagtagtttgtcagaaaagcgcacagagccagctgcagcaccagtcaaaagtgaaaagaaaagaaaaaacgtttatctctacaactggagacatcattctaacaaatctagtgaaagtggagtgaagttagatgtggacgatagacaagcctcagtagactgtagtctggaaagcccgtgtatttctaacggtatggactctaggagtgacacatgtcttgaagttcctgtcagcatatacagtgttcaaggttctaattcatgcactcctgttaaaagaactgttagaagggtaaggaggagttcattctcaaagaaaggagctatgagaaattctactgtttcaaagttgctagatctccatgtgaattctgctgagcagtctgaggatactgagaactacaactcagagactcatgagcaccttcagaaagtagggtatttttctcactctacatcaccactgtttgctgcatcagggtgttttagctcaacaaatccttctaagctgttgagagtgccaagaagagaaggatcttccttctcttgtactccggtctccactagctcctattacaggtacaaagggaggaatcctagtactgtaggttcatgggatggaacaactgctgcttcacttgatgacgatgggctgaaccaaccagaactgttgacaaatcagaggtgtggtattccttgttattggtcaaagaggagtaaacacaagggatctgaaaggagttgttctccttcactttctgatacacttagaagaaaaggcaccagtctattgtgtgggagtcaaactatgcatgggagaaagaaatcatcaggctccaataaatatggatatcttaaaaaatcttcccaaggtgtaccactgttgggtgatagtagtcattttgcttattcgtcatttgattcagctagtgatgaagtttcaaccatctttggagaattagatctggaagctttgagccgtttggatggcagaaggtggtcaagctgtaaaagccaggatgggattgcactgtctgtgagtggagctgatcatgtagtttcagatcacagaagcttgagccaaaaatatcgaccaaggtcatttctagaaattgttggtcaaaactttgttgtacagtcacttagtaatgctatcgcaagggaaagaatagctccagcatatctgttccatgggccccgcgggacagggaaaacatcttctgcaagaatactttcagcagctttaagttgtactgctactggagagaccaagccctgtggagtttgtactgagtgcagtgactttttcactggaaatggaactaatctaattgaggttgatgctaccaacagaaaaggtataaacagagtacgccatttgattgaaaatataccagcatctgcaacttcttcacggtacaaagtatttgtcgtggatgaatgccatatggtatcttctaaagtctggtcggcatttatgaaatttcttgatgaaccattacctcgcgttgtcttcatatttataacaatagaccctgaaaatcttccccgttctgtcgtatcacgttgtcaaaagtacatgttctccaagatcaaagacattgacatagtatgccggctgaggaagattgctatgaaggaaaaccttgacgttgaattggctgctctagatttaatagcactaaattcagatggatcattgagagatgcggagacaatgttagatcagttgtgtttactagggaagaagataacaccatcacttgtaaatgatctggttggggttgtgtctgaggagaaactccttgacctattggagatagccatgtcatcaaacactgctgaaacagtcaaaaggtcgagagagctgatggattctggtgttgatccaatggcattaatgtcacaattagctgggctcataatggacatcattgctgggacctatagattggcagaccctacatgcggtggagatggaattggtggtcgaaatataactgatgctgaattggaaagattacaacaagcgttgaggattctttctgatgctgaaaaacagataagactttcaagcgagcgttcgacatggttcactgctgctttactccagcttggttccggtcacaattcagaaataactcaatcaagaagcagcagtaagcaaagcgctaaggcaaccagcgaaaccatgatggaagcaatgagagaatcttctgcaagcaggagtacagctcatcatttatccacttttcctgattcaaagaaaatagtggatctgaaaacaaccagtgggcactccagtcctcatgcttcactgtcctccaggatgagacacaatgaaaacatgatttatgccgagcatatgtctgttgatagagcattattggattctgctcaaacaagtatttcttctgagcaaaagggtatgcatagtggaatctcagataaccttacccgaatttggatgaagtgcatagagaattgccactccaagacattgcggcaacttctctatgatcatgggaaattaacatctgtcaaagaatgtgaaggtaccattgttgcttttatagcatttgaggacaatgatataaagtttcgagcccaaagatttattagcagcatcagaaattcaatggaaactgtactgaaatgcaatgtggaagtcaggatttgtttgatgcaagaatttcttgctgggggactaaagcatgagacatacccagatgagacagctgaatctgatgtcttgagttgttcaacgaacagtgaacgtcgaaagggtgttctgaatctatcaggtgctggtggagtgcagccaaacaatgttcccatgatcatctctgaggaaacttcaggaatgcatagaacaagagggcaggatgtttctattgaacagttgaaggtatcagcttttgatgaacaaaggttagagagtgcatggctccaggctgctgaaaaacccatgcctggtatgttaaatcaaggtagacctgagagaaatcaaattcttccacaaaatggtggtcagcatcatggtaggtcctcaatggccaccgttgttccgtcaaggcatgttgacaaggatctatctaatgaactgaaagccttaaagatcagtgacagtcatggaccccataatggtcaagatgtacagatggagagtggttatgccatttcaccaagccttttgcatagaaataaccatttggcaaattgtgacaatgagagcgttgtttctgagtccggagcacccggttgccatgggctgttcccatgctggaaaactgaaaaaacgaaaaggagaaagggaaaagggcagacacggttgaggtcatcttaagttggcaattgacgacgataaaaggagcattgtggccctggattgtagaggaacatttgaagagatgcacgtgcctcacgaaactgccttacttcatttcttctagaggatttatgaagaccaattcgttattccatgcatttaatgctgccgctgagggttcagcattctctacgcgtggactcagcagaggacatttggatgctgaggcgtatacgtgaagcggtcagcaaaattaggaaacattggttagcgagttaatgaggcgcaattatttttcagcatttttagtactgtgtttgacagcatttgaatttactttgcatttgttattgtaccaattcctttttttttgttagaacaaaggaagaccttgcgtcgataagctgtggttttatcaagtttgtacaaaaactgcaatcaactgtggtgttgacgttgctgtaggccctatttgtttccttgataaggtgataatggatcacaatccaaatatttattgacaataagttaaagactttaaataagtttagtttaaaaataaatggaaatagaatctgattctagatccttaaattttatagtataaaatttataactcattaccacctttatttttaggattatataatctagcttgtgaattatttaagtacctattgacctgcttatggattatcatagtttagatatctagaatacataattcacctaataatctgtgttgtttatttacctttcaatttatttaaactagattatataatctagaggttaaacagggccttaataagccgtgtttatctcaccataaaacacataatatatatgttggggaccttcggcgtccgaaggtcctcaaaaacatgatttaatagtgtttctggagtataatgtgcaaacaggtatcttcggactcgaatcggtatcacagagggagaagctcaaagcatacgaaggttg

SEQ ID NO: 210573 - DNA, 1608 bp, Zea Mays
tgacgacataaaatgcaacgggatggatgcgtgcctggatcttacagggtactgctactggtatcgtgatttcatgtaccatatatacctcgctgtaggcggcggcggcggcggccatggacttcgtgctccaggtcctgctgcgggtggtgatgagaagaagcatccgcaggctgcaagaggtcgttgacatcgccgtggacatcggcacggctgtcttcgtggccgtgcgggtctccggcctcgtcttccgccgccggctgcccacgccgactacgacatcgtcgtcgtcgacgacgtactactactccccggggacgtcctcctcgatcggcatgcatgtccaggaggattaattattgacaggcactagatgagctagctagctagctagggccagaagatgtatacttctcgcgggggcatcgaccaccccttctgttgcgggcatgccgacctctctggtcactcaggggatgtcgggagcgactattcctgacacggtcctctctgagccgtcgtcccctacagccagcccggggaggtcctagcggtggaaatggaagttggtgcttcttcgttgccgccccacgctcccttgccttcgggcattgtggtgacaagtgaccaatctgggcagcatcgacgatacgagattagattccctacggtctgcgccttttcgcgcggtcggtggctcgagcggaagtgctactggtcacctagtgggaggtggatcagctatgtgctagggccatctgttttgaggagagggagcacaagttcgatgttctcaactccgaggctgacatggcttcgtgatgaggctgcgcgcttgtgcaaagagcgcgacaacgtgtggggcgatgcaaagcgtcttcgagaagcgaggtcccagctttagaaggaccttcacgaggctaatcttttagttgaggaggttgggtcgatcctcagggaggtctttgctcgtctggagatggcaaatttagagcttttgagagagcgcaatgcggccagagcatggctccaaaagatgttcccccgagcccaagacgccaagaagacggtgggagaggcaaagaccatggcagaggacgaggcccagaagctcttgtttgcccgagacatcattgttatcgcgagagttcaagcggaggcttcactctcagagcagagcacagagctccaggctctcagggcggccgtgagcacgtatagccttgaggtagatggctctcattttgacgagaccaacacgatcgtgatcatgaagggctttgccgccggacagagcgacgaggagctatatcgtattgaagaacaaattcaccttcacgcccggttgattgcaagttgggtcgacgcgaagttcctcctgatgagcccttggagtatggagccgtccaccggcatctaaacgacgttacatcgttgtcttgtaataaactttgtttgaatgatggggctaaacatatgttcgtgccttttggtgtgatattgcttcttgcttgagtcatgggccttgcgattggtcacggtagctggtgcgtatgtccgggcacgttttcacggagtgatccctgtttcccaccctcgagcagagcg

SEQ ID NO: 210574 - DNA, 1629 bp, Zea Mays
cataaccgtgcgcgtgggggtggatgagggagagggagttctgaagcagaccaacacattgccagataagccgtcacctgcaactgctcctgcaacaacagaacagcaatctaacaatttacctgcaaccagttcagcgtcaaggctggctgccttgcaaaagcttccccagcactttctgaagtttctccaaacaaagaaatcagttaccaaaaaggacgttgcgggtataaacaagtggaggtttatgaagctaaaggaacatatgcaaggagataccgacgctgaaaacgaagcgtacgagaggtatacgcagaacgtcgggttactggaggaagcattctgtcccatggaagaagatgctgatgttgatcctgaggctgaagcaacttcttcttcagaggaagaaaggatggacctgttggtttcggcggcaaaggcgaggttgaagtcggataacgaagctgccaatagcttcagggagagggttgccactatcttggaccagaagctgaaggacctgcgcgggagccaaagcgccagtgagggtgacgaaccgtctggcccaagtctggacgatcgtctaaccccgaccccgatgaagttcagcacagcgcagaagatggggagagccacggaactgaacgagctgctgggtaagctgacaggagcacggagcgaggacgatctgaagccttgccgtgatcttgccgagcagctgtttgggaaggaggacggctcctctgttggcaattcgaacagagtggatacggagactgagccgggcgatcaggagtcagctgcagcagtagcacggcgctattccgtcccaacgctgtgcagcaggatggaggtgggtgaggacttcgcctcagagatgaacgatgaattctgctctttgactcaggtggcccagctatgaaacctgaaacctggactaatcgcaatgtgacatttttaggggatttcatcacatttaagcctagtttagaaactcaaatttcatccgaaattcgagtgaactgagggaaaaataaaataatttctctcaatcccctccaactcctgagtatttaagttcctaaactaatccttagggaacttaaatccttttttggaattgaaggggattaaggaaaaatatagttacctcaatgtgctttccaatttagaaggagatttgagtttttggaactcgcactgtagtgtcagcaagtgtttggctgttcgaagtgaggccagagcagtgtgggacgttttgtcgtacccctgtttcttagcccgtatttgttctggtatacacgaaagaagcatggagtgaatggatcgaacacgtcgcctcgaagttgcatggacaattcttgagcagctctctttggtgaagtacagtcagagatgcaaatgggtttgttctgctctttgatgattgggttgcattgcatcccaagttcccgatctgttatctggcagaattactattaggcgtttatctctcttcctgtaaaagtctcggttcattgcggatccagtatgctgatcagagctattatctgaacaggagagagaaccgaagggtgtacagtagagatcttctttcgttcgtctctaattttcaataatagaaatggg

SEQ ID NO: 210575 - DNA, 2746 bp, Zea Mays
gttaaagaagggtttttggcatctagccgtccctttctgctgcgaacttgcgttgcgaccgtgcattccgttcctctcctctctcggctctcggcgagcgagatgcagagcctaaccgtagcaagagcgcttcctcccgccgtggccacagctcggcggcggccgcgcgcgtcctcttctagcagggaagcggttttacaatgttggaagtacgaattaagtcaagaccaatatctgggaggatccctaaggataggttcgtctcaaggaagtttggacatacatcgctcaacaaatttgctcagaccagctgctgcatctgtttcagttgaacaagatgaagtcaatacttatcttccaaaaggtgatatgtggtctgtgcacaagtttggtggaacctgtatgggaacatcccaaagaatccagagtgttgcaaatatagttcttggtgattcttctgagaggaagctgatcattgtttctgcaatgtctaaagtaaccgacatgatgtacaaccttgtacagaaggctcagtcaagggatgattcatatacaatagcattggaagaagtttttgagaagcatatggttgctgcaaaggatcttattgatggagaagatcttgcaagattcttgtctcagttgcactcagacgtcagcaacttgcgagccatgctccgtgctatttatatagctgggcatgcgacagagtctttctctgactttgttgttggacatggagagttgtggtctgcgcaaatgctatcttatgcaataaagaagtcatactttggggcaaatgttttgcatccgcgcaccattatacctgtgatgaaagacaacattcccattgttattaggaacatgttcaatctctctgcctctggaacaatgatttgcaagcagccggccaatgaaaatgaactggaatggctggcgttccaggtacagcaagtgctatatttagtactgttaaagatgttggagctaatgttatcatgatatctcaggctagcagtgaacattcagtatgctttgctgttccagaaaaggaagttgctgcagtttctgctaggttacatgataggtttcatgaggcattagcagcagggaggttgtctaaggttgaagttattaatggttgcagcattcttgctgctgttggtctgaggatggccagcactcctggagttagtgcaatactttttgatgcattagcaaaggcaaacattaatgttcgagcaatagctcaaggttgcagtgaatacaatatcactgttgtattgaagcaagaagattgtgtaagggctctgagagctgctcactcaaggttcttcctctccaaaacgacacttgcagttggcatcattggacctggtttaattggtagaacactccttaaccagctcaaggatcaggttgctgctctcaaggaaaatatgaacattgatctgcgtgtcattggaataactggctcaagtacaatgcttttgagcgacacgggaatagacttaacccagtggaaacaacttctaaaaaaggaagcagaaccagctgatattgatagttttgttcatcatttatccgataatcacgtatttccaaacaaagttttggtggactgcacagcagatacaagtgttgcatcccactattataattggttaaagaagggtattcatgtcatcacaccaaataagaaagcaaattctgggccacttgatcagtacctgaaattgcggactctgcaacgtgcctcgtacactcattacttttatgaagcaactgttggtgctggcctcccaatcattagtaccttgcgaggtcttctggagacgggtgacaagatactgcgtattgagggcattttcagtggaactttgagttatatatttaataatttcgaaggaacaagggcattcagtgatgtcgttgctgaagcaaaagaggcgggatacactgaacctgacccaagagatgatctatctggaactgatgttgcccgaaaggtcattatccttgcaagggaatcaggtttgaggcttgaactttctgatattcctgtgaagagccttgtgccagaaacacttgcagcatgctcgtcagcagatgaattcatgcagaagctaccatcctttgacgaggactgggccaggcaacgcagtgatgctgatgctgcagacgaagtcctgcgttacgttggagtggtggatacggtgaacaagaggggacaggtggagctacgtaggtacaagagggaccacccgttcgcgcagctctccggctccgacaacatcatcgcattcaccacctcgaggtacaaggagcagccgctaatcgtgcggggcccaggcgcgggcgcggaggtgactgcgggtggcgtcttctgcgacatcctgcggctggcgtcttaccttggcgctccttcttagagcttccacttacagttgtcaatttgaagaggcagatggacagtgccctgcatgatgcctccgtgtttaggcttattatggacttgctcaaagttgttctgaataagtgccaggaaataaggcctctatctatttaggcctctatcttcggggtagctgactaagtgttgttattgctacggaatccagaattctgtgaattgaaatgaattgtaccgatgaagactgtttgcttgtgtctactggctactgttatgtgtcggtgttttaaccagagggtcccaaccaacaagtgaatttgtgcaagagaagac

SEQ ID NO: 210576 - DNA, 2393 bp, Zea Mays
ggggagagtgttgcaaatatagttcttggtgattcttctgagaggaagctgatcattgtttctgcaatgtctaaagtaaccgacatgatgtacaaccttgtacagaaggctcagtcaagggatgattcatatacaatagcattggaagaagtttttgagaagcatatggttgctgcaaaggatcttattgatggagaagatcttgcaagattcttgtctcagttgcactcagacgtcagcaacttgcgagccatgctccgtgctatttatatagctgggcatgcgacagagtctttctctgactttgttgttggacatggagagttgtggtctgcgcaaatgctatcttatgcaataaagaagtcatactttggggcaaatgttttgcatccgcgcaccattatacctgtgatgaaagacaacattcccattgttattaggaacatgttcaatctctctgcctctggaacaatgatttgcaagcagccggccaatgaaaatggtgatttagatgcatgtgtcaaatcatttgctactatcgataatttagcacttgttaatgttgaaggaactggaatggctggcgttccaggtacagcaagtgctatatttagtactgttaaagatgttggagctaatgttatcatgatatctcaggctagcagtgaacattcagtatgctttgctgttccagaaaaggaagttgctgcagtttctgctaggttacatgataggtttcatgaggcattagcagcagggaggttgtctaaggttgaagttattaatggttgcagcattcttgctgctgttggtctgaggatggccagcactcctggagttagtgcaatactttttgatgcattagcaaaggcaaacattaatgttcgagcaatagctcaaggttgcagtgaatacaatatcactgttgtattgaagcaagaagattgtgtaagggctctgagagctgctcactcaaggttcttcctctccaaaacgacacttgcagttggcatcattggacctggtttaattggtagaacactccttaaccagctcaaggatcaggttgctgctctcaaggaaaatatgaacattgatctgcgtgtcattggaataactggctcaagtacaatgcttttgagcgacacgggaatagacttaacccagtggaaacaacttctaaaaaaggaagcagaaccagctgatattgatagttttgttcatcatttatccgataatcacgtatttccaaacaaagttttggtggactgcacagcagatacaagtgttgcatcccactattataattggttaaagaagggtattcatgtcatcacaccaaataagaaagcaaattctgggccacttgatcagtacctgaaattgcggactctgcaacgtgcctcgtacactcattacttttatgaagcaactgttggtgctggcctcccaatcattagtaccttgcgaggtcttctggagacgggtgacaagatactgcgtattgagggcattttcagtggaactttgagttatatatttaataatttcgaaggaacaagggcattcagtgatgtcgttgctgaagcaaaagaggcgggatacactgaacctgacccaagagatgatctatctggaactgatgttgcccgaaaggtcattatccttgcaagggaatcaggtttgaggcttgaactttctgatattcctgtgaagagccttgtgccagaaacacttgcagcatgctcgtcagcagatgaattcatgcagaagctaccatcctttgacgaggactgggccaggcaacgcagtgatgctgatgctgcagacgaagtcctgcgttacgttggagtggtggatacggtgaacaagaggggacaggtggagctacgtaggtacaagagggaccacccgttcgcgcagctctccggctccgacaacatcatcgcattcaccacctcgaggtacaaggagcagccgctaatcgtgcggggcccaggcgcgggcgcggaggtgactgcgggtggcgtcttctgcgacatcctgcggctggcgtcttaccttggcgctccttcttagagcttccacttacagttgtcaatttgaagaggcagatggacagtgccctgcatgatgcctccgtgtttaggcttattatggacttgctcaaagttgttctgaataagtgccaggaaataaggcctctatctatttaggcctctatcttcggggtagctgactaagtgttgttattgctacggaatccagaattctgtgaattgaaatgaattgtaccgatgaagactgtttgcttgtgtctactggctactgttatgtgtcggtgttttaaccagagggtcccaaccaacaagtgaatttgtgcaagagaagac

SEQ ID NO: 210577 - DNA, 2796 bp, Zea Mays
acgacagccaatcatgccgagctgcaaacctaggaagcgctgggccaaccaccatcgagcctgaccacagcatgcgaccatcgcatctgatgtgtatgccgccaggtgtgtaacctctgtgtgttgtgtcaccctctgaattagtacaaacaaattccttacaaatcaaacagaaaacatcaaaattgcatcgctttctaaccaattcaatccttttcaaaatctataatggaatcttagcgatcgaaccactgttaattcatatgatctaaatgaatcgttaatattattggaccggcctcggacttctatattgattcccttgtccttgcccatcccacaccgctttctacgattcgacatggagaaggtccactacacagtgtctgaaagcacggcgtataaacagtgagcttgtattgtggttgttgcttgctgccactctcgcgtcgtccttgtttgtactatacagctgctctcaacctttcgttccgtggcccctctcgtttattcgcccctgccacgaccaggaccgcgtcgcgcgctcgcgcccttcacgccctgcgctgtgcttgcctcgtcgcggccacgtccacctacctatacctctctgtccgacgacctcatcccctttcccaagatccgagccgcggcgtctccaagtacctcgctcgcaggagcaggttgcaaggagccagccactcctgcgagtttctggcgatggtggccgttgcggcgggaaggcgggccggcggcgttggtggccgccggcgctcgggctgcggcccggggcaggcacagcagaagctactagcgatcgccgtcgccgcgcgcttcgctgaggccgtggcgccgccgtctgcggaggcctcccgtgccggctccggcggctgttgcgtagagctcctcgagtgcctcctcggggctctgagcgtcaacgcggccccgccgcccgcgcagcacaggcgggccgtgcactcgatccgccgccgccgcccccgtggcggggggtccgccgacgaccgccacgccgacgctccctcgggccgcatcgcgggaaacggcgcatccgcatccgcagccgcgtcgctctacaccatgcagggcaggaagggtgtcaatcaggacgccatggtggtctgggagaattttggttcaaaggatgataccattttttgtggagtttttgatggccatggaccaaacggccatttggttgccaagagggtcagagatcttctccctgtaaagttgagtgcaaatttagggaagggtgaattcaaagagatttctactagcgatgtcaagagtgggactactaaaggagttgcaaccgaacacagggttgaagatactgatgcttcccctggaaatgaagagaatggcgagtacccagaatttttcacagcactgagggcttcattcttgcaggcgttttatgtgatggacagggatctgaaggcacatagaaatattgattgtgaattcagtggtacaacagcagtcacagtaatcaagcagggacaaaatcttataattggcaacttgggagattctagagctgtcttgggcacaagaggtgaacataatcagctagttgctcttcagctgacagtggacctcaaacctagtatcccgaatactaccgaaaataaagaaaaatgaatcatttacaggtgaagcagaacgaattaggcaacaaagtggcagagtattttctcttccagatgaaccagacgttgttcgtgtgtggcttccaactttcaacttgccagggttggccatggcaagatcatttggagacttctgtctgaagaaatatggaataatttctatgcctgatgttttctaccatcgcatcacggataaggatgaatttgttgtgctggcgactgacggggtgtgggatgtgctttccaatgctgaagctgttagcatcatcagcaatgctccttcacaggcctcagcagctcgatttctggttgaatcggctcacagggcatggaggacacggtaccccacatcaaaaactgatgattgtgctgttgtttgcctctttctgaaaacagaagcagcaagtacatcctccagtgctgtaaccaaagatttggtgaagaacagagaaatgagcagcggtaagcattcattggctgttaaaacaagcacccaaggttcctgaaaatcttgttactgcaaaagatgagtggtcttttgttgatggttcctctgggtgtgtcgcgctgccaactttaccagagcccacttcagttgtgaaggatagctcaaaagattgagcttgcctgccaattgagatggcataatttttgctggaaatttgttcgccttcgtttgcaagcttgtgtgcatcagatttgttgtgacgtgaagaccagtgccagtttcattggcgagttgaggaagttattgcatagtggaatggataagtgtgcagattttgttctttttgtacagtattcaatcagtttagtgggatcagttggtagtaatgataactataataatactgtgcctattattgatggatgggggtgatcagatccatgcataggatgaagtttctcccttcttttgtaatataaataattgtgtcggttccagcagctctaataaattttcttttaggtgttgctttgttttatgtcataggttttctagttttgctttgtccaattaagtttagtattatatttccattgatgctatgacaaaccattccagttagatattggatgactaagtaagttttcctctgtatgttctgtattatgatggttt

SEQ ID NO: 210578 - DNA, 810 bp, Zea Mays
gctgcatgtcattatatattataacttacaagaaggcaagagaaaacagaacagctgggagaaatctggcaaagcataaacacacaccttgagaagttcctctttctggagcatgttagatgggcagctccccattgattttgagttcttgtactggataaatatgtggaaattttgctccagttaagaaagtggcatgtaattttacaggtacgcctggaaaccctagccttgacaccttgatgagcatgctcagtgggcttggttcgggaggtggcataggtgttccaaatacttccaatgtgccaccggaggagctctatgccacacagcttactcagctccaagaaatgggtttcattgacactgcggagaacattcaagcactgctcgctaccgctgggaatgtacatgctgcggtggagcgtcttctcgggaaccttgggcagtagctaaaacgagcgagccacacaccgccagtaaatcttaaaatgtcgcgcatctgcaggagtgttcggcttaacgttcttcaagcccttgaatttgaagggggtggcgtccataatcccgaaaacaaaataatcaaaaagtcaggcagccattaacttttctcatacatggtggtcatgtctttgttttacagtgttgtatttgcaatttggattggtgtacatacatatcggtcggatattacctcatagaatgtatgtagttttgtgttttgaactgttgattcttgattcccaatcaatcaaatcaaactatctaatccaactgttggctttctcattcctttggatacatgtgtcg

SEQ ID NO: 210579 - DNA, 2173 bp, Zea Mays
gttcttcttccctcaatccattgcaagcaacaggaggagaaaaaacaaggagcgagacctcgcagctgacgcgcacaaggcaaaacccaatcggagccgtggaccgggccggagatagggctcgaggccatggcaagcggaggcgagggcgcagggagcggcgagtcccctcccgctgcctcagtggaggcggcagcgggggaggcgacgctgcacatccggtgcgcgaacggctctaagttcacggtgcagacggacctgggcgccacggtgggcgggttcaaggaggtcgtagccgggagctgcgacgtgccggcgccgcagcagcgtctgatctacaagggccgcatcctcaaggacgagcaaaccctagaaagctacgctgcatccagtgcacctgctgctgccagctcccttgcttcatctactcttagtagcgtcccggcaggtggcctgggagatctatttccaggtgttggtgctccaggaagtggcaggtcatcaggtatatttgggccaggatttccagagttagagcaagttgagcagcatttaagccagaatcccaacttgatgagggagataatgaatatgccagcgatgcaaaatctcatgaataaccctgatttaatacgcaatatgattatgagcaacccacaaatgcgcgagatcatggatcggaatcctgatcttgcccatgtgctcaatgacccaagtgtcctccgccaaaccctcgaagctgctaggaaccctgaaatcatgagagagatgatgcggaacacagacagagctatgagcaacattgagtcctctcctgaaggttttaatatgctccgtcgcatgtatgaaactgtccaggagccatttctaaatgcaacaacaatgagcggggaagggaacacagcctcaaacccatttgcagctcttctcggcaaccaggggtctaaccaacctggtcaaggtcaacctgcaacatatactccaactataggttcggagtcgacaactggaaccccagctccaaatactaatccacttccaaatccctggagcaccaatgctgggagtgcacaaggagcaacacggtccagtggcaacacaagaactggtgcttctggtcatgttggaggtactggtgccactggtggattgggagggcttggttcaccagatttgagtagtttgcttggtggtcttgctggcagtccaagaactggtgcttctggtggtttaggaggtttgggttcaccagatttggggaatatgcttggtggttctcctgatgtttctcttttcagtcagatgttgcaaaaccctgcaatgatgcagatgatgcagagcattatgtctgacccacagaccatgaaccagttgcttagcttcaacccaaatgcacgcaacctgatggaatcaaaccctcagatgagggaaatatttcaaaatccagaatttcttcgccagctgacatcgcctgagactttgcagcaattactcttatttcagcagtctttattaggacagcttggtcaacatcaacctaaccagggtagaaacaattcaggcagtgccacaggtacgcctggaaaccctagccttgacaccttgatgagcatgctcagtgggcttggttcgggaggtggcataggtgttccaaatacttccaatgtgccaccggaggagctctatgccacacagcttactcagctccaagaaatgggtttcattgacactgcggagaacattcaagcactgctcgctaccgctgggaatgtacatgctgcggtggagcgtcttctcgggaaccttgggcagtagctaaaacgagcgagccacacaccgccagtaaatcttaaaatgtcgcgcatctgcaggagtgttcggcttaacgttcttcaagcccttgaatttgaagggggtggcgtccataatcccgaaaacaaaataatcaaaaagtcaggcagccattaacttttctcatacatggtggtcatgtctttgttttacagtgttgtatttgcaatttggattggtgtacatacatatcggtcggatattacctcatagaatgtatgtagttttgtgttttgaactgttgattcttgattcccaatcaatcaaatcaaactatctaatccaactgttggctttctcattcctttggatacatgtgtcg

SEQ ID NO: 210580 - DNA, 2251 bp, Zea Mays
gttcttcttccctcaatccattgcaagcaacaggaggagaaaaaacaaggagcgagacctcgcagctgacgcgcacaaggcaaaacccaatcggagccgtggaccgggccggagatagggctcgaggccatggcaagcggaggcgagggcgcagggagcggcgagtcccctcccgctgcctcagtggaggcggcagcgggggaggcgacgctgcacatccggtgcgcgaacggctctaagttcacggtgcagacggacctgggcgccacggtgggcgggttcaaggaggtcgtagccgggagctgcgacgtgccggcgccgcagcagcgtctgatctacaagggccgcatcctcaaggacgagcaaaccctagaaagctacggcgttgagacagatcacacaattcacttggtgcgtggtgttgccccaccagctgcatccagtgcacctgctgctgccagctcccttgcttcatctactcttagtagcgtcccggcaggtggcctgggagatctatttccaggtgttggtgctccaggaagtggcaggtcatcaggtatatttgggccaggatttccagagttagagcaagttgagcagcatttaagccagaatcccaacttgatgagggagataatgaatatgccagcgatgcaaaatctcatgaataaccctgatttaatacgcaatatgattatgagcaacccacaaatgcgcgagatcatggatcggaatcctgatcttgcccatgtgctcaatgacccaagtgtcctccgccaaaccctcgaagctgctaggaaccctgaaatcatgagagagatgatgcggaacacagacagagctatgagcaacattgagtcctctcctgaaggttttaatatgctccgtcgcatgtatgaaactgtccaggagccatttctaaatgcaacaacaatgagcggggaagggaacacagcctcaaacccatttgcagctcttctcggcaaccaggggtctaaccaacctggtcaaggtcaacctgcaacatatactccaactataggttcggagtcgacaactggaaccccagctccaaatactaatccacttccaaatccctggagcaccaatgctgggagtgcacaaggagcaacacggtccagtggcaacacaagaactggtgcttctggtcatgttggaggtactggtgccactggtggattgggagggcttggttcaccagatttgagtagtttgcttggtggtcttgctggcagtccaagaactggtgcttctggtggtttaggaggtttgggttcaccagatttggggaatatgcttggtggttctcctgatgtttctcttttcagtcagatgttgcaaaaccctgcaatgatgcagatgatgcagagcattatgtctgacccacagaccatgaaccagttgcttagcttcaacccaaatgcacgcaacctgatggaatcaaaccctcagatgagggaaatatttcaaaatccagaatttcttcgccagctgacatcgcctgagactttgcagcaattactcttatttcagcagtctttattaggacagcttggtcaacatcaacctaaccattcctttaattgtttgatttgattcaggggtagaaacaattcaggcagtgccacaggtacgcctggaaaccctagccttgacaccttgatgagcatgctcagtgggcttggttcgggaggtggcataggtgttccaaatacttccaatgtgccaccggaggagctctatgccacacagcttactcagctccaagaaatgggtttcattgacactgcggagaacattcaagcactgctcgctaccgctgggaatgtacatgctgcggtggagcgtcttctcgggaaccttgggcagtagctaaaacgagcgagccacacaccgccagtaaatcttaaaatgtcgcgcatctgcaggagtgttcggcttaacgttcttcaagcccttgaatttgaagggggtggcgtccataatcccgaaaacaaaataatcaaaaagtcaggcagccattaacttttctcatacatggtggtcatgtctttgttttacagtgttgtatttgcaatttggattggtgtacatacatatcggtcggatattacctcatagaatgtatgtagttttgtgttttgaactgttgattcttgattcccaatcaatcaaatcaaactatctaatccaactgttggctttctcattcctttggatacatgtgtcg

SEQ ID NO: 210581 - DNA, 2959 bp, Zea Mays
gtttccttcagttcttcttccctcaatccattgcaagcaacaggaggagaaaaaacaaggagcgagacctcgcagctgacgcgcacaaggcaaaacccaatcggagccgtggaccgggccggagatagggctcgaggccatggcaagcggaggcgagggcgcagggagcggcgagtcccctcccgctgcctcagtggaggcggcagcgggggaggcgacgctgcacatccggtgcgcgaacggctctaagttcacggtgcagacggacctgggcgccacggtgggcgggttcaaggaggtcgtagccgggagctgcgacgtgccggcgccgcagcagcgtctgatctacaagggccgcatcctcaaggacgagcaaaccctagaaagctacggcgttgagacagatcacacaattcacttggtgcgtggtgttgccccaccagctgcatccagtgcacctgctgctgccagctcccttgcttcatctactcttagtagcgtcccggcaggtggcctgggagatctatttccaggtgttggtgctccaggaagtggcaggtcatcaggtatatttgggccaggatttccagagttagagcaagttgagcagcatttaagccagaatcccaacttgatgagggagataatgaatatgccagcgatgcaaaatctcatgaataaccctgatttaatacgcaatatgattatgagcaacccacaaatgcgcgagatcatggatcggaatcctgatcttgcccatgtgctcaatgacccaagtgtcctccgccaaaccctcgaagctgctaggaaccctgaaatcatgagagagatgatgcggaacacagacagagctatgagcaacattgagtcctctcctgaaggttttaatatgctccgtcgcatgtatgaaactgtccaggagccatttctaaatgcaacaacaatgagcggggaagggaacacagcctcaaacccatttgcagctcttctcggcaaccaggggtctaaccaacctggtcaaggtcaacctgcaacatatactccaactataggttcggagtcgacaactggaaccccagctccaaatactaatccacttccaaatccctggagcaccaatgctgggagtgcacaaggagcaacacggtccagtggcaacacaagaactggtgcttctggtcatgttggaggtactggtgccactggtggattgggagggcttggttcaccagatttgagtagtttgcttggtggtcttgctggcagtccaagaactggtgcttctggtggtttaggaggtttgggttcaccagatttggggaatatgcttggtggttctcctgatgtttctcttttcagtcagatgttgcaaaaccctgcaatgatgcagatgatgcagagcattatgtctgacccacagaccatgaaccagttgcttagcttcaacccaaatgcacgcaacctgatggaatcaaaccctcagatgagggaaatatttcaaaatccagaatttcttcgccagctgacatcgcctgagactttgcagcaattactcttatttcagcagtctttattaggacagcttggtcaacatcaacctaaccagggtagaaacaattcaggcagtgccacaggtaaactcctggttaccttttccctatttcttcttcacttggatcagtatattgctatatcaggttgttgagttgctcttttgtgctgctgtgtttttaaagtaactattgctttgctttgcatacagtacttgattgactgtattcctcgaggtttcagttgtgcgatgagtttggcactatgggaaaaacagtcaatgattgccattgtctttttcctatagtgccaaattcccaagagtgcatagcataagaacatttaatttctagaaactaatataccaacagtcagcaattcaaattctgtcaggtaatgcatgtatatttggaagttctttaggccttgctatagttgagaaacactgggaccatttaaaagaatttgtagagtgctactttacaaacaaagtagcagcaaagagaatgttctagctggctgcggacagccacagcagctgcttttaacacagtaatgtgagagcggctgcatctgtgagagcagctgcagccgccgcacaaaattttgttctcaaatcggtgggagagctgcatgtcattatatattataacttacaagaaggcaagagaaaacagaacagctgggagaaatctggcaaagcataaacacacaccttgagaagttcctctttctggagcatgttagatgggcagctccccattgattttgagttcttgtactggataaatatgtggaaattttgctccagttaagaaagtggcatgtaattttacaggtacgcctggaaaccctagccttgacaccttgatgagcatgctcagtgggcttggttcgggagtgccaccggaggagctctatgccacacagcttactcagctccaagaaatgggtttcattgacactgcggagaacattcaagcactgctcgctaccgctgggaatgtacatgctgcggtggagcgtcttctcgggaaccttgggcagtagctaaaacgagcgagccacacaccgccagtaaatcttaaaatgtcgcgcatctgcaggagtgttcggcttaacgttcttcaagcccttgaatttgaagggggtggcgtccataatcccgaaaacaaaataatcaaaaagtcaggcagccattaacttttctcatacatggtggtcatgtctttgttttacagtgttgtatttgcaatttggattggtgtacatacatatcggtcggatattacctcatagaatgtatgtagttttgtgttttgaactgttgattcttgattcccaatcaatcaaatcaaactatctaatccaactgttggctttctcattcctttggatacatgtgtcg

SEQ ID NO: 210582 - DNA, 2232 bp, Zea Mays
cttcgggcctgtttccttcagttcttcttccctcaatccattgcaagcaacaggaggagaaaaaacaaggagcgagacctcgcagctgacgcgcacaaggcaaaacccaatcggagccgtggaccgggccggagatagggctcgaggccatggcaagcggaggcgagggcgcagggagcggcgagtcccctcccgctgcctcagtggaggcggcagcgggggaggcgacgctgcacatccggtgcgcgaacggctctaagttcacggtgcagacggacctgggcgccacggtgggcgggttcaaggaggtcgtagccgggagctgcgacgtgccggcgccgcagcagcgtctgatctacaagggccgcatcctcaaggacgagcaaaccctagaaagctacgatcacacaattcacttggtgcgtggtgttgccccaccagctgcatccagtgcacctgctgctgccagctcccttgcttcatctactcttagtagcgtcccggcaggtggcctgggagatctatttccaggtgttggtgctccaggaagtggcaggtcatcaggtatatttgggccaggatttccagagttagagcaagttgagcagcatttaagccagaatcccaacttgatgagggagataatgaatatgccagcgatgcaaaatctcatgaataaccctgatttaatacgcaatatgattatgagcaacccacaaatgcgcgagatcatggatcggaatcctgatcttgcccatgtgctcaatgacccaagtgtcctccgccaaaccctcgaagctgctaggaaccctgaaatcatgagagagatgatgcggaacacagacagagctatgagcaacattgagtcctctcctgaaggttttaatatgctccgtcgcatgtatgaaactgtccaggagccatttctaaatgcaacaacaatgagcggggaagggaacacagcctcaaacccatttgcagctcttctcggcaaccaggggtctaaccaacctggtcaaggtcaacctgcaacatatactccaactataggttcggagtcgacaactggaaccccagctccaaatactaatccacttccaaatccctggagcaccaatgctgggagtgcacaaggagcaacacggtccagtggcaacacaagaactggtgcttctggtcatgttggaggtactggtgccactggtggattgggagggcttggttcaccagatttgagtagtttgcttggtggtcttgctggcagtccaagaactggtgcttctggtggtttaggaggtttgggttcaccagatttggggaatatgcttggtggttctcctgatgtttctcttttcagtcagatgttgcaaaaccctgcaatgatgcagatgatgcagagcattatgtctgacccacagaccatgaaccagttgcttagcttcaacccaaatgcacgcaacctgatggaatcaaaccctcagatgagggaaatatttcaaaatccagaatttcttcgccagctgacatcgcctgagactttgcagcaattactcttatttcagcagtctttattaggacagcttggtcaacatcaacctaaccagggtagaaacaattcaggcagtgccacaggtacgcctggaaaccctagccttgacaccttgatgagcatgctcagtgggcttggttcgggaggtggcataggtgttccaaatacttccaatgtgccaccggaggagctctatgccacacagcttactcagctccaagaaatgggtttcattgacactgcggagaacattcaagcactgctcgctaccgctgggaatgtacatgctgcggtggagcgtcttctcgggaaccttgggcagtagctaaaacgagcgagccacacaccgccagtaaatcttaaaatgtcgcgcatctgcaggagtgttcggcttaacgttcttcaagcccttgaatttgaagggggtggcgtccataatcccgaaaacaaaataatcaaaaagtcaggcagccattaacttttctcatacatggtggtcatgtctttgttttacagtgttgtatttgcaatttggattggtgtacatacatatcggtcggatattacctcatagaatgtatgtagttttgtgttttgaactgttgattcttgattcccaatcaatcaaatcaaactatctaatccaactgttggctttctcattcctttggatacatgtgtcg

SEQ ID NO: 210583 - DNA, 2257 bp, Zea Mays
ttcctcttcagagttcagacttcgggcctgtttccttcagttcttcttccctcaatccattgcaagcaacaggaggagaaaaaacaaggagcgagacctcgcagctgacgcgcacaaggcaaaacccaatcggagccgtggaccgggccggagatagggctcgaggccatggcaagcggaggcgagggcgcagggagcggcgagtcccctcccgctgcctcagtggaggcggcagcgggggaggcgacgctgcacatccggtgcgcgaacggctctaagttcacggtgcagacggacctgggcgccacggtgggcgggttcaaggaggtcgtagccgggagctgcgacgtgccggcgccgcagcagcgtctgatctacaagggccgcatcctcaaggacgagcaaaccctagaaagctacggcgttgagacagatcacacaattcacttggtgcgtggtgttgccccaccagctgcatccagtgcacctgctgctgccagctcccttgcttcatctactcttagtagcgtcccggcaggtggcctgggagatctatttccaggtgttggtgctccaggaagtggcaggtcatcaggtatatttgggccaggatttccagagttagagcaagttgagcagcatttaagccagaatcccaacttgatgagggagataatgaatatgccagcgatgcaaaatctcatgaataaccctgatttaatacgcaatatgattatgagcaacccacaaatgcgcgagatcatggatcggaatcctgatcttgcccatgtgctcaatgacccaagtgtcctccgccaaaccctcgaagctgctaggaaccctgaaatcatgagagagatgatgcggaacacagacagagctatgagcaacattgagtcctctcctgaaggttttaatatgctccgtcgcatgtatgaaactgtccaggagccatttctaaatgcaacaacaatgagcggggaagggaacacagcctcaaacccatttgcagctcttctcggcaaccaggggtctaaccaacctggtcaaggtcaacctgcaacatatactccaactataggttcggagtcgacaactggaaccccagctccaaatactaatccacttccaaatccctggagcaccaatgctgggagtgcacaaggagcaacacggtccagtggcaacacaagaactggtgcttctggtcatgttggaggtactggtgccactggtggattgggagggcttggttcaccagatttgagtagtttgcttggtggtcttgctggcagtccaagaactggtgcttctggtggtttaggaggtttgggttcaccagatttggggaatatgcttggtggttctcctgatgtttctcttttcagtcagatgttgcaaaaccctgcaatgatgcagatgatgcagagcattatgtctgacccacagaccatgaaccagttgcttagcttcaacccaaatgcacgcaacctgatggaatcaaaccctcagatgagggaaatatttcaaaatccagaatttcttcgccagctgacatcgcctgagactttgcagcaattactcttatttcagcagtctttattaggacagcttggtcaacatcaacctaaccaaaacaattcaggcagtgccacaggtacgcctggaaaccctagccttgacaccttgatgagcatgctcagtgggcttggttcgggaggtggcataggtgttccaaatacttccaatgtgccaccggaggagctctatgccacacagcttactcagctccaagaaatgggtttcattgacactgcggagaacattcaagcactgctcgctaccgctgggaatgtacatgctgcggtggagcgtcttctcgggaaccttgggcagtagctaaaacgagcgagccacacaccgccagtaaatcttaaaatgtcgcgcatctgcaggagtgttcggcttaacgttcttcaagcccttgaatttgaagggggtggcgtccataatcccgaaaacaaaataatcaaaaagtcaggcagccattaacttttctcatacatggtggtcatgtctttgttttacagtgttgtatttgcaatttggattggtgtacatacatatcggtcggatattacctcatagaatgtatgtagttttgtgttttgaactgttgattcttgattcccaatcaatcaaatcaaactatctaatccaactgttggctttctcattcctttggatacatgtgtcg

SEQ ID NO: 210584 - DNA, 1716 bp, Zea Mays
tttgtctattcctcttcagagttcagacttcgggcctgtttccttcagttcttcttccctcaatccattgcaagcaacaggaggagaaaaaacaaggagcgagacctcgcagctgacgcgcacaaggcaaaacccaatcggagccgtggaccgggccggagatagggctcgaggccatggcaagcggaggcgagggcgcagggagcggcgagtcccctcccgctgcctcagtggaggcggcagcgggggaggcgacgctgcacatccggtgcgcgaacggctctaagttcacggtgcagacggacctgggcgccacggtgggcgggttcaaggaggtcgtagccgggagctgcgacgtgccggcgccgcagcagcgtctgatctacaagggccgcatcctcaaggacgagcaaaccctagaaagctacggcgttgagacagatcacacaattcacttggtgcgtggtgttgccccaccagctgcatccagtgcacctgctgctgccagctcccttgcttcatctactcttagtagcgtcccggcaggtggcctgggagatctatttccaggtgttggtgctccaggaagtggcaggtcatcagctgggagtgcacaaggagcaacacggtccagtggcaacacaagaactggtgcttctggtcatgttggaggtactggtgccactggtggattgggagggcttggttcaccagatttgagtagtttgcttggtggtcttgctggcagtccaagaactggtgcttctggtggtttaggaggtttgggttcaccagatttggggaatatgcttggtggttctcctgatgtttctcttttcagtcagatgttgcaaaaccctgcaatgatgcagatgatgcagagcattatgtctgacccacagaccatgaaccagttgcttagcttcaacccaaatgcacgcaacctgatggaatcaaaccctcagatgagggaaatatttcaaaatccagaatttcttcgccagctgacatcgcctgagactttgcagcaattactcttatttcagcagtctttattaggacagcttggtcaacatcaacctaaccagggtagaaacaattcaggcagtgccacaggtacgcctggaaaccctagccttgacaccttgatgagcatgctcagtgggcttggttcgggaggtggcataggtgttccaaatacttccaatgtgccaccggaggagctctatgccacacagcttactcagctccaagaaatgggtttcattgacactgcggagaacattcaagcactgctcgctaccgctgggaatgtacatgctgcggtggagcgtcttctcgggaaccttgggcagtagctaaaacgagcgagccacacaccgccagtaaatcttaaaatgtcgcgcatctgcaggagtgttcggcttaacgttcttcaagcccttgaatttgaagggggtggcgtccataatcccgaaaacaaaataatcaaaaagtcaggcagccattaacttttctcatacatggtggtcatgtctttgttttacagtgttgtatttgcaatttggattggtgtacatacatatcggtcggatattacctcatagaatgtatgtagttttgtgttttgaactgttgattcttgattcccaatcaatcaaatcaaactatctaatccaactgttggctttctcattcctttggatacatgtgtcg

SEQ ID NO: 210585 - DNA, 1063 bp, Zea Mays
cgtaaatcaagtatacacaggtagtggcaagtggaaacctacagtggagttctcttcttgaagcgaattttgctgctgctccacaaagtataccaataattgctctttcatttgtataccagaatgtggttcctgttctctgtacaaatttggagggagacctgtcaaaagtacgaacagctattgtggcgggtactgccatacccctggctctgttcctagtatgggatggagtaatcttggggacacttccagaccttgcagggagcagcactgtttctgaccccttggaactacttagatcgagtaatgggatagtggggcctattgttgaggcgttctcatttctcgctatagccacatcatacattggatttgttctaggaatctcggacttccttgcagacttgcttaaactaccaagtggccagaacaaaccgctgccatacgtattgactctgtttcctccacttgttctgtcactgcttgacccggagatatttttcaaggcattggactttgcaggaacttatggagttctagtgctgtttggagtttttcctgccgctatgtcttggtcagagagatattcggatgagttggaagctccagtaccccctatagtccccggagggaaatttactctctcggctgtcatgggaggtgcattgcttgtgattgttccagagttaatcaaggatgtaatgcaactacaaggactacactgacaatcggtgcaagtgaaaggacatataacagttacagtaaaacggtccttgagatttttgttgcagtaacaagtacatgtagcaaaagcaaaggcaaaactcgaaagcaatcaagtgcagagattgcagtttcatcgagcatcgacgttggagttgaattgttttttatgagattagcacggggttcagaacttcggttaaatttctgcaaccgaaagaaaaatctaaaattccgtattacactaatatatgtgctttgttgtgaatatataactttgtaattatattttctattgtttatgtcacataaaattcttcttttcattagatgtttg

SEQ ID NO: 210586 - DNA, 1315 bp, Zea Mays
ctcctgtctcgatggctatgcgcactcttgggacatttggagtgagaacatcttgcttatcctatttatttatacattatgcacttcttgtcgcatacgtggcacgctcttcaaatatcataacaaactcattgggcattccaatatgggagagtgctaccctgttttctctagctttcggaggggtatgttactttggaagccagcgattgattggtgcagtaaatggagttctggtagtcggcatcctagcatccttcacttctcttgttgtagtggcaagtggaaacctacagtggagttctcttcttgaagcgaattttgctgctgctccacaaagtataccaataattgctctttcatttgtataccagaatgtggttcctgttctctgtacaaatttggagggagacctgtcaaaagtacgaacagctattgtggcgggtactgccatacccctggctctgttcctagtatgggatggagtaatcttggggacacttccagaccttgcagggagcagcactgtttctgaccccttggaactacttagatcgagtaatgggatagtggggcctattgttgaggcgttctcatttctcgctatagccacatcatacattggatttgttctaggaatctcggacttccttgcagacttgcttaaactaccaagtggccagaacaaaccgctgccatacgtattgactctgtttcctccacttgttctgtcactgcttgacccggagatatttttcaaggcattggactttgcaggaacttatggagttctagtgctgtttggagtttttcctgccgctatgtcttggtcagagagatattcggatgagttggaagctccagtaccccctatagtccccggagggaaatttactctctcggctgtcatgggaggtgcattgcttgtgattgttccagagttaatcaaggatgtaatgcaactacaaggactacactgacaatcggtgcaagtgaaaggacatataacagttacagtaaaacggtccttgagatttttgttgcagtaacaagtacatgtagcaaaagcaaaggcaaaactcgaaagcaatcaagtgcagagattgcagtttcatcgagcatcgacgttggagttgaattgttttttatgagattagcacggggttcagaacttcggttaaatttctgcaaccgaaagaaaaatctaaaattccgtattacactaatatatgtgctttgttgtgaatatataactttgtaattatattttctattgtttatgtcacataaaattcttcttttcattagatgtttg

SEQ ID NO: 210587 - DNA, 1756 bp, Zea Mays
gccagccagcttctgctggaacaagaacagtacaggtacagcctcctccctccacagcagcgacaccaatggcatcgtggtcgtggacctctgttcactgcagcagctaccccctaccggggccgtcggcacgcttcacgccttctctggtctccgcaacaacaccggcgctcaggcggacgagggcgagggggcagctgcagcgatgcctctgttcccagtacgccggcgaacgccagccgccgccgccgccaccgccacagccggagccggactcgccgcagcagctggagcgcctcttctccaacctcaaccagaccaccatgaagcacgagccagggagcgtcaccagcgccgtcttccttgtggctggcacaacggttggagcaggcatccttgcaatccctgcagtcacacaagaagctgggttcttggcctcggcagtcatatgcatcctctgctggtcatacatggtcgtcacggggctgttggttgctgaagtaaacgtcaataccatgtgtgagctaggatctggtggcgtctcactggtctcgatggctatgcgcactcttgggacatttggagtgagaacatcttgcttatcctatttatttatacattatgcacttcttgtcgcatacgtggcacgctcttcaaatatcataacaaactcattgggcattccaatatgggagagtgctaccctgttttctctagctttcggaggggtatgttactttggaagccagcgattgattggtgcagtaaatggagttctggtagtcggcatcctagcatccttcacttctcttgttaatgtggttcctgttctctgtacaaatttggagggagacctgtcaaaagtacgaacagctattgtggcgggtactgccatacccctggctctgttcctagtatgggatggagtaatcttggggacacttccagaccttgcagggagcagcactgtttctgaccccttggaactacttagatcgagtaatgggatagtggggcctattgttgaggcgttctcatttctcgctatagccacatcatacattggatttgttctaggaatctcggacttccttgcagacttgcttaaactaccaagtggccagaacaaaccgctgccatacgtattgactctgtttcctccacttgttctgtcactgcttgacccggagatatttttcaaggcattggactttgcaggaacttatggagttctagtgctgtttggagtttttcctgccgctatgtcttggtcagagagatattcggatgagttggaagctccagtaccccctatagtccccggagggaaatttactctctcggctgtcatgggaggtgcattgcttgtgattgttccagagttaatcaaggatgtaatgcaactacaaggactacactgacaatcggtgcaagtgaaaggacatataacagttacagtaaaacggtccttgagatttttgttgcagtaacaagtacatgtagcaaaagcaaaggcaaaactcgaaagcaatcaagtgcagagattgcagtttcatcgagcatcgacgttggagttgaattgttttttatgagattagcacggggttcagaacttcggttaaatttctgcaaccgaaagaaaaatctaaaattccgtattacactaatatatgtgctttgttgtgaatatataactttgtaattatattttctattgtttatgtcacataaaattcttcttttcattagatgtttg

SEQ ID NO: 210588 - DNA, 2025 bp, Zea Mays
agataacaacacacacggcactacggcagccagccagccagccagcttctgctggaacaagaacagtacaggtacagcctcctccctccacagcagcgacaccaatggcatcgtggtcgtggacctctgttcactgcagcagctaccccctaccggggccgtcggcacgcttcacgccttctctggtctccgcaacaacaccggcgctcaggcggacgagggcgagggggcagctgcagcgatgcctctgttcccagtacgccggcgaacgccagccgccgccgccgccaccgccacagccggagccggactcgccgcagcagctggagcgcctcttctccaacctcaaccagaccaccatgaagcacgagccagggagcgtcaccagcgccgtcttccttgtggctggcacaacggttggagcaggcatccttgcaatccctgcagtcacacaagaagctgggttcttggcctcggcagtcatatgcatcctctgctggtcatacatggtaatagaatgtcactgactgggtaaattatcaaacccggcgtgttaaaaggacggtttgatgattgacccaagtgcctgtttcgttgagtcgtttacagtgagacagcttatgattgttggcgtcgcatttccaggtcgtcacggggctgttggttgctgaagtaaacgtcaataccatgtgtgagctaggatctggtggcgtctcactggtctcgatggctatgcgcactcttgggacatttggagtgagaacatcttgcttatcctatttatttatacattatgcacttcttgtcgcatacgtggcacgctcttcaaatatcataacaaactcattgggcattccaatatgggagagtgctaccctgttttctctagctttcggaggggtatgttactttggaagccagcgattgattggtgcagtaaatggagttctggtagtcggcatcctagcatccttcacttctcttgttgtagtggcaagtggaaacctacagtggagttctcttcttgaagcgaattttgctgctgctccacaaagtataccaataattgctctttcatttgtataccagaatgtggttcctgttctctgtacaaatttggagggagacctgtcaaaagtacgctattgtggcgggtactgccatacccctggctctgttcctagtatgggatggagtaatcttggggacacttccagaccttgcagggagcagcactgtttctgaccccttggaactacttagatcgagtaatgggatagtggggcctattgttgaggcgttctcatttctcgctatagccacatcatacattggatttgttctaggaatctcggacttccttgcagacttgcttaaactaccaagtggccagaacaaaccgctgccatacgtattgactctgtttcctccacttgttctgtcactgcttgacccggagatatttttcaaggcattggactttgcaggaacttatggagttctagtgctgtttggagtttttcctgccgctatgtcttggtcagagagatattcggatgagttggaagctccagtaccccctatagtccccggagggaaatttactctctcggctgtcatgggaggtgcattgcttgtgattgttccagagttaatcaaggatgtaatgcaactacaaggactacactgacaatcggtgcaagtgaaaggacatataacagttacagtaaaacggtccttgagatttttgttgcagtaacaagtacatgtagcaaaagcaaaggcaaaactcgaaagcaatcaagtgcagagattgcagtttcatcgagcatcgacgttggagttgaattgttttttatgagattagcacggggttcagaacttcggttaaatttctgcaaccgaaagaaaaatctaaaattccgtattacactaatatatgtgctttgttgtgaatatataactttgtaattatattttctattgtttatgtcacataaaattcttcttttcattagatgtttg

SEQ ID NO: 210589 - DNA, 4244 bp, Zea Mays
cctacagtcagcttttcagaaaagctattcagaaaaaaaccgaaccaaacaggccatagtcgttggaacagctgcgcaatcgaacaagcttgtcaccggatgattaaaaaaaagatgaggggcaaagctcgacaggcttcagcagcgctaattaaactacctaatccttcttcagcacggcctgctcggatctctcatcttcttgccgtttatggcaaaaaaagaaaaaactatgcactgatctgatctgcaaatctccaccctgctgcaaatccggacaagggtcctgctctgctcgcactttaatttaatgtactcctacgctagcagtgcaggtgcagcacgagctagtgagtagtgacggatccagatttgttactttctcggatcttgcttccgcgtgccatccattctcgtttctttttctgaaacaaccgagcttctcaacgcgaccaaactcacccgatggagagagagatattcaggagagggggagaggaaaaaaaaatctttcctttcatggcgagatctgcaagttgcagcagcagagagagcgctcgcgccgcatctaatctagactagtactgtagacgtcacgtgaggcggcagcatggcgcggtagagttcgggagaggctgacggaccgggcagtggaaccgacggccgacgcgcgcgtcgtcctcacctcacgtgtgtcaccgccaccgccgctcacagccacacacaaccggacgacgacccgagcggattgctttgctattcttcgccgtctcaaaattaggagccggatccacgaagggaggagaaaagggctccttttttatgctgtcactgcggtcgcgggtgacgctttcccaggctctcccaccgtcgtagacgtcgccttcgccctccacacgcacacccatccgctcccctcgcgtcgccttctatcttcgagggagagccggagagccttcgccgctctctcactcgctctgttttgtacctcgctctgatctctccccccgcccgtcgctgattccctgcccgtttgtcgccattgccgccggtcgtgccgtgtcaaggacatggcgacctcgggaaagaaacacctgaattcagtgaccttgctgttcaaactaccgtattacacgcaatggggccagagcttgctgattgccgggtcggaaccagcactcgggtcgtggaatgtcaagcaaggagtatctctcagtccagtccatcaggacagtgagctaatctggtgtgggagcgtgtctgttgttgccggctttacctctgagtacaagtactatgtggtggatgacaagaagaatgtgttgagatgggaggctggggagaaaaggaaactagtcctgccggagggcgtgaaggaaggagacgtaattgaaatccgtgactggtggcaggatgcttctgaagctctattcttcagaagtgcattcaagaatgtcattttcaatgctactgaaggtgttaaaaaggaatcacagtcagtgtccctcaacaaaagtttggatcctgaagatatcgttgtccagttcgtgattagctgtcctcggctcgtatctggatctactgtcatcgtcactggaagtaaccctcaattaggaagatggcaaactcaagatggtctcaagctgagctatgttggagattccttgtggaaagcaagctgtgctttacggaagtctgagttccctataaaatacaaatattgtcaaatcagtcaagcaggaaactctacattggagcttggcccaaacagggaggttaatgttgatttatcatcacccaagcaatccagatatattgtgttatctgatggtgctcttagggatgcaccatggaggggtgcaggtgttgctgtacccatgttttcaatcagatcagatgaggaccttggcgttggagaatttctagatcttaaacttcttgttgactgggcagtcaattcgggcttccatcttgttcagctccttccaatcaacgatacttcagttcatgggatgtggtgggattcttatccgtacagctccctgtctgtgtttgctttgcatcccttgtacctgagggtacaagcactttcagatgcaattcctgtggatgttaaggaagaaattcagcaggcgaagaagcaattggataaaaaggatgtcgactacgaggcagcattgtccacaaaattgtcgattgctagaaaaatattcaatttagaaaaggaaaaagtgctaaactccagttctttcaagcagttcttatctgaaaacgaggaatggttgaaaccatatgcggcattttgctttttgcgggactttttcgagacatctgatcacagtcaatggggtcgtttttctcagttttccaaggataagcttgacaaacttatttgtgaaggtactttacaccatgacattatacgttttcattactatgttcagtaccatctatatatacaattatctgaggcagcaacatatgcaagaaagaaaaatgttatcctgaaaggtgatttacctattggtgttgataggaatagtgtcgatacatgggtatacccaaccttgtttcgcatgaataccgctactggagcgcctcctgattattttgacaagaatggacaaaattggggttttcctacatataactgggaggagatgtcaaaggataattatgggtggtggcgagctcgtctgacacagatggcaaagtacttcacagcatacaggatagaccacatcttgggtttctttaggatatgggagcttccagatcatgctgcaacaggtttagttgggaaatttagaccttccatccctcttagtcaggaggagcttctaagtgaaggtctatgggattttaatcggatgagccaaccatacattcgtcaggaaatactggaggagaagtttggatccttttggacagtcattgcagccaattttctaaatgagtaccagaagcagtgttatgagtttaaagaagattgcaacacagagaaaaagattattgtaaagattaaaacaagtgctgaaaagtcactgtgggtagagaaagaggacaatatccgccgtggccttttcgatttactacagaatattgtccttatcagagatccagaggactccacaaaattctatccccgttcaacctggaagacacatcaagttttagggaccttgatgaacacagcaaaaatatcctcagaagattgtattataactattattttgttcgccaagaaaatctctggcgccaaaatgccctgaagactttgcctgtcctgctgaactcgtcagatatgttagcatgtggagaggaccttggccttatccctgcttgtgttcaccctgttatgcaagaactggggttgattggattgcgtatccaaagaatgcctagtgaaccaaacttggaatttggtattccttctcagtatagctatatgacggtttgtgctccctcatgtcatgactgctctacattacgtgcttggtgggaagaagatgaaggaagaagaagtcgtttctacaagactgtagttggcagtgatgaggagcccccatctcgttgcaccccggaagtagtgcacttcattgttcagcagcattttgacgctccatcaatgtgggcaatctttccacttcaggacctccttgcactgaaagacaagtacaccacaagaccagcgccagaggaaacaatcaatgaccccactaacccaaagcactattggagattccgtgtccacgtgacattggagtccctgctgaacgacaaggacatccaggcaaccatcaaggacctggtcacaagcagtgggaggtccttccccggaaagaagctgtccaaggtgcagctgaatggtaaagcttaggaaaggattgcgagagctgctggaagtgaccacggttacaagtaaataaatagaataaggcgacagattgcatcaccgtgttgatccaggtgatgctgtttctggtaggaaattcttacccatgtgatgttctttcaactctggaaataagaagcaccctctaccaagtcagaaagtgaaataatccatccagtgtcggttttcattaatagaattttcgttgaccgcccagttatttcttgagagtaattttgcgtgagcctgattcaagccattgaaataggcctccttctgttgtttgtgatgtcctaaactcataagcaaccgaaatccgtgaaaaaatgctgctagtagtggggagggg

SEQ ID NO: 210590 - DNA, 4177 bp, Zea Mays
cctacagtcagcttttcagaaaagctattcagaaaaaaaccgaaccaaacaggccatagtcgttggaacagctgcgcaatcgaacaagcttgtcaccggatgattaaaaaaaagatgaggggcaaagctcgacaggcttcagcagcgctaattaaactacctaatccttcttcagcacggcctgctcggatctctcatcttcttgccgtttatggcaaaaaaagaaaaaactatgcactgatctgatctgcaaatctccaccctgctgcaaatccggacaagggtcctgctctgctcgcactttaatttaatgtactcctacgctagcagtgcaggtgcagcacgagctagtgagtagtgacggatccagatttgttactttctcggatcttgcttccgcgtgccatccattctcgtttctttttctgaaacaaccgagcttctcaacgcgaccaaactcacccgatggagagagagatattcaggagagggggagaggaaaaaaaaatctttcctttcatggcgagatctgcaagttgcagcagcagagagagcgctcgcgccgcatctaatctagactagtactgtagacgtcacgtgaggcggcagcatggcgcggtagagttcgggagaggctgacggaccgggcagtggaaccgacggccgacgcgcgcgtcgtcctcacctcacgtgtgtcaccgccaccgccgctcacagccacacacaaccggacgacgacccgagcggattgctttgctattcttcgccgtctcaaaattaggagccggatccacgaagggaggagaaaagggctccttttttatgctgtcactgcggtcgcgggtgacgctttcccaggctctcccaccgtcgtagacgtcgccttcgccctccacacgcacacccatccgctcccctcgcgtcgccttctatcttcgagggagagccggagagccttcgccgctctctcactcgctctgttttgtacctcgctctgatctctccccccgcccgtcgctgattccctgcccgtttgtcgccattgccgccggtcgtgccgtgtcaaggacatggcgacctcgggaaagaaacacctgaattcagtgaccttgctgttcaaactaccgtattacacgcaatggggccagagcttgctgattgccgggtcggaaccagcactcgggtcgtggaatgtcaagcaaggagtatctctcagtccagtccatcaggacagtgagctaatctggtgtgggagcgtgtctgttgttgccggctttacctctgagtacaagtactatgtggtggatgacaagaagaatgtgttgagatgggaggctggggagaaaaggaaactagtcctgccggagggcgtgaaggaaggagacgtaattgaaatccgtgactggtggcaggatgcttctgaagctctattcttcagaagtgcattcaagaatgtcattttcaatgctactgaaggtgttaaaaaggaatcacagtcagtgtccctcaacaaaagtttggatcctgaagatatcgttgtccagttcgtgattagctgtcctcggctcgtatctggatctactgtcatcgtcactggaagtaaccctcaattaggaagatggcaaactcaagatggtctcaagctgagctatgttggagattccttgtggaaagcaagctgtgctttacggaagtctgagttccctataaaatacaaatattgtcaaatcagtcaagcaggaaactctacattggagcttggcccaaacagggaggttaatgttgatttatcatcacccaagcaatccagatatattgtgttatctgatggtgctcttagggatgcaccatggaggggtgcaggtgttgctgtacccatgttttcaatcagatcagatgaggaccttggcgttggagaatttctagatcttaaacttcttgttgactgggcagtcaattcgggcttccatcttgttcagctccttccaatcaacgatacttcagttcatgggatgtggtgggattcttatccgtacagtgcccctcatgtgtgaattacagctccctgtctgtgtttgctttgcatcccttgtacctgagggtacaagcactttcagatgcaattcctgtggatgttaaggaagaaattcagcaggcgaagaagcaattggataaaaaggaatggttgaaaccatatgcggcattttgctttttgcgggactttttcgagacatctgatcacagtcaatggggtcgtttttctcagttttccaaggataagcttgacaaacttatttgtgaaggtactttacaccatgacattatacgttttcattactatgttcagtaccatctatatatacaattatctgaggcagcaacatatgcaagaaagaaaaatgttatcctgaaaggtgatttacctattggtgttgataggaatagtgtcgatacatgggtatacccaaccttgtttcgcatgaataccgctactggagcgcctcctgattattttgacaagaatggacaaaattggggttttcctacatataactgggaggagatgtcaaaggataattatgggtggtggcgagctcgtctgacacagatggcaaagtacttcacagcatacaggatagaccacatcttgggtttctttaggatatgggagcttccagatcatgctgcaacaggtttagttgggaaatttagaccttccatccctcttagtcaggaggagcttctaagtgaaggtctatgggattttaatcggatgagccaaccatacattcgtcaggaaatactggaggagaagtttggatccttttggacagtcattgcagccaattttctaaatgagtaccagaagcagtgttatgagtttaaagaagattgcaacacagagaaaaagattattgtaaagattaaaacaagtgctgaaaagtcactgtgggtagagaaagaggacaatatccgccgtggccttttcgatttactacagaatattgtccttatcagagatccagaggactccacaaaattctatccccgttcaacctggaagacacatcaagttttagggaccttgatgaacacagcaaaaatatcctcagaagattgtattataactattattttgttcgccaagaaaatctctggcgccaaaatgccctgaagactttgcctgtcctgctgaactcgtcagatatgttagcatgtggagaggaccttggccttatccctgcttgtgttcaccctgttatgcaagaactggggttgattggattgcgtatccaaagaatgcctagtgaaccaaacttggaatttggtattccttctcagtatagctatatgacggtttgtgctccctcatgtcatgactgctctacattacgtgcttggtgggaagaagatgaaggaagaagaagtcgtttctacaagactgtagttggcagtgatgaggagcccccatctcgttgcaccccggaagtagtgcacttcattgttcagcagcattttgacgctccatcaatgtgggcaatctttccacttcaggacctccttgcactgaaagacaagtacaccacaagaccagcgccagaggaaacaatcaatgaccccactaacccaaagcactattggagattccgtgtccacgtgacattggagtccctgctgaacgacaaggacatccaggcaaccatcaaggacctggtcacaagcagtgggaggtccttccccggaaagaaggcggaaggtgccgacgagagcggggagaagctgtccaaggtgcagctgaatggtaaagcttaggaaaggattgcgagagctgctggaagtgaccacggttacaagtaaataaatagaataaggcgacagattgcatcaccgtgttgatccaggtgatgctgtttctggtaggaaattcttacccatgtgatgttctttcaactctggaaataagaagcaccctctaccaagtcagaaagtgaaataatccatccagtgtcggttttcattaatagaattttcgttgaccgcccagttatttcttgagagtaattttgcgtgagcctgattcaagccattgaaataggcctccttctgttgtttgtgatgtcctaaactcataagcaaccgaaatccgtgaaaaaatgctgctagtagtggggagggg

SEQ ID NO: 210591 - DNA, 4114 bp, Zea Mays
cctacagtcagcttttcagaaaagctattcagaaaaaaaccgaaccaaacaggccatagtcgttggaacagctgcgcaatcgaacaagcttgtcaccggatgattaaaaaaaagatgaggggcaaagctcgacaggcttcagcagcgctaattaaactacctaatccttcttcagcacggcctgctcggatctctcatcttcttgccgtttatggcaaaaaaagaaaaaactatgcactgatctgatctgcaaatctccaccctgctgcaaatccggacaagggtcctgctctgctcgcactttaatttaatgtactcctacgctagcagtgcaggtgcagcacgagctagtgagtagtgacggatccagatttgttactttctcggatcttgcttccgcgtgccatccattctcgtttctttttctgaaacaaccgagcttctcaacgcgaccaaactcacccgatggagagagagatattcaggagagggggagaggaaaaaaaaatctttcctttcatggcgagatctgcaagttgcagcagcagagagagcgctcgcgccgcatctaatctagactagtactgtagacgtcacgtgaggcggcagcatggcgcggtagagttcgggagaggctgacggaccgggcagtggaaccgacggccgacgcgcgcgtcgtcctcacctcacgtgtgtcaccgccaccgccgctcacagccacacacaaccggacgacgacccgagcggattgctttgctattcttcgccgtctcaaaattaggagccggatccacgaagggaggagaaaagggctccttttttatgctgtcactgcggtcgcgggtgacgctttcccaggctctcccaccgtcgtagacgtcgccttcgccctccacacgcacacccatccgctcccctcgcgtcgccttctatcttcgagggagagccggagagccttcgccgctctctcactcgctctgttttgtacctcgctctgatctctccccccgcccgtcgctgattccctgcccgtttgtcgccattgccgccggtcgtgccgtgtcaaggacatggcgacctcgggaaagaaacacctgaattcagtgaccttgctgttcaaactaccgtattacacgcaatggggccagagcttgctgattgccgggtcggaaccagcactcgggtcgtggaatgtcaagcaaggagtatctctcagtccagtccatcaggacagtgagctaatctggtgtgggagcgtgtctgttgttgccggctttacctctgagtacaagtactatgtggtggatgacaagaagaatgtgttgagatgggaggctggggagaaaaggaaactagtcctgccggagggcgtgaaggaaggagacgtaattgaaatccgtgactggtggcaggatgcttctgaagctctattcttcagaagtgcattcaagaatgtcattttcaatgctactgaaggtgttaaaaaggaatcacagtcagtgtccctcaacaaaagtttggatcctgaagatatcgttgtccagttcgtgattagctgtcctcggctcgtatctggatctactgtcatcgtcactggaagtaaccctcaattaggaagatggcaaactcaagatggtctcaagctgagctatgttggagattccttgtggaaagcaagctgtgctttacggaagtctgagttccctataaaatacaaatattgtcaaatcagtcaagcaggaaactctacattggagcttggcccaaacagggaggttaatgttgatttatcatcacccaagcaatccagatatattgtgttatctgatggtgctcttagggatgcaccatggaggggtgcaggtgttgctgtacccatgttttcaatcagatcagatgaggaccttggcgttggagaatttctagatcttaaacttcttgttgactgggcagtcaattcgggcttccatcttgttcagctccttccaatcaacgatacttcagttcatgggatgtggtgggattcttatccgtacagctccctgtctgtgtttgctttgcatcccttgtacctgagggtacaagcactttcagatgcaattcctgtggatgttaaggaagaaattcagcaggcgaagaagcaattggataaaaaggatgtcgactacgaggcagcattgtccacaaaattgtcgattgctagaaaaatattcaatttagaaaaggaaaaagtgctaaactccagttctttcaagcagttcttatctgaaaacgaggaatggttgaaaccatatgcggcattttgctttttgcgggactttttcgagacatctgatcacagtcaatggggtcgtttttctcagttttccaaggataagcttgacaaacttatttgtgaaggtactttacaccatgacattatacgttttcattactatgttcagtaccatctatatatacaattatctgaggcagcaacatatgcaagaaagaaaaatgttatcctgaaaggtgatttacctattggtgttgataggaatagtgtcgatacatgggtatacccaaccttgtttcgcatgaataccgctactggagcgcctcctgattattttgacaagaatggacaaaattggggttttcctacatataactgggaggagatgtcaaaggataattatgggtggtggcgagctcgtctgacacagatggcaaagtacttcacagcatacaggatagaccacatcttgggtttctttaggatatgggagcttccagatcatgctgcaacaggtttagttgggaaatttagaccttccatccctcttagtcaggaggagcttctaagtgaaggtctatgggattttaatcggatgagccaaccatacattcgtcaggaaatactggaggagaagtttggatccttttggacagtcattgcagccaattttctaaatgagtaccagaagcagtgttatgagtttaaagaagattgcaacacagagaaaaagattattgtaaagattaaaacaagtgctgaaaagtcactgtgggtagagaaagaggacaatatccgccgtggccttttcgatttactacagaatattgtccttatcagagatccagaggactccacaaaattctatccccgttcaacctggaagacacatcaagttttagggaccttgatgaacacaggttatgcaagaactggggttgattggattgcgtatccaaagaatgcctagtgaaccaaacttggaatttggtattccttctcagtatagctatatgacggtttgtgctccctcatgtcatgactgctctacattacgtgcttggtgggaagaagatgaaggaagaagaagtcgtttctacaagactgtagttggcagtgatgaggagcccccatctcgttgcaccccggaagtagtgcacttcattgttcagcagcattttgacgctccatcaatgtgggcaatctttccacttcaggacctccttgcactgaaagacaagtacaccacaagaccagcgccagaggaaacaatcaatgaccccactaacccaaagcactattggagattccgtgtccacgtgacattggagtccctgctgaacgacaaggacatccaggcaaccatcaaggacctggtcacaagcagtgggaggtccttccccggaaagaaggcggaaggtgccgacgagagcggggagaagctgtccaaggtgcagctgaatggtaaagcttaggaaaggattgcgagagctgctggaagtgaccacggttacaagtaaataaatagaataaggcgacagattgcatcaccgtgttgatccaggtgatgctgtttctggtaggaaattcttacccatgtgatgttctttcaactctggaaataagaagcaccctctaccaagtcagaaagtgaaataatccatccagtgtcggttttcattaatagaattttcgttgaccgcccagttatttcttgagagtaattttgcgtgagcctgattcaagccattgaaataggcctccttctgttgtttgtgatgtcctaaactcataagcaaccgaaatccgtgaaaaaatgctgctagtagtggggagggg

SEQ ID NO: 210592 - DNA, 4256 bp, Zea Mays
cctacagtcagcttttcagaaaagctattcagaaaaaaaccgaaccaaacaggccatagtcgttggaacagctgcgcaatcgaacaagcttgtcaccggatgattaaaaaaaagatgaggggcaaagctcgacaggcttcagcagcgctaattaaactacctaatccttcttcagcacggcctgctcggatctctcatcttcttgccgtttatggcaaaaaaagaaaaaactatgcactgatctgatctgcaaatctccaccctgctgcaaatccggacaagggtcctgctctgctcgcactttaatttaatgtactcctacgctagcagtgcaggtgcagcacgagctagtgagtagtgacggatccagatttgttactttctcggatcttgcttccgcgtgccatccattctcgtttctttttctgaaacaaccgagcttctcaacgcgaccaaactcacccgatggagagagagatattcaggagagggggagaggaaaaaaaaatctttcctttcatggcgagatctgcaagttgcagcagcagagagagcgctcgcgccgcatctaatctagactagtactgtagacgtcacgtgaggcggcagcatggcgcggtagagttcgggagaggctgacggaccgggcagtggaaccgacggccgacgcgcgcgtcgtcctcacctcacgtgtgtcaccgccaccgccgctcacagccacacacaaccggacgacgacccgagcggattgctttgctattcttcgccgtctcaaaattaggagccggatccacgaagggaggagaaaagggctccttttttatgctgtcactgcggtcgcgggtgacgctttcccaggctctcccaccgtcgtagacgtcgccttcgccctccacacgcacacccatccgctcccctcgcgtcgccttctatcttcgagggagagccggagagccttcgccgctctctcactcgctctgttttgtacctcgctctgatctctccccccgcccgtcgctgattccctgcccgtttgtcgccattgccgccggtcgtgccgtgtcaaggacatggcgacctcgggaaagaaacacctgaattcagtgaccttgctgttcaaactaccgtattacacgcaatggggccagagcttgctgattgccgggtcggaaccagcactcgggtcgtggaatgtcaagcaaggagtatctctcagtccagtccatcaggacagtgagctaatctggtgtgggagcgtgtctgttgttgccggctttacctctgagtacaagtactatgtggtggatgacaagaagaatgtgttgagatgggaggctggggagaaaaggaaactagtcctgccggagggcgtgaaggaaggagacgtaattgaaatccgtgactggtggcaggatgcttctgaagctctattcttcagaagtgcattcaagaatgtcattttcaatgctactgaaggtgttaaaaaggaatcacagtcagtgtccctcaacaaaagtttggatcctgaagatatcgttgtccagttcgtgattagctgtcctcggctcgtatctggatctactgtcatcgtcactggaagtaaccctcaattaggaagatggcaaactcaagatggtctcaagctgagctatgttggagattccttgtggaaagcaagctgtgctttacggaagtctgagttccctataaaatacaaatattgtcaaatcagtcaagcaggaaactctacattggagcttggcccaaacagggaggttaatgttgatttatcatcacccaagcaatccagatatattgtgttatctgatggtgctcttagggatgcaccatggaggggtgcaggtgttgctgtacccatgttttcaatcagatcagatgaggaccttggcgttggagaatttctagatcttaaacttcttgttgactgggcagtcaattcgggcttccatcttgttcagctccttccaatcaacgatacttcagttcatgggatgtggtgggattcttatccgtacagctccctgtctgtgtttgctttgcatcccttgtacctgagggtacaagcactttcagatgcaattcctgtggatgttaaggaagaaattcagcaggcgaagaagcaattggataaaaaggatgtcgactacgaggcagcattgtccacaaaattgtcgattgctagaaaaatattcaatttagaaaaggaaaaagtgctaaactccagttctttcaagcagttcttatctgaaaacgaggaatggttgaaaccatatgcggcattttgctttttgcgggactttttcgagacatctgatcacagtcaatggggtcgtttttctcagttttccaaggataagcttgacaaacttatttgtgaaggtactttacaccatgacattatacgttttcattactatgttcagtaccatctatatatacaattatctgaggcagcaacatatgcaagaaagaaaaatgttatcctgaaaggtgatttacctattggtgttgataggaatagtgtcgatacatgggtatacccaaccttgtttcgcatgaataccgctactggagcgcctcctgattattttgacaagaatggacaaaattggggttttcctacatataactgggaggagatgtcaaaggataattatgggtggtggcgagctcgtctgacacagatggcaaagtacttcacagcatacaggatagaccacatcttgggtttctttaggatatgggagcttccagatcatgctgcaacaggtttagttgggaaatttagaccttccatccctcttagtcaggaggagcttctaagtgaaggtctatgggattttaatcggatgagccaaccatacattcgtcaggaaatactggaggttgctgtgtttataatgatgttcatgattcagattttttccagtgaaattttaggccaaaaatgtgaaatttatttatttttcctcaggagaagtttggatccttttggacagtcattgcagccaattttctaaatgagtaccagaagcagtgttatgagtttaaagaagattgcaacacagagaaaaagattattgtaaagattaaaacaagtgctgaaaagtcactgtgggtagagaaagaggacaatatccgccgtggccttttcgatttactacagaatattgtccttatcagagatccagaggactccacaaaattctatccccgttcaacctggaagacacatcaagttttagggaccttgatgaacacagatatgttagcatgtggagaggaccttggccttatccctgcttgtgttcaccctgttatgcaagaactggggttgattggattgcgtatccaaagaatgcctagtgaaccaaacttggaatttggtattccttctcagtatagctatatgacggtttgtgctccctcatgtcatgactgctctacattacgtgcttggtgggaagaagatgaaggaagaagaagtcgtttctacaagactgtagttggcagtgatgaggagcccccatctcgttgcaccccggaagtagtgcacttcattgttcagcagcattttgacgctccatcaatgtgggcaatctttccacttcaggacctccttgcactgaaagacaagtacaccacaagaccagcgccagaggaaacaatcaatgaccccactaacccaaagcactattggagattccgtgtccacgtgacattggagtccctgctgaacgacaaggacatccaggcaaccatcaaggacctggtcacaagcagtgggaggtccttccccggaaagaaggcggaaggtgccgacgagagcggggagaagctgtccaaggtgcagctgaatggtaaagcttaggaaaggattgcgagagctgctggaagtgaccacggttacaagtaaataaatagaataaggcgacagattgcatcaccgtgttgatccaggtgatgctgtttctggtaggaaattcttacccatgtgatgttctttcaactctggaaataagaagcaccctctaccaagtcagaaagtgaaataatccatccagtgtcggttttcattaatagaattttcgttgaccgcccagttatttcttgagagtaattttgcgtgagcctgattcaagccattgaaataggcctccttctgttgtttgtgatgtcctaaactcataagcaaccgaaatccgtgaaaaaatgctgctagtagtggggagggg

SEQ ID NO: 210593 - DNA, 1773 bp, Zea Mays
ccatatgcggcattttgctttttgcgggactttttcgagacatctgatcacagtcaatggggtcgtttttctcagttttccaaggataagcttgacaaacttatttgtgaaggtactttacaccatgacattatacgttttcattactatgttcagtaccatctatatatacaattatctgaggcagcaacatatgcaagaaagaaaaatgttatcctgaaaggtgatttacctattggtgttgataggaatagtgtcgatacatgggtatacccaaccttgtttcgcatgaataccgctactggagcgcctcctgattattttgacaagaatggacaaaattggggttttcctacatataactgggaggagatgtcaaaggataattatgggtggtggcgagctcgtctgacacaggatatgggagcttccagatcatgctgcaacaggtttagttgggaaatttagaccttccatccctcttagtcaggaggagcttctaagtgaaggtctatgggattttaatcggatgagccaaccatacattcgtcaggaaatactggaggagaagtttggatccttttggacagtcattgcagccaattttctaaatgagtaccagaagcagtgttatgagtttaaagaagattgcaacacagagaaaaagattattgtaaagattaaaacaagtgctgaaaagtcactgtgggtagagaaagaggacaatatccgccgtggccttttcgatttactacagaatattgtccttatcagagatccagaggactccacaaaattctatccccgttcaacctggaagacacatcaagttttagggaccttgatgaacacaggttatgcaagaactggggttgattggattgcgtatccaaagaatgcctagtgaaccaaacttggaatttggtattccttctcagtatagctatatgacggtttgtgctccctcatgtcatgactgctctacattacgtgcttggtgggaagaagatgaaggaagaagaagtcgtttctacaagactgtagttggcagtgatgaggagcccccatctcgttgcaccccggaagtagtgcacttcattgttcagcagcattttgacgctccatcaatgtgggcaatctttccacttcaggacctccttgcactgaaagacaagtacaccacaagaccagcgccagaggaaacaatcaatgaccccactaacccaaagcactattggagattccgtgtccacgtgacattggagtccctgctgaacgacaaggacatccaggcaaccatcaaggacctggtcacaagcagtgggaggtccttccccggaaagaaggcggaaggtgccgacgagagcggggagaagctgtccaaggtgcagctgaatggtaaagcttaggaaaggattgcgagagctgctggaagtgaccacggttacaagtaaataaatagaataaggcgacagattgcatcaccgtgttgatccaggtgatgctgtttctggtaggaaattcttacccatgtgatgttctttcaactctggaaataagaagcaccctctaccaagtcagaaagtgaaataatccatccagtgtcggttttcattaatagaattttcgttgaccgcccagttatttcttgagagtaattttgcgtgagcctgattcaagccattgaaataggcctccttctgttgtttgtgatgtcctaaactcataagcaaccgaaatccgtgaaaaaatgctgctagtagtggggagggg

SEQ ID NO: 210594 - DNA, 1102 bp, Zea Mays
gttctcgcgaaaataaaattaggcaaaaatatcctcagaagattgtattataactattattttgttcgccaagaaaatctctggcgccaaaatgccctgaagactttgcctgtcctgctgaactcgtcagatatgttagcatgtggagaggaccttggccttatccctgcttgtgttcaccctgttatgcaagaactggggttgattggattgcgtatccaaagaatgcctagtgaaccaaacttggaatttggtattccttctcagtatagctatatgacggtttgtgctccctcatgtcatgactgctctacattacgtgcttggtgggaagaagatgaaggaagaagaagtcgtttctacaagactgtagttggcagtgatgaggagcccccatctcgttgcaccccggaagtagtgcacttcattgttcagcagcattttgacgctccatcaatgtgggcaatctttccacttcaggacctccttgcactgaaagacaagtacaccacaagaccagcgccagaggaaacaatcaatgaccccactaacccaaagcactattggagattccgtgtccacgtgacattggagtccctgctgaacgacaaggacatccaggcaaccatcaaggacctggtcacaagcagtgggaggtccttccccggaaagaaggcggaaggtgccgacgagagcggggagaagctgtccaaggtgcagctgaatggtaaagcttaggaaaggattgcgagagctgctggaagtgaccacggttacaagtaaataaatagaataaggcgacagattgcatcaccgtgttgatccaggtgatgctgtttctggtaggaaattcttacccatgtgatgttctttcaactctggaaataagaagcaccctctaccaagtcagaaagtgaaataatccatccagtgtcggttttcattaatagaattttcgttgaccgcccagttatttcttgagagtaattttgcgtgagcctgattcaagccattgaaataggcctccttctgttgtttgtgatgtcctaaactcataagcaaccgaaatccgtgaaaaaatgctgctagtagtggggagggg

SEQ ID NO: 210595 - DNA, 1704 bp, Zea Mays
ggagttctcatctccctccttgaacggtggctgaaacagtgaaatggtacccgaaatagagacacaagtggaggaagcgggcaacgccagtctcccgtgcatgcagcaaacgtttcgtcgtcgtcattcatcagtttctcttctaggaaaggaaaagaaaaagtaatggcgaaccaagagatttggaatgtgtccgcctaatcccggtctcatcctctccatcgcaacttgagtccgttcactcgttgaggccagccgggcggcgggcggcggcgacatggcgcggtcgagcgcggacgacatggagctgaagcgcgggtgcgaggccgggatcctcgccaagggggaccgggacaaggtggtgatgtgcatgcgcgtggccaagagccgcggcggcggcggcggctgggccaagggcaagctcacctcccgccacaacatggccaagccccgcgtcctcgccgtcaccgccaaggccaaagggcacaggaccaagacgttcctgcgggtgctcaaatactccaatggcggggtcctcgagccggcaaaagtgtacaagatcaagcatctccacaagatagaggtctcccaaaacgaccccagcggctgcaccttcgtcctggggtttgacaacctgagaagccagagtgtggcgcctccacaatggaccatgcgcaacaaagacgacaggaaccgcctgctgatgtgcatcctcaacatgtgcaaagagcacttgggaagcatccccaaagtcgtcggcatggacgtcgtcgagatggctatctgggcaaagaacactcaagcaaaggttacacaagtgagcagtaaagatgggcctgtagaatcactagtattagaggatgaatcacatgttatcgttgagaaggacttggtttctcagggagaagaggaggacattgaggctcttcttggcaattatgttatggccattggtgaagcagaggctttttccgaaaggatgaagcgcgagcttgtagcgctagaatctgcaaatgtttatgccttgttggaaactgaatctgttgtagaagaggtattgcagggtctcgaaatagccagtatatgtgttgaagatatggatgaatggctagggattttcaatataaagctcaggcatatgagggaggatatacaatctgtatgcttactttcacctttactgatgtatatgggcaaatcatgtttccttagagttgttgtgattaaaattattttctcttttaatgcccgatacatttaaaaccaaactatatggatgtctgatgaggcccaataagagcttaacgaaataatatttgaattgtttgtcacatgcttacaacttatagttatagtgcatcttggctgttgaaatttacacttagtgttgtctctagttctctactgaagacattagggacaatttcctaccatattcatattaattgtttaaaactgaacatatgtataagatggagttgcagaatcattgttaaatactcccgccgttccaatttataattcgtttgacttttttaacctaagtttgaccgacttgtctcatttaaaaacatatttattactaatttttactgtgatattgtttagactataatatactttaagtatgcctttggatttttcattttttcgcaaaaaatttgaataagacgagccggtcaaacttggcacaaaaaagtcaaa

SEQ ID NO: 210596 - DNA, 2400 bp, Zea Mays
cgaaactctgctccctccgctgcttgccttgcggcggctcctgctactaaatccgtgctcgctttgctgtgtcgtgtcgtgtgctgccccacttgcagttggactcgccgccgctcgcttgctgtggcctgtgtccgagccggcctaccccgcctctgaacaccgcctcgccgcccgcgtgcgcccccctccaactcctatggccgcgccctcccacctccacctccacctcccgggctgcccccaaaccctagccctgcccctgccctccccggggggtttctccgcttggcccggcctccgctcctgctcccgctcccgccagccccgcatccgcccggtcgccgcgctcggacccgccgacgccggcgacctgctcggccgcgttgaggcgttcctctacaccgttgcggacgccgccgttaacgcggagcccgtcgcggcagccgcggacaccgggaccaaggaggccgccgccggggactggctctccggcatcaccaactccatggagaccgtgctcaaggttctgaaagatggtctatcagctctccatgttccttattcatatggctttgcaatcattctcctcactgttcttgtcaaggcagctacatttcctctaacaaagaagcaggttgagtctgcacttgcaatgaggtcactgcaacctcaagtgaaggccattcaacaacgatatgctggtgatcaggaaaggatacaacttgaaactgctcgcttatacaagttatctggtgttgacccacttgcaggatgcttgcctacccttgtgacaataccagtttggattggtctatacagagctctctcaaatgtagctaatgagggacttctgactgaaggctttttttggataccttctctggctggtcctacaacaattgctgctcgacaaaacggccaggggatatcatggctttttccttttactgatggccatccacctcttggctggtcagatactttggcatacattgtgttaccagttcttcttgtcatttcacagtacatatctactcaagtaatgcagccaccacagagcaatgatcctaaccaacaaggtgctcaggctgtaacaaagttcttaccattgctaattggttattttgctctttccgtgccttcaggactaaggctgtactggcttacaaataatatcctcagtactgcacaacaagtgtggcttcaaaagcttggaggtgcaaaaaatcctgtcaaagaatatattgacaagctttcaagagaagaaacgactactgttcagaagaatgattctactgttcagagtgaacctctctctaaacatagtaaaccccagcctagccaagagccgaaaccaagtgggccacaacgtggtgaaagatttaggaaactgaaggaggaagaatctatgagaaaagaggttatgggacaaggtaaacaatcagaacagtcaagttctgaatctagagtcacggatggaacacaaaattcggatgtgtcttctggagaccaaaaagaccaacaggggtctcatgaaaatggaccggttgtagctagtataaatggtggagtcaaccatattcgaaatgaaaagactcagaacttatcctcagaaaaggaagcagctgacgatcactcacctgatgtccacaaattaacggaccgagagaatggcaatgacgcggtatagagtggatgttagcgatctactgctctctgaagatcagtgagtatcgtatctgcttcatcgacgtatagctgggagatagtgaccaacagtttcacgaacagctactacaggagagttgagaatcaacacgaagaagatgcaaacaggaggcaaaattgtgcaaaccatgaataatcccagtggggtgcacggagatcacacagtcacagatgtaggacaccgggcatgaggtgaggacgtcgtcacctgggacatggacaggacggtggcggcgccgcctactgctgcccggcgttctaggatctgctggacatggacaggacggtggcggtgatgccatttgtcaggcataattgaattggagctaagcatctacaacgatgagtttgcatgtcccatgcaacgatgctatgcttgctcacatgaattgtacacaacaatctcaggctcaagaacatgattcatttgcatgctctcgactagcagtgtttctacccaccggctaccgccaatttcgcctacagaaacagacacgagataccgaagactgcagatcgccaaaagacgatgccaaatggcttctcgatcatttgtaaatttgcccagcttaatatacctcgtatactatatacaactcaatcctgtacaatgtttcatgaacacctagaaattcgagatcccaaacttggaaactaacaaagtgaaac

SEQ ID NO: 210597 - DNA, 2228 bp, Zea Mays
gtgctcgctttgctgtgtcgtgtcgtgtgctgccccacttgcagttggactcgccgccgctcgcttgctgtggcctgtgtccgagccggcctaccccgcctctgaacaccgcctcgccgcccgcgtgcgcccccctccaactcctatggccgcgccctcccacctccacctccacctcccgggctgcccccaaaccctagccctgcccctgccctccccggggggtttctccgcttggcccggcctccgctcctgctcccgctcccgccagccccgcatccgcccggtcgccgcgctcggacccgccgacgccggcgacctgctcggccgcgttgaggcgttcctctacaccgttgcggacgccgccgttaacgcggagcccgtcgcggcagccgcggacaccgggaccaaggaggccgccgccggggactggctctccggcatcaccaactccatggagaccgtgctcaaggttctgaaagatggtctatcagctctccatgttccttattcatatggctttgcaatcattctcctcactgttcttgtcaaggcagctacatttcctctaacaaagaagcaggttgagtctgcacttgcaatgaggtcactgcaacctcaagtgaaggccattcaacaacgatatgctggtgatcaggttagctctgaattaccatgcacgatgtttttcctatcagtggatgctcctcaatcctcactggatagcaagtcttattagaaagtcttgtcatttgggttcagacttttactatctattgctaccttttccgtttctcatacatccttctgttagttattcacatgtacttcctttggcattttcctgcaataggatgcttgcctacccttgtgacaataccagtttggattggtctatacagagctctctcaaatgtagctaatgagggacttctgactgaaggctttttttggataccttctctggctggtcctacaacaattgctgctcgacaaaacggccaggggatatcatggctttttccttttactgatggccatccacctcttggctggtcagatactttggcatacattgtgttaccagttcttcttgtcatttcacagtacatatctactcaagtaatgcagccaccacagagcaatgatcctaaccaacaaggtgctcaggctgtaacaaagttcttaccattgctaattggttattttgctctttccgtgccttcaggactaaggctgtactggcttacaaataatatcctcagtactgcacaacaagtgtggcttcaaaagcttggaggtgcaaaaaatcctgtcaaagaatatattgacaagctttcaagagaagaaacgactactgttcagaagaatgattctactgttcagagtgaacctctctctaaacatagtaaaccccagcctagccaagagccgaaaccaagtgggccacaacgtggtgaaagatttaggaaactgaaggaggaagaatctatgagaaaagaggttatgggacaaggtaaacaatcagaacagtcaagttctgaatctagagtcacggatggaacacaaaattcggatgtgtcttctggagaccaaaaagaccaacaggggtctcatgaaaatggaccggttgtagctagtataaatggtggagtcaaccatattcgaaatgaaaagactcagaacttatcctcagaaaaggtttgcaactatgcgaaggtcgcgagacgaggacatacacgttgccaccctctaggaccacctgtccagcgtcgtcaccatggcgcccactcgcagcttcgttgaggaagcagctgacgatcactcacctgatgtccacaaattaacggaccgagagaatggcaatgacgcggtatagagtggatgttagcgatctactgctctctgaagatcagtgagtatcgtatctgcttcatcgacgtatagctgggagatagtgaccaacagtttcacgaacagctactacaggagagttgagaatcaacacgaagaagatgcaaacaggaggcaaaattgtgcaaaccatggtctaggtctaggctcatttatttatttttgtggctgtgctttaggttatgtgaagcatatggcatatatatatatatatatatatatatatatatatatatatatatatattagtagataaatgtacacctggttttgaccgtgcaattcgatattttacctcatgtaaataaataaaa

SEQ ID NO: 210598 - DNA, 2080 bp, Zea Mays
gtgtcgtgtcgtgtgctgccccacttgcagttggactcgccgccgctcgcttgctgtggcctgtgtccgagccggcctaccccgcctctgaacaccgcctcgccgcccgcgtgcgcccccctccaactcctatggccgcgccctcccacctccacctccacctcccgggctgcccccaaaccctagccctgcccctgccctccccggggggtttctccgcttggcccggcctccgctcctgctcccgctcccgccagccccgcatccgcccggtcgccgcgctcggacccgccgacgccggcgacctgctcggccgcgttgaggcgttcctctacaccgttgcggacgccgccgttaacgcggagcccgtcgcggcagccgcggacaccgggaccaaggaggccgccgccggggactggctctccggcatcaccaactccatggagaccgtgctcaaggttctgaaagatggtctatcagctctccatgttccttattcatatggctttgcaatcattctcctcactgttcttgtcaaggcagctacatttcctctaacaaagaagcaggttgagtctgcacttgcaatgaggtcactgcaacctcaagtgaaggccattcaacaacgatatgctggtgatcaggaaaggatacaacttgaaactgctcgcttatacaagttatctggtgttgacccacttgcaggatgcttgcctacccttgtgacaataccagtttggattggtctatacagagctctctcaaatgtagctaatgagggacttctgactgaaggctttttttggataccttctctggctggtcctacaacaattgctgctcgacaaaacggccaggggatatcatggctttttccttttactgatggccatccacctcttggctggtcagatactttggcatacattgtgttaccagttcttcttgtcatttcacagtacatatctactcaagtaatgcagccaccacagagcaatgatcctaaccaacaaggtgctcaggctgtaacaaagttcttaccattgctaattggttattttgctctttccgtgccttcaggactaaggctgtactggcttacaaataatatcctcagtactgcacaacaagtgtggcttcaaaagcttggaggtgcaaaaaatcctgtcaaagaatatattgacaagctttcaagagaagaaacgactactgttcagaagaatgattctactgttcagagtgaacctctctctaaacatagtaaaccccagcctagccaagagccgaaaccaagtgggccacaacgtggtgaaagatttaggaaactgaaggaggaagaatctatgagaaaagaggttatgggacaaggtaaacaatcagaacagtcaagttctgaatctagagtcacggatggaacacaaaattcggatgtgtcttctggagaccaaaaagaccaacaggggtctcatgaaaatggaccggttgtagctagtataaatggtggagtcaaccatattcgaaatgaaaagactcagaacttatcctcagaaaaggtttgcaactatgcgaaggtcgcgagacgaggacatacacgttgccaccctctaggaccacctgtccagcgtcgtcaccatggcgcccactcgcagcttcgttgaggaagcagctgacgatcactcacctgatgtccacaaattaacggaccgagagaatggcaatgacgcggtatagagtggatgttagcgatctactgctctctgaagatcagtgagtatcgtatctgcttcatcgacgtatagctgggagatagtgaccaacagtttcacgaacagctactacaggagagttgagaatcaacacgaagaagatgcaaacaggaggcaaaattgtgcaaaccatggtctaggtctaggctcatttatttatttttgtggctgtgctttaggttatgtgaagcatatggcatatatatatatatatatatatatatatatatatatatatatatatattagtagataaatgtacacctggttttgaccgtgcaattcgatattttacctcatgtaaataaataaaa

SEQ ID NO: 210599 - DNA, 1542 bp, Zea Mays
gatacacagtgttgatactgctactggttctgaaagatggtctatcagctctccatgttccttattcatatggctttgcaatcattctcctcactgttcttgtcaaggcagctacatttcctctaacaaagaagcaggttgagtctgcacttgcaatgaggtcactgcaacctcaagtgaaggccattcaacaacgatatgctggtgatcaggaaaggatacaacttgaaactgctcgcttatacaagttatctggtgttgacccacttgcaggatgcttgcctacccttgtgacaataccagtttggattggtctatacagagctctctcaaatgtagctaatgagggacttctgactgaaggctttttttggataccttctctggctggtcctacaacaattgctgctcgacaaaacggccaggggatatcatggctttttccttttactgatggccatccacctcttggctggtcagatactttggcatacattgtgttaccagttcttcttgtcatttcacagtacatatctactcaagtaatgcagccaccacagagcaatgatcctaaccaacaaggtgctcaggctgtaacaaagttcttaccattgctaattggttattttgctctttccgtgccttcaggactaaggctgtactggcttacaaataatatcctcagtactgcacaacaagtgtggcttcaaaagcttggaggtgcaaaaaatcctgtcaaagaatatattgacaagctttcaagagaagaaacgactactgttcagaagaatgattctactgttcagagtgaacctctctctaaacatagtaaaccccagcctagccaagagccgaaaccaagtgggccacaacgtggtgaaagatttaggaaactgaaggaggaagaatctatgagaaaagaggttatgggacaaggtaaacaatcagaacagtcaagttctgaatctagagtcacggatggaacacaaaattcggatgtgtcttctggagaccaaaaagaccaacaggggtctcatgaaaatggaccggttgtagctagtataaatggtggagtcaaccatattcgaaatgaaaagactcagaacttatcctcagaaaaggaagcagctgacgatcactcacctgatgtccacaaattaacggaccgagagaatggcaatgacgcggtatagagtggatgttagcgatctactgctctctgaagatcagtgagtatcgtatctgcttcatcgacgtatagctgggagatagtgaccaacagtttcacgaacagctactacaggagagttgagaatcaacacgaagaagatgcaaacaggaggcaaaattgtgcaaaccatggtctaggtctaggctcatttatttatttttgtggctgtgctttaggttatgtgaagcatatggcatatatatatatatatatatatatatatatatatatatatatatatattagtagataaatgtacacctggttttgaccgtgcaattcgatattttacctcatgtaaataaataaaa

SEQ ID NO: 210600 - DNA, 1278 bp, Zea Mays
tttcagttgcaattgttctcttccgagaatattggtgaagcaataacttgatattgggttctagaccaaagaagcaatggaaaaggaatcatctgccacatacgagccaaaaaggaacagtgaaataagggtttttgagagttcagatgagatttcaacggatcttgctgagtatatctcacaagtttcagaaatttctgtcaaagaaaggggatactttgccatcgccttatctggaggtcccctagtcagttttttggggaaactttgtgaagctccatacaacaagacactggattggtccaaatggtacatcttctggtctgatgaacgtgctgtggcaaaaaaccatgcagagagtaactataggttaacaaaagaaggattcctcgccaaggtaccgattctgaatggccatgtctactccataaatgacaatgccacagtggaggatgcagcaacagactatgaattcatgatcaggcagctggttaaggtccgcacaataggagtctcagagagaaacgactgtcccaagttcgatctcatccttctcaccatgggctccgatgggcatgtggcctcgcttttcccgaaccaccctgccatggagctgaaagacgactgggtcacctacatcaccgactctccgcagcctcctcctgagaggatcaccttcactctcccagtgatcaactcagcatccaacatagcaatagtgtccactggtgatgacaaagcaaaggctgttcacatagcagtttctgacatggccgaaggtcttgatgctcctacatcactgcctgctagaatggtccagccaacggacgggaagctggtatggtttctggacaaggcggcggcatcattccttgactccaagaacgacgacgacgacgcttgctacgatcgtcacgagtgactaactctgaggatcgttggtcgttttgaagcgaatgaacggaggtgtgtgtaagtaggtggtggcgtatgatggaagacgcgctgttccccttttagctcgatgcatgggttaattttgttctgagggtttttagctccggaaatctgaaattgcccttggtccttttgcagtgaggtgatttaaaagcgatgaaatgtgtatgcgatgttgagtcgtcaaagaacaccggaatttaactgtggtcgtataatattatgtgctacattctatgctatggcagttagttttttttgttttgtattattatttgttggcatgccttgtccatggtactgttctaaaaacgttctgat

SEQ ID NO: 210601 - DNA, 921 bp, Zea Mays
caaaaaaataagcggtcgtcaggcgccgggcgagggaagcagggaaacaaggagcgagcgagcctgcgccgctaagacgggcgccgaccggcgagcgatgcagtccccttcaccttttcttcattcttccgcatcgtaagaggattaggaatttaggatcggggccgacagagcccgacgaccagcatggaccactcgcccgatgatctgtcgttgatggcgctcggcgaggacggggatcacggcgccgccctgcccctcattgcggactaggcaaagcatgacgacgatggcatcatccgaaaatgagcatgttgatggcgtcagcgcacatggtcacggaggtgaaggcgaccacgtcagccatggcagatgaggagcatccggagagaagagaggaggcctcagaagaactaggggaaggcattatgctttgaagtgtcccaacatacccttgggagggaactggccgagattataactatgaacagcggatgctctgtgattcgatagctcacgattattctagaggacaccaaatgaactgaagataaaaatcacgtagagcagtggtgggtggcaggaagcaaccatgggttggtcaacgaacggaagcgggaagacataaagcagcacgacgacggtgagaaaggaagagcaagaacgtcgtcgccaacagtgcaatatggcgcaatcccctataattaccgttgcgtctccgcgactagaccatgtctcgcggtcagagggcgtacctcaacgaagctgcgagtgggcgccatggtgacgacgctggacaggtggtcctagagggtggcaacgtgtatgtcctcgtctcgcgaccttcgcatagttgcaaaccttccaaatgttgccgtttaaaaccgatagatagactcgcgcgcggcgcgagcaatttac

SEQ ID NO: 210602 - DNA, 1962 bp, Zea Mays
cttttttctaggccgtgcgatcgcattctgacggcagcgaatgcttggtggtggacgaacgactcggcttctactcgataattccagaatccagtctatgagtcaacttatcctctatgcagcaaaaaaataagcggtcgtcaggcgccgggcgagggaagcagggaaacaaggagcgagcgagcctgcgccgctaagacgggcgccgaccggcgagcgatgcagtccccttcaccttttcttcattcttccgcatcgtaagaggattaggaatttaggatcggggccgacagagcccgacgaccagcatggaccactcgcccgatgatctgtcgttgatggcgctcggcgaggacggggatcacggcgccgccctgcccctcattgcggactaggcaaagcatgacgacgatggcatcatccgaaaatgagcatgttgatggcgtcagcgcacatggtcacggaggtgaaggcgaccacgtcagccatggcagatgaggagcatccggagagaagagaggaggcctcagaaatgatcaagttgtacaggaactaggggaaggcattatgctttgaagtgtcccaacatacccttgggagggaactggccgagattataactatgaacaggtgcttaaatatttttttgccaattattttgtccacgtaaacatggatccatgtgcattggccgttagtaaacatgtgactatttggtggccttttggctgatatatgatatgtcacaattgcctcatagctttacaccttggtggttctaatgttctgtgacattacaaccatattttgttgttacgagtttactacttgcatgctacctagacctgtttctgtgggagcattcatatacttttggttaatatgtgatatgtcaatattctttatcaatacttcttctgttgtggatcttcaatatataactacattggacgaaccaaatcaccacaccgttatgttaccttttttgtgaaatttgaccttgagcttttctgttgcggctgttgggcagggtgttcaacattattcgcgacaacaaccaggtcttgctgggataggtgtaggaccattatgaggccaccacatgttcttaggaagggaacaaggaagataattttttgttacttttataaatttgtgtaaaatgtaagtttcaacataattgtgacaacatatttttaattggtagtccctcacctttttaagtgctctctgctacttcattgataaatttacaataaattaactttgaaatttgtatctccatgatgcatagacaacctgagcatgtgatgatgtttttacttgctgaaatgggaacaagtgggtcacttcatgggcatctaaggttggtgatcaaagcaagatttgcccccaaaaactttgaagcaatcctaaggagacacatcattaagttatccaatttgattgtgtccatgccgtcttttttatttgagccatacaatcacgtttcaatagagatgttgcagcttactacctcctcgcgcgtgcagcggatgctctgtgattcgatagctcacgattattctagaggacaccaaatgaactgaagataaaaatcacgtagagcagtggtgggtggcaggaagcaaccatgggttggtcaacgaacggaagcgggaagacataaagcagcacgacgacggtgagaaaggaagagcaagaacgtcgtcgccaacagtgcaatatggcgcaatcccctataattaccgttgcgtctccgcgactagaccatgtctcgcggtcagagggcgtacctcaacgaagctgcgagtgggcgccatggtgacgacgctggacaggtggtcctagagggtggcaacgtgtatgtcctcgtctcgcgaccttcgcatagttgcaaaccttccaaatgttgccgtttaaaaccgatagatagactcgcgcgcggcgcgagcaatttac

SEQ ID NO: 210603 - DNA, 1628 bp, Zea Mays
cgctgcgtccacgtcggtctcttttttctaggccgtgcgatcgcattctgacggcagcgaatgcttggtggtggacgaacgactcggcttctactcgataattccagaatccagtctatgagtcaacttatcctctatgcagcaaaaaaataagcggtcgtcaggcgccgggcgagggaagcagggaaacaaggagcgagcgagcctgcgccgctaagacgggcgccgaccggcgagcgatgcagtccccttcaccttttcttcattcttccgcatcgtaagaggattaggaatttaggatcggggccgacagagcccgacgaccagcatggaccactcgcccgatgatctgtcgttgatggcgctcggcgaggacggggatcacggcgccgccctgcccctcattgcggactaggcaaagcatgacgacgatggcatcatccgaaaatgagcatgttgatggcgtcagcgcacatggtcacggaggtgaaggcgaccacgtcagccatggcagatgaggagcatccggagagaagagaggaggcctcagaagtgagctgtgtattctccatcgttgcgctgatagtgtttctgataattatagtgttgttcgcctgttcggttgcttgccttgattcatagcggttccagctagggttgagcttgcgagttgtgggttacatttaaggttctattccactacatgttcatgtatctatattttttcttctcctacgacttgcccccttttgatccgacaagaagaagaaaattaaggaggtcgtcatccaaaaaccttctgatggaatggacaactttgcagagaagacagaaaaaacactggcagtcacagaatccggtgtacttaacttcactagaatgaggaagataaacaggcacaacagatacactcattgggagctagactagacaagtttaagaatcagaaaatgaatcgaggctttacatttagtcattgtgcaagtttaaaaatcaaccagtgaattaaggctttacatttgttcatcctacaaaaatttcaggtggattttaattcaacttgagtacttttgcaatatctggctctccctgcttttcagatgatcaagttgtacaggaactaggggaaggcattatgctttgaagtgtcccaacatacccttgggagggaactggccgagattataactatgaacagcggatgctctgtgattcgatagctcacgattattctagaggacaccaaatgaactgaagataaaaatcacgtagagcagtggtgggtggcaggaagcaaccatgggttggtcaacgaacggaagcgggaagacataaagcagcacgacgacggtgagaaaggaagagcaagaacgtcgtcgccaacagtgcaatatggcgcaatcccctataattaccgttgcgtctccgcgactagaccatgtctcgcggtcagagggcgtacctcaacgaagctgcgagtgggcgccatggtgacgacgctggacaggtggtcctagagggtggcaacgtgtatgtcctcgtctcgcgaccttcgcatagttgcaaaccttccaaatgttgccgtttaaaaccgatagatagactcgcgcgcggcgcgagcaatttac

SEQ ID NO: 210604 - DNA, 2649 bp, Zea Mays
ggtccgttaatttgtggacatcaggtgagtgatcgtcagctgcttcctgaaactcataaacaaccgaacagctgctgtgagatttccttataatagagcggggagggaatctcgtcgctcgctgcgtccacgtcggtctcttttttctaggccgtgcgatcgcattctgacggcagcgaatgcttggtggtggacgaacgactcggcttctactcgataattccagaatccagtctatgagtcaacttatcctctatgcagcaaaaaaataagcggtcgtcaggcgccgggcgagggaagcagggaaacaaggagcgagcgagcctgcgccgctaagacgggcgccgaccggcgagcgatgcagtccccttcaccttttcttcattcttccgcatcgtaagaggattaggaatttaggatcggggccgacagagcccgacgaccagcatggaccactcgcccgatgatctgtcgttgatggcgctcggcgaggacggggatcacggcgccgccctgcccctcattgcggactaggcaaagcatgacgacgatggcatcatccgaaaatgagcatgttgatggcgtcagcgcacatggtcacggaggtgaaggcgaccacgtcagccatggcagatgaggagcatccggagagaagagaggaggcctcagaagtgagctgtgtattctccatcgttgcgctgatagtgtttctgataattatagtgttgttcgcctgttcggttgcttgccttgattcatagcggttccagctagggttgagcttgcgagttgtgggttacatttaaggttctattccactacatgttcatgtatctatattttttcttctcctacgacttgcccccttttgatccgacaagaagaagaaaattaaggaggtcgtcatccaaaaaccttctgatggaatggacaactttgcagagaagacagaaaaaacactggcagtcacagaatccggtgtacttaacttcactagaatgaggaagataaacaggcacaacagatacactcattgggagctagactagacaagtttaagaatcagaaaatgaatcgaggctttacatttagtcattgtgcaagtttaaaaatcaaccagtgaattaaggctttacatttgttcatcctacaaaaatttcaggtggattttaattcaacttgagtacttttgcaatatctggctctccctgcttttcagatgatcaagttgtacaggaactaggggaaggcattatgctttgaagtgtcccaacatacccttgggagggaactggccgagattataactatgaacaggtgcttaaatatttttttgccaattattttgtccacgtaaacatggatccatgtgcattggccgttagtaaacatgtgactatttggtggccttttggctgatatatgatatgtcacaattgcctcatagctttacaccttggtggttctaatgttctgtgacattacaaccatattttgttgttacgagtttactacttgcatgctacctagacctgtttctgtgggagcattcatatacttttggttaatatgtgatatgtcaatattctttatcaatacttcttctgttgtggatcttcaatatataactacattggacgaaccaaatcaccacaccgttatgttaccttttttgtgaaatttgaccttgagcttttctgttgcggctgttgggcagggtgttcaacattattcgcgacaacaaccaggtcttgctgggataggtgtaggaccattatgaggccaccacatgttcttaggaagggaacaaggaagataattttttgttacttttataaatttgtgtaaaatgtaagtttcaacataattgtgacaacatatttttaattggtagtccctcacctttttaagtgctctctgctacttcattgataaatttacaataaattaactttgaaatttgtatctccatgatgcatagacaacctgagcatgtgatgatgtttttacttgctgaaatgggaacaagtgggtcacttcatgggcatctaaggttggtgatcaaagcaagatttgcccccaaaaactttgaagcaatcctaaggagacacatcattaagttatccaatttgattgtgtccatgccgtcttttttatttgagccatacaatcacgtttcaatagagatgttgcagcttactacctcctcgcgcgtgcagcggatgctctgtgattcgatagctcacgattattctagaggacaccaaatgaactgaagataaaaatcacgtagagcagtggtgggtggcaggaagcaaccatgggttggtcaacgaacggaagcgggaagacataaagcagcacgacgacggtgagaaaggaagagcaagaacgtcgtcgccaacagtgcaatatggcgcaatcccctataattaccgttgcgtctccgcgactagaccatgtctcgcggtcagagggcgtacctcaacgaagctgcgagtgggcgccatggtgacgacgctggacaggtggtcctagagggtggcaacgtgtatgtcctcgtctcgcgaccttcgcatagttgcaaaccttccaaatgttgccgtttaaaaccgatagatagactcgcgcgcggcgcgagcaatttac

SEQ ID NO: 210605 - DNA, 1109 bp, Zea Mays
ccccatccccccatatcccttcgacccttccgccgagctcggcctcgggcggcgtcccggtctcaccgcgaccgggcggtgagaggtagaacggccaccagacatcaaccgtgaaggggtggcgtcaaggcagcgctgaagcggcggcgacgtcgaggctcgagctcccgtgccgcgctccgagctaacctagatgaacatactcgaaaggatacgtggaggtggcgacagggcggctgccacggagcgccccccgcggccggagtgctgggtggagatttcggagtccgtctcacggctctgcagcttcgacgccgccggcagcggtagccgcagcatctctgtaaaagttattcaggattctagacctatacatgacaaacttgttgattctttcttgaacaaaatttttccatcaggttatccatacagtgtgaatgaaggttacttaacttataccaaattccgtgtgctacagcatttctcgagtgctatgctacatgtgctatcaacacagtccttgctgtttgctgcaggtttgcgacctaccccggcgcaagcaactgctgtaagttggattctaaaagatggaatgcagcacgcaggaaagctcatttgtagcagcatgggtgcaagaatggattctgaaccaaagagttggaggatacttgctgatgttctctacgatctcggtactgcattggaagttgtttcgccgctgtgcccacaacttttccttgaagtagcaggcttgggaaattttgcgaagggaatggccgttgttgcagcaagagcaacgaggcttccaatttactcttctttcgccaaagaaggcaatcttagtgatttatttgctaaaggggaagccatatcaacacttttcaatgtcatgggaattggagctggaattggattggcatctactgtttgttcaacaactcaagggaagttaattgcaggcccgttactttccgcagtgcatatatggggtcatccaagagatgagagcaactcctgtaaacacactcaacccacaaagaacagcaatgatcgtggctgattttatcaaggaaggcccggcaagtgggaactggcaactggcaaggtcc

SEQ ID NO: 210606 - DNA, 1657 bp, Zea Mays
atatgatgtcagagatgctaaagtccaagcagcacgcaggaaagctcatttgtagcagcatgggtgcaagaatggattctgaaccaaagagttggaggatacttgctgatgttctctacgatctcggtactgcattggaagttgtttcgccgctgtgcccacaacttttccttgaagtagcaggcttgggaaattttgcgaagggaatggccgttgttgcagcaagagcaacgaggcttccaatttactcttctttcgccaaagaaggcaatcttagtgatttatttgctaaaggggaagccatatcaacacttttcaatgtcatgggaattggagctggaattggattggcatctactgtttgttcaacaactcaagggaagttaattgcaggcccgttactttccgcagtgcatatatggggtcatccaagagatgagagcaactcctgtaaacacactcaacccacaaagaacagcaatgatcgtggctgattttatcaaggtttggtatctctgatctattaacgcaacctttttatccagtccagctacgacagtaacatttgtctattatttactataccaataaacacgacatttttaagttgatctctacaatatatttgaggtaataatcttacttctattttatactgcttacgtctttctgtggtacatcaagtataattagttgatatatatatatataataataataataataataataataataataataataataataataataataataataataataaacagttttatggtgttgaggcctctgtttataatcttatcccgggcccctcaaaagtcagaaacggccttgatgttgttgttcatgatccgtgtgctctatgtgttgtgcccatttcctagactcctctatttgaaaatgtcgctatactaatttatttttctatttcacgtacaatatgcttatgctatagtgtcggatagggcgctactattttctagtgtcctaaaaaggccaaaaggaacaaagatttaagacattcgcactaagtaacgccaaatgtttggttgcaccatgtagcgcctaaaacaaaggctgcagcacgacaggctaaaacctgtggtaaaatgccgtagtctccatagcccggagtgaaagtgctacggtacaaggttgtctatcgttgcattcatgctacacaagcattaaaatatatttttaattagggatgatagttggaagtatatagtagttggatatatggaaaagatatagagtaacatgggtacagaagaagctggtatagagaaaaatctttttgactgaactaaaatatttttaagtatatatatagagtacactagtacacagaggctctatagtggcggttctagagctgtttgcactggtgtttttcagtgccgccagtgctacgggctagtggaaatcgccatttccactggcggttattctaaaaacgccagtgaaaatataatttccactggcggttttcttaagcaaaccgccagtggaaatactggcggtgttttttatttagccgccagtggaagttttcccgcctttttttaaattttcaatcagtactaaaatttatatatatttacacacacaaatatatatatatatattgatattgataaac

SEQ ID NO: 210607 - DNA, 2303 bp, Zea Mays
caagcaaaccgagtcgagtccacagtccacaccaccaccgcgaggtccactaaaaaaacaagagcattaccggcaccaatcaatcaggctggcagtggagtgacagcggcggcaacaccacgcccacgcggcgccggagccgatcccccgatggatctcccgccgctctcccaccaggccctcttcgccgccgtccgatccgccgacgcgcccgccgtccgcgcggtcctggccgacgccgaggcgtcggccacctccttggccgcgctcgccgccgctcagacggacgccggggaaaccgcgctgtacgttgccgcggaggccggcagcgaggaggtcgtgcgcctcctcctccctctctacgacttcgaggcagccaccgtccgctcacgccttgacctcgacgccttccatgtcgccgccaagcagggccacaccggggttgtgaaagagttcttggggcggtggccagggctttgctcagtctgtgactcttccaacactagtcccctctactcggctgctgtcaaggatcacttggatgtggtaaatgctatactggacactgatgatagctgcataaagattgtgcggaagaatgggaaaacatccctacatactgctgcaagaattggataccatcgtattgtcaaagcactcatagagagagatccaggaatcgttccgatcaatgataggaagggacaaactgcacttcacatggctgtgaagggcaaaaatacagatgtagtggaagagttattgatggctgatgtttccattctcaatgtgagggacaagaaaggaaatactgctttgcacatagctacacggaaatggaggccccagaatatctcaatgtgaaaaacatgtcgtatgtaagccatggtggtttcttagtggagcagagcatctattggaagagcaaccatatatctaagaacacacgaccatcttataaagcactataaagacattagttgctgctgctattaactgtctgccactagtcttactaagtcattgcaacggcgcaggaatgtatctggatgctaatatctcggtatcactattgtggaagtgtggctgacttctcaacacactattctagcagtccagcccaccccacataggccttaaagtattatataaatgatgcttgtgtgttaaaggaagatcaaaaatagccatccagaaactcacagaacgatgggatggtacagcttcttcttagctatgaatcacttgaagttaatgctatcaacagtcaaaatgaaacagctatggatttggctgacaaagttccttatggtgagtctaaaacggaaataatagagtggctgacagaagctggtgcaaagaatgccagaaatgttgggaaaattgatgaggcatcagaactgaggagaactgtgagcgatatcaagcacaatgttcaggcacagcttagcgagaatgctaaaaccaacaaacgagtgactgggattcgcaaagagttgcagaaactgcatagagaagctatccaaaacaccatcaattcagtcaccttggtagcgaccctgattgcctccattgccttcgtcgccatattcaatctgccaggtcaatacttccaggatgtgaatagtgggggagacattggtgaggctgaaatagccaagcttaccggtttccgtgtcttctgccttctgaacgctactgctctcttcatctccctcgcggtggtcgtggtgcagatcaccttggttgcctgggaaactggtgcccagaagcaagttatcaagatcgtgaataagctcatgtggacggcatgccttagcacgggtgtggcttttatctcgctggcctatgttgtagttggcccgcagcatgcctggatggccttcacggcatcagccatcggagggccgatcatgattggaactttcctgttcctagcctatcttctgttgcgcccacggttcaagttcggcgaagacagacagcgccgcatcaagagggcaagcggcagcaaatccttctcctggtcaatccatgatgggttttcagatctggaagccttctctgatcatgagaagaggatctatgccctgtaggagggtgtaacagtaactactcccacaagaggcaactgggagagtacaaatggttcatgtatatatttggtttagccgttttagcctagccgctgttagacctttctccccatgtacaatatctaataatgaagagctgcagctattgtaaagtgcaagtattgagcatgcttgaaagttgaaccggttgccctttgtgaattggct

SEQ ID NO: 210608 - DNA, 1552 bp, Zea Mays
aattaatgctgtccatggagcaggtttttcagggaggacctttccgtttggaaaccatgaggtagacccccctacggtctgtgttgttcccacgcagatggacctggacgtaaaaagtggaagggttttatggaattctcggggctgttgaggagctgaatcgtaggaacctgccgtgcgtggcgtcaaaaaagcactcttggtccaaccaaatacaatacaagcaagcgaccaggagggacaggaaggatcgcagcggaggagatagctagggaagggcaaatctgcagggcctgagagggtgaggtagagcgcgccagccagaatgcaggagcaggcggcgagctcgcggccttccagcagcgagaggtcgtccagctccgggcaccacgtggacatggaggtcaaggaaggcaagctagctactacctctggcatggcaccccgtgctgtggaactatcctgtgcatcttctttttggcttataagcttgagtttatcaccaatcccagttctttcattgtttttttagaacttcgttgttccaagttccaacgcttccgataggttctcgtttgcttttgtcgtgcaactgaactgctgcaagacttgtcaagcaagtctactcgagttcgagtctcgagctctctctccaagatcttgactcgtttatttggtgaactgatccagccacacctgtggtgtgattgagttgcagggatggagagcgacgatgagataaggagagtgccggagctgggcctggagttgccgggagcctccacgtcgggcagggaggctggccctggcgctgcgggcgcagaccgcgcccttgcccagtcgtccacggcgcaggccagcgcgcgccgccgcgtccgcagccacgccgacaaggagcacaagcgcctcaaaaggttactgaggaacagggtgtcagctcaacaggctagagagaggaagaaggcttatttaactgatctggaggtgaaggtgagagatctggagaagaagaactcggagatggaagagaggctctccaccctccagaacgagaaccagatgctccgacagatactgaagaacaccgctgtaaacagaagaggttcaggaagcactgctagtggagagggccacggccaatagcactgaatgacggaaaaatagtaatgaatcatgataaatatatgtttatatggagtggatttggtgagcttgctttgtggccaaaggagggaaccccaaaaactggggtcagacagccaagtgccgacggttcagggaaaaagaacttatggaattaatgcatttgattttaacatggtttacatatcatcatcttctactagttttctaaaaatgatgtttgtggatcaaggccagaccaggccgggccgagaaaatttaaggccttagccaaatctaaggtagtaaggtctatattttcattgaaaaataattaataacaatctaaacttgcaaaacattgtaatagaatatataaaaaaacatatctattcactacagtaaactgacgaatatccaacggtcacgt

SEQ ID NO: 210609 - DNA, 3586 bp, Zea Mays
aaatccggagccagtagggagtggtaggcggagcggagccgcgaggagcccgcgtgtcgcgagagagcagaggcggcggaccggcggcgtccaccgaacaggagatcttgccgtgacatcgtcccgtcgcctgttcccaccagaatcgaaggagaaacttcgtcgccgctgccgcggcatccggtcatcctcgccgcttgccaatgcaggtggagaccaccgcgagctcgcttaagatgtcgccgtgtttgaacctcagttggacctggtcaggacaaatgtgactggttgggctatatacggattgacgtacctgttgcgagttgctgctgctggactgtgattgttttgtcacgtattgaggctcatggagtcacggatggatcagtacgaaatcatggagcagattggccgtggggctttcggtgccgccatactagtcaatcacaaatctgaaaagaagaagtatgtgctgaagaaaatccgtcttgcgaggcagactgagcgctgtcggaagtctgcccatcaagagatggctctaattgctcggctgcagcacccttacattgttgaattcaaggaggcttgggttgagaagggttgttatgtctgcattgtcacgggctattgtgaaggtggagacatggatgagctgatgaagaaatcaaatggtacctactttcctgaggaggtattgcttaaatggttcgctcaattggtgttggctgtagattacttgcactcgaactatgtcttgcaccgtgatctgaaatgctccaacatatttctcaccaaagaccaggacatacgccttggttagtctctcacaacaaatacagtaatgcaagagactttggcctggcgaagactttgaaggaagatgatctaacttcatcggtggtcgggacaccaaattacatgtgcccagagctgctagctgatattccctatggtttcaagtcagacatctggtctctcggatgttgtatgtatgagatggcagctcaccgccctgccttcaaggcatttgatatggctggattaataagcaagataaatcggtcttccatgggtcctttgcctgcctgttactcagtgtctatgaaaaccctaatcaaaagtatgttgaggaagagtccagagcatcgacctactgcatctgagatcctgaagaacccgtacctacaaccttatgttaatcaataccggcccctttatgattcttcaaacccaatgcggatgccagagaaacaattacatacttcacggagcagtcagagaagcatgtctgacagccaaagcagtagcatttccagtagtgacattgacagtgcccagtcaagtgacagaagcacatcaggtggaactacaagtactgacagaaagactattgatactgcaagcattcgagatgtggatcaaggtaagtcagatgaaaatggtgcaacacctgaagatgttagaggcaacaaagacaatggtagtgttcagtttaaaaggcaagattcattgaaatgcatacatgttgatcaccatcccagaccagagagcaaacaaccaaagatcattgagaagataatgacaacccttagagaggagagcaggctgagagaaatcaactgtcctgtcagaggtggtgtaaagccgaattctggccacagcaacaataatcaagtagagcaaccattacaggtttcaaggacaaacagtgatatgccatgcagcttaaaatctggcaacattctatcccatgatgaacatgtaaatgaagttgaagcatcaccacccttgaagaaactgtcacctattgttgaacatagcccaaagatgaaaaccgctgggccatcaactcctgaacctgccaaacaaatcacagaaaatggggctgcagcttcaggaagaactaagaacaagtcaccacttcctgctagacgacctagccctcagaggcaagctggagcagggacttcaagtttcccagtcacaatgacaagacgtactcataccaagttcataacagagagagagaaaactctagagggaccatcctgtagcccggataatactcttagagatcatccacaaagtttaatgatttcttcaaatccttcagaaggacagcatatgaaactggattcttcacaagcaaatccaacaaatctttgggagcttttcaccgtttcagcgaaggaacacagcagtgcttgctcaagttctacagttggttgtactgaacctatggaccagcctgaactatctgaacctaattcacctgtctgccttgtttcaccatgtacaggctgttcaccaaacacaaccgaagaggacgacaaaagcaccataccatgttcagaaattaacactgacaagaacattgcaactaaaaatggtggttcaagcctgaggtcagatttggagccatcctttctgagttctgaacaagagtttatttccaaagaagtgcagtctagcaagcatgagaagagcaacatcacattccaaagcggtgaagataagttcactgtccaggagctgctttcatcggcaccagaagttgctcctcctgtttcatcagcaccagaagctgctcattctattccagccacaaaaggaacactattggattcacccacttctcttcagtcatggaagaaacatgtagtttctcatttaaaccctccagttgatgatgctctacagactataagacacagcactttctgtctcagtgatgagcagccaacacaaggaagtgttcaaagagaagctcagagcgctgatatgatcaaactactggatgttgtaccagaagaggctgatgcaaggagcagctcgttaaacaccctgcttccagcacgatccccatcagttactgctacatcacaagtctcagaagccaatgttgctaccaaggcactagctgcctcggacaatacaaaatcatctgctgcctcatcggggaccagcaacggagtgcaggaagaggcatcccctactaaggaagtactcgatgttacatcgtttcggcagcgtgctgaggctctcgaagggcttctggagctttcggcagagctgctggagactcaaaggctggaggagctagccattgttctcaagccgtttgggaagaacaaggtgtccccacgagaaaccgctatctggctggccagaagtttcaaagggatgatgactgacgaagcaggtcgcacgtcactatgagcacgaatttttgtctgcctgtttgtttggtttcacttgagcagagttgtgctcggagtaaatcggtgccgctaggtttggtaatagcagtgctctgagttactcaaaattgattgaattgacagcagcttgtggagttgtattcttttttatttttatttttgagaagacagtttgtggtctccgttgccacttttttttcccatttccgattgctccattcttttggcgtatgttgtacatagccaagaacttagaactgtaaacagcaataaagcttgcctccggggtgtgattcaaaaaacaaaacactgttaagctaaatgaaccttgaatgccaactactatattcgaccttccagcagag

SEQ ID NO: 210610 - DNA, 938 bp, Zea Mays
tgagtcgctgtgcattattcatcgaagagtgcttgtgatatgcttcgccgcatgcactctcaactacgcatccatggcgatcctcggctacctcatgtacggcgacgacgtcaagtcccaggtgacgctgaacctgcccgagggcaaggtcgtctcgaagctagcgatctacaccacgctgatcaaccccttctccaagtacgccctgatggtgacgccgctctcaacggcagtggaggagaagctgctcgccgccggccgcggcggcaagagtagtaggtccgtcagcgtgctggtcaggactctgctggtcgtcaccacggtcgtcgtcgcgctcgcggtgcccttcttcggccacctgatggcgctcgtcggctcgctgctcagcgtcatggcctcgatgctgctcccctgcatcttctacctcaagatctttggcgcggcgcgctgcggcagggcggaagtcgcgcttgtcgccaccattattgttctgggttccgtggttcttgcgactgggacgtacgcctctgtgaagaagattgttcaggattactgaagacgagatgtctggaaatgtcggtggcagtgtcacagtcattgttggcgttcttttgccgcgatcgacagtcccatatctcaacatcagcagattaggtgaaccaattagaaggtgttctttaaaaaatcagttagaagatgtttgtagacaaagtaaggagagacggaaggaacagtgatgtactgaaaacataatagggtgatacgcttctatattggcgtgagctactattttatcttttatcttgaggcatgtggctgagccagctcgaacctcgcaagtaggctcgagcttagttcaacttgagcctcgagcgagccgagctaagtcaggtttttgagttcgttgggggcaacaagccaagccgctctgggctgca

SEQ ID NO: 210611 - DNA, 1871 bp, Zea Mays
cacccctcgggctctgctgtgtctgtgttctgttcgcttctgctcccaccgcgtgcttgcgtggcgctgccccagcctgctagctagcctgcaacggaaggggccggataagatggcagatggtggggcggcgtcgcgcggccctcccgacggctcgccgccggccgcgctgctgctgctgcagcagcccctcctccacgcctacgaggcccgcaaggacccggcggcgtgcggccgggaggcgcacgggcacggcttcggcccggaccccgacggcgccggcttcggcggaagtccgatcttcgtgcggacctgcttcaatggcctttacggcctctccggcgtcgggctgctgtccatcccgtacgcgctgtcggagggcgggtggctgagcctggcgctgctgctcctcgtcgcggccgtctgctgctacacgggcctgctcctgcagcggtgcatggacgcgtccccagccgtgcgcgggtacccggacatcggcgccctggcgttcgggcgcggcggccgcctcgccgcgtccgcgttcctctacgccgagctctacctcgtcgccatcggcttcctcatcctggagggggacaacctggacaagctgttcccgggcaccagcctcagcctcggcctccgcggcgccgccctcgtggtctccgggaagcagctcttcgtcgtcctcgtcgccctcgtcatcctgcccaccacgtggctccggagcctcggcgtgctcgcctacgtgtccgccagcggcgtgctcgcgtcggccgtcgtcgtcgtctgcgtgctgtggaccgcgctggccgacggcgtcggcttccgggccagggggaggatgctcaacgtcagcggcctccccactgctctcggcctctacaccttctgctactgcggccatgccatcttcccaacgctctgcatctccatgaaagaaaagaaaaggttctccagggtgcttgtgatatgcttcgccgcatgcactctcaactacgcatccatggcgatcctcggctacctcatgtacggcgacgacgtcaagtcccaggtgacgctgaacctgcccgagggcaaggtcgtctcgaagctagcgatctacaccacgctgatcaaccccttctccaagtacgccctgatggtgacgccgctctcaacggcagtggaggagaagctgctcgccgccggccgcggcggcaagagtagtaggtccgtcagcgtgctggtcaggactctgctggtcgtcaccacggtcgtcgtcgcgctcgcggtgcccttcttcggccacctgatggcgctcgtcggctcgctgctcagcgtcatggcctcgatgctgctcccctgcatcttctacctcaagatctttggcgcggcgcgctgcggcagggcggaagtcgcgcttgtcgccaccattattgttctgggttccgtggttcttgcgactgggacgtacgcctctgtgaagaagattgttcaggattactgaagacgagatgtctggaaatgtcggtggcagtgtcacagtcattgttggcgttcttttgccgcgatcgacagtcccatatctcaacatcagcagattaggtgaaccaattagaaggtgttctttaaaaaatcagttagaagatgtttgtagacaaagtaaggagagacggaaggaacagtgatgtactgaaaacataatagggtgatacgcttctatattggcgtgagctactattttatcttttatcttgaggcatgtggctgagccagctcgaacctcgcaagtaggctcgagcttagttcaacttgagcctcgagcgagccgagctaagtcaggtttttgagttcgttgggggcaacaagccaagccgctctgggctgca

SEQ ID NO: 210612 - DNA, 1694 bp, Zea Mays
gttcattcataagtagctcataattaattcacaaaagctgagaagacggggggtcacacatcatacttcttttgccattgcaatggaaaacaactacgcatgcccaccacccagcaagggaaacctgatcacagtcttgagcatcgatggtggtggggtcaagggcgtcatccctgctaccttccttgcattccttgagtctaaactccaggagcttgatgggagcagcgcgcgcatagctaactactttgatgtcatcgctggcacaagcacaggtggtcttattgctgcaatgctggcagctccgtcgctgagcaatgccaagcaaccatgctatgaggccaaggacatcgtgccattctacctcgagcacagtcctcgcatcttcccatgcagaactgggattttgggctggttcttcaagatcctacaaacagttaaggtgatgatcgggccaaaatatgacgggaagtacctgcacaaagtgaccagtgatctgctgggtggtaccagagtggaagagacgctgacaaatgtcgtcattcctactttcgatgtcaagcaagatctagtgccttgatgaatgctcgtcttgctgatgtgtgcattggcacgtccgcagcaccgacggtcctccctgcgcactactttgaaaccgtggatcaccgcactggcgcatcgcgtagcttcaacgttatcgacgggggcctcgccgcaaacaatccgactctggtggcgatgggtgagataacagaacagatgaggcagaagagcaaggagttccccgagaccaagcccctggactaccacaggtatctggtagtgtcactaggcacaggccttccagagcaggacatcaagttcgacgcgtgccgtgtcgccaagtggggcatcttcggatggctcggccgccgggagaacaccgtgcccttgctgcagatgttcatgcacgcgagctcagacatgacggacagctacgtcgccgaccttttcaaagcgatcgggtgctcggaccaactgctgctgcgtgttcaggaccgcaacatacccatagcggctgtggcagctgacctctcgacggagaagaatctgcgagggctggttaagattgcagagaaccttctgcataagccactaggcgaggacgattataagaccgacgaccgcgtcgagacgacgccgagagatggccgtgccatactaacctatgctggtatgctcgcacggtttgcaaagctcctttctgatgagaggaagcttaggcttcagaacatgggacactgtatgccggtcatagcaaatcgtgaagcttgagaggtcttccgaaacacatattgatacatccatcttataggagttagagagttcgttcgtgtaggctatctgcaagctgttgtgtgtgtattgcaagttgtgacgacgacgtgagtgtgtacgtaaatggataaggcgatatggtttgctttggagccctgtacgtaaatggagaaaatgtgatgccctggcgtctggttgtctagcattctaccagctggctctccgatcctagtcacatccatccagctcctccttttcagaacgccctgtacttctcaatgatgcagcactcctagtactaaacctttaatatatcataaacacttgtttttccccctttcaatatatatatgtatgcagctaaaactatgattgtg

SEQ ID NO: 210613 - DNA, 3017 bp, Zea Mays
caaacacggagctacagccgaggacagccaggtttccgaacagacccgcaaacacggagctacagcccgagagccaggctgctcggccatggcggcaaacacactctaaactaccctgccccggtgcccccgctccacgacgccgcggcaccgcacccgcacgtagtccggacggcgagcacttgagctgagtcggccgcgcttcggctttctcgcccgagttactcggtgccgcgtcttccctctttcggcggcgtgatctgcgtctcggcgctaagatagctgtcgtctcccggctcccgcacttgcacaagaccttgagctgatcggccggccttctgcgcgacgtcaaaagtcagaccggcctgtgagcggaattttcctggcttggatccgaaagcctgtgcattggctacgacaactggtggaaagcggttggtcatcaaatcgccgctgctaaagtttctgctccctgaactcagttggatcatagagttttggttcagtgtaccatcctgaattctgccgtgaattgttggatgtgttgtttgatcccaattgcattaaaaaaaaacttctattttgggctgggggctacaactacaagagagcaacaacaagaaggctcgatcagctcgttctttttgttgaccatctctgtctggcgagtgcttgaggaagaaaacgacttgctcagctcgccttttcgttgttgatccgatcaaagactagggaaatgggggtaatgtcacgacgggttctgccggcctgcagcagcctttgctacttctgcccctctgcgggcgcgctcccggcagcctgtcaagcggtagaagaagatcatagcagatatctaccagcttccaccggatggagagccaaacgatagaagggttgggaaactctgtgattatgtctcgagaaatccaacaagcataccaaagagttcattcataagtagctcataattaattcacaaaagctgagaagacggggggtcacacatcatacttcttttgccattgcaatggaaaacaactacgcatgcccaccacccagcaagggaaacctgatcacagtcttgagcatcgatggtggtggggtcaagggcgtcatccctgctaccttccttgcattccttgagtctaaactccaggagcttgatgggagcagcgcgcgcatagctaactactttgatgtcatcgctggcacaagcacaggtggtcttattgctgcaatgctggcagctccgtcgctgagcaatgccaagcaaccatgctatgaggccaaggacatcgtgccattctacctcgagcacagtcctcgcatcttcccatgcaggtttgtatggctagctgtttaacgaatatctgtacgatttcccatctgagactgctcagttttatctatctctaaattgtttatgtacaaggtaaccagaatttcgcgttttgtctcagtatgtatgtattactatatctataaaactacatggaaaaaaaaatacttcaccttgttattcgttctgatgctgcaagaccagaactgggattttgggctggttcttcaagatcctacaaacagttaaggtgatgatcgggccaaaatatgacgggaagtacctgcacaaagtgaccagtgatctgctgggtggtaccagagtggaagagacgctgacaaatgtcgtcattcctactttcgatgtcaagtgcgtaaagccaacaatattcagcacattcaaggcaagatctagtgccttgatgaatgctcgtcttgctgatgtgtgcattggcacgtccgcagcaccgacggtcctccctgcgcactactttgaaaccgtggatcaccgcactggcgcatcgcgtagcttcaacgttatcgacgggggcctcgccgcaaacaatccggtgcttatttattgcttgcttggttatagtagtagttttttttctttcttctggctgggttttgacgactagcatgaaatcatgtgcgtattttgttatgatctttttgtccctgtccctgtcctgtcctctgatctgacagactctggtggcgatgggtgagataacagaacagatgaggcagaagagcaaggagttccccgagaccaagcccctggactaccacaggtatctggtagtgtcactaggcacaggccttccagagcaggacatcaagttcgacgcgtgccgtgtcgccaagtggggcatcttcggatggctcggccgccgggagaacaccgtgcccttgctgcagatgttcatgcacgcgagctcagacatgacggacagctacgtcgccgaccttttcaaagcgatcgggtgctcggaccaactgctgctgcgtgttcaggaccgcaacatacccatagcggctgtggcagctgacctctcgacggagaagaatctgcgagggctggttaagattgcagagaaccttctgcataagccactaggcgaggacgattataagaccgacgaccgcgtcgagacgacgccgagagatggccgtgccatactaacctatgctggtatgctcgcacggtttgcaaagctcctttctgatgagaggaagcttaggcttcagaacatgggacactgtatgccggtcatagcaaatcgtgaagcttgagaggtcttccgaaacacatattgatacatccatcttataggagttagagagttcgttcgtgtaggctatctgcaagctgttgtgtgtgtattgcaagttgtgacgacgacgtgagtgtgtacgtaaatggataaggcgatatggtttgctttggagccctgtacgtaaatggagaaaatgtgatgccctggcgtctggttgtctagcattctaccagctggctctccgatcctagtcacatccatccagctcctccttttcagaacgccctgtacttctcaatgatgcagcactcctagtactaaacctttaatatatcataaacacttgtttttccccctttcaatatatatatgtatgcagctaaaactatgattgtg

SEQ ID NO: 210614 - DNA, 3141 bp, Zea Mays
caaacacggagctacagccgaggacagccaggtttccgaacagacccgcaaacacggagctacagcccgagagccaggctgctcggccatggcggcaaacacactctaaactaccctgccccggtgcccccgctccacgacgccgcggcaccgcacccgcacgtagtccggacggcgagcacttgagctgagtcggccgcgcttcggctttctcgcccgagttactcggtgccgcgtcttccctctttcggcggcgtgatctgcgtctcggcgctaagatagctgtcgtctcccggctcccgcacttgcacaagaccttgagctgatcggccggccttctgcgcgacgtcaaaagtcagaccggcctgtgagcggaattttcctggcttggatccgaaagcctgtgcattggctacgacaactggtggaaagcggttggtcatcaaatcgccgctgctaaagtttctgctccctgaactcagttggatcatagagttttggttcagtgtaccatcctgaattctgccgtgaattgttggatgtgttgtttgatcccaattgcattaaaaaaaaacttctattttgggctgggggctacaactacaagagagcaacaacaagaaggctcgatcagctcgttctttttgttgaccatctctgtctggcgagtgcttgaggaagaaaacgacttgctcagctcgccttttcgttgttgatccgatcaaagactagggaaatgggggtaatgtcacgacgggttctgccggcctgcagcagcctttgctacttctgcccctctgcgggcgcgctcccggcagcctgtcaagcggtagaagaagatcatagcagatatctaccagcttccaccggatggagagccaaacgatagaagggttgggaaactctgtgattatgtctcgagaaatccaacaagcataccaaagatgacagcagaggactctaggttcacaccaaaggagcagagttttgagtttatcagcaatgatgttgagctgatgatttttcgagggctccgaggttccatttactcaacatctatttttttgcctcaaagaaagtaaaagctaaaataaagtagcgtttgtaaatcataaagaacatactagctttacaaggtgtgaacatttacttgcccagctatgcctcaacatgactgttgcaggataaccaagcttgtactcatatgtgatttctattagaagtaaagctaatataacacacacacacaaaaagacagggtcttgaagctgccagacatatgagcaatccctaaataaagtgtaaatgggacaagcacataaagatacttgcatagaaacaatgccgaaatcatctcggataagcttgccagcagtttagcatgctttgagtgtaaaatgtatgcgacattccttgtactactatacaaaaccaaaacttctttaccttttcagcatgagttgtcttttgtctccacgcctataaatagcgtttcacaggtcagagttcattcataagtagctcataattaattcacaaaagctgagaagacggggggtcacacatcatacttcttttgccattgcaatggaaaacaactacgcatgcccaccacccagcaagggaaacctgatcacagtcttgagcatcgatggtggtggggtcaagggcgtcatccctgctaccttccttgcattccttgagtctaaactccaggtggtcttattgctgcaatgctggcagctccgtcgctgagcaatgccaagcaaccatgctatgaggccaaggacatcgtgccattctacctcgagcacagtcctcgcatcttcccatgcagaactgggattttgggctggttcttcaagatcctacaaacagttaaggtgatgatcgggccaaaatatgacgggaagtacctgcacaaagtgaccagtgatctgctgggtggtaccagagtggaagagacgctgacaaatgtcgtcattcctactttcgatgtcaagtgcgtaaagccaacaatattcagcacattcaaggcaagatctagtgccttgatgaatgctcgtcttgctgatgtgtgcattggcacgtccgcagcaccgacggtcctccctgcgcactactttgaaaccgtggatcaccgcactggcgcatcgcgtagcttcaacgttatcgacgggggcctcgccgcaaacaatccgaacagatgaggcagaagagcaaggagttccccgagaccaagcccctggactaccacaggtatctggtagtgtcactaggcacaggccttccagagcaggacatcaagttcgacgcgtgccgtgtcgccaagtggggcatcttcggatggctcggccgccgggagaacaccgtgcccttgctgcagatgttcatgcacgcgagctcagacatgacggacagctacgtcgccgaccttttcaaagcgatcgggtgctcggaccaactgctgctgcgtgttcaggaccgcaacatacccatagcggctgtggcagctgacctctcgacggagaagaatctgcgagggctggttaagattgcagagaaccttctgcataagccactaggcgaggacgattataagaccgacgaccgcgtcgagacgacgccgagagatggccgtgccatactaacctatgctggtatgctcgcacggtttgcaaagctcctttctgatgagaggaagcttaggcttcagaacatgggacactgtatgccggtcatagcaaatcgtgaagcttgagaggtcttccgaaacacatattgatacatccatcttataggagttagagagttcgttcgtgtaggctatctgcaagctgttgtgtgtgtattgcaagttgtgacgacgacgtgagtgtgtacgtaaatggataaggcgatatggtttgctttggagccctgtacgtaaatggagaaaatgtgatgccctggcgtctggttgtctagcattctaccagctggctctccgatcctagtcacatccatccagctcctccttttcagaacgccctgtacttctcaatgatgcagcactcctagtactaaacctttaatatatcataaacacttgtttttccccctttcaatatatatatgtatgcagctaaaactatgattgtg

SEQ ID NO: 210615 - DNA, 3205 bp, Zea Mays
caaacacggagctacagccgaggacagccaggtttccgaacagacccgcaaacacggagctacagcccgagagccaggctgctcggccatggcggcaaacacactctaaactaccctgccccggtgcccccgctccacgacgccgcggcaccgcacccgcacgtagtccggacggcgagcacttgagctgagtcggccgcgcttcggctttctcgcccgagttactcggtgccgcgtcttccctctttcggcggcgtgatctgcgtctcggcgctaagatagctgtcgtctcccggctcccgcacttgcacaagaccttgagctgatcggccggccttctgcgcgacgtcaaaagtcagaccggcctgtgagcggaattttcctggcttggatccgaaagcctgtgcattggctacgacaactggtggaaagcggttggtcatcaaatcgccgctgctaaagtttctgctccctgaactcagttggatcatagagttttggttcagtgtaccatcctgaattctgccgtgaattgttggatgtgttgtttgatcccaattgcattaaaaaaaaacttctattttgggctgggggctacaactacaagagagcaacaacaagaaggctcgatcagctcgttctttttgttgaccatctctgtctggcgagtgcttgaggaagaaaacgacttgctcagctcgccttttcgttgttgatccgatcaaagactagggaaatgggggtaatgtcacgacgggttctgccggcctgcagcagcctttgctacttctgcccctctgcgggcgcgctcccggcagcctgtcaagcggtagaagaagatcatagcagatatctaccagcttccaccggatggagagccaaacgatagaagggttgggaaactctgtgattatgtctcgagaaatccaacaagcataccaaagatgacagcagaggactctaggttcacaccaaaggagcagagttttgagtttatcagcaatgatgttgagctgatgatttttcgagggctccgaggttccatttactcaacatctatttttttgcctcaaagaaagtaaaagctaaaataaagtagcgtttgtaaatcataaagaacatactagctttacaaggtgtgaacatttacttgcccagctatgcctcaacatgactgttgcaggataaccaagcttgtactcatatgtgatttctattagaagtaaagctaatataacacacacacacaaaaagacagggtcttgaagctgccagacatatgagcaatccctaaataaagtgtaaatgggacaagcacataaagatacttgcatagaaacaatgccgaaatcatctcggataagcttgccagcagtttagcatgctttgagtgtaaaatgtatgcgacattccttgtactactatacaaaaccaaaacttctttaccttttcagcatgagttgtcttttgtctccacgcctataaatagcgtttcacaggtcagagttcattcataagtagctcataattaattcacaaaagctgagaagacggggggtcacacatcatacttcttttgccattgcaatggaaaacaactacgcatgcccaccacccagcaagggaaacctgatcacagtcttgagcatcgatggtggtggggtcaagggcgtcatccctgctaccttccttgcattccttgagtctaaactccaggagcttgatgggagcagcgcgcgcatagctaactactttgatgtcatcgctggcacaagcacaggtggtcttattgctgcaatgctggcagctccgtcgctgagcaatgccaagcaaccatgctatgaggccaaggacatcgtgccattctacctcgagcacagtcctcgcatcttcccatgcagaactgggattttgggctggttcttcaagatcctacaaacagttaaggtgatgatcgggccaaaatatgacgggaagtacctgcacaaagtgaccagtgatctgctgggtggtaccagagtggaagagacgctgacaaatgtcgtcattcctactttcgatgtcaagtgcgtaaagccaacaatattcagcacattcaaggcaagatctagtgccttgatgaatgctcgtcttgctgatgtgtgcattggcacgtccgcagcaccgacggtcctccctgcgcactactttgaaaccgtggatcaccgcactggcgcatcgcgtagcttcaacgttatcgacgggggcctcgccgcaaacaatccgaacagatgaggcagaagagcaaggagttccccgagaccaagcccctggactaccacaggtatctggtagtgtcactaggcacaggccttccagagcaggacatcaagttcgacgcgtgccgtgtcgccaagtggggcatcttcggatggctcggccgccgggagaacaccgtgcccttgctgcagatgttcatgcacgcgagctcagacatgacggacagctacgtcgccgaccttttcaaagcgatcgggtgctcggaccaactgctgctgcgtgttcaggaccgcaacatacccatagcggctgtggcagctgacctctcgacggagaagaatctgcgagggctggttaagattgcagagaaccttctgcataagccactaggcgaggacgattataagaccgacgaccgcgtcgagacgacgccgagagatggccgtgccatactaacctatgctggtatgctcgcacggtttgcaaagctcctttctgatgagaggaagcttaggcttcagaacatgggacactgtatgccggtcatagcaaatcgtgaagcttgagaggtcttccgaaacacatattgatacatccatcttataggagttagagagttcgttcgtgtaggctatctgcaagctgttgtgtgtgtattgcaagttgtgacgacgacgtgagtgtgtacgtaaatggataaggcgatatggtttgctttggagccctgtacgtaaatggagaaaatgtgatgccctggcgtctggttgtctagcattctaccagctggctctccgatcctagtcacatccatccagctcctccttttcagaacgccctgtacttctcaatgatgcagcactcctagtactaaacctttaatatatcataaacacttgtttttccccctttcaatatatatatgtatgcagctaaaactatgattgtg

SEQ ID NO: 210616 - DNA, 2660 bp, Zea Mays
caaacacggagctacagccgaggacagccaggtttccgaacagacccgcaaacacggagctacagcccgagagccaggctgctcggccatggcggcaaacacactctaaactaccctgccccggtgcccccgctccacgacgccgcggcaccgcacccgcacgtagtccggacggcgagcacttgagctgagtcggccgcgcttcggctttctcgcccgagttactcggtgccgcgtcttccctctttcggcggcgtgatctgcgtctcggcgctaagatagctgtcgtctcccggctcccgcacttgcacaagaccttgagctgatcggccggccttctgcgcgacgtcaaaagtcagaccggcctgtgagcggaattttcctggcttggatccgaaagcctgtgcattggctacgacaactggtggaaagcggttggtcatcaaatcgccgctgctaaagtttctgctccctgaactcagttggatcatagagttttggttcagtgtaccatcctgaattctgccgtgaattgttggatgtgttgtttgatcccaattgcattaaaaaaaaacttctattttgggctgggggctacaactacaagagagcaacaacaagaaggctcgatcagctcgttctttttgttgaccatctctgtctggcgagtgcttgaggaagaaaacgacttgctcagctcgccttttcgttgttgatccgatcaaagactagggaaatgggggtaatgtcacgacgggttctgccggcctgcagcagcctttgctacttctgcccctctgcgggcgcgctcccggcagcctgtcaagcggtagaagaagatcatagcagatatctaccagcttccaccggatggagagccaaacgatagaagggttgggaaactctgtgattatgtctcgagaaatccaacaagcataccaaagcgtttcacaggtcagagttcattcataagtagctcataattaattcacaaaagctgagaagacggggggtcacacatcatacttcttttgccattgcaatggaaaacaactacgcatgcccaccacccagcaagggaaacctgatcacagtcttgagcatcgatggtggtggggtcaagggcgtcatccctgctaccttccttgcattccttgagtctaaactccaggagcttgatgggagcagcgcgcgcatagctaactactttgatgtcatcgctggcacaagcacaggtggtcttattgctgcaatgctggcagctccgtcgctgagcaatgccaagcaaccatgctatgaggccaaggacatcgtgccattctacctcgagcacagtcctcgcatcttcccatgcagaactgggattttgggctggttcttcaagatcctacaaacagttaaggtgatgatcgggccaaaatatgacgggaagtacctgcacaaagtgaccagtgatctgctgggtggtaccagagtggaagagacgctgacaaatgtcgtcattcctactttcgatgtcaagtgcgtaaagccaacaatattcagcacattcaaggcaagatctagtgccttgatgaatgctcgtcttgctgatgtgtgcattggcacgtccgcagcaccgacggtcctccctgcgcactactttgaaaccgtggatcaccgcactggcgcatcgcgtagcttcaacgttatcgacgggggcctcgccgcaaacaatccgaacagatgaggcagaagagcaaggagttccccgagaccaagcccctggactaccacaggtatctggtagtgtcactaggcacaggccttccagagcaggacatcaagttcgacgcgtgccgtgtcgccaagtggggcatcttcggatggctcggccgccgggagaacaccgtgcccttgctgcagatgttcatgcacgcgagctcagacatgacggacagctacgtcgccgaccttttcaaagcgatcgggtgctcggaccaactgctgctgcgtgttcaggaccgcaacatacccatagcggctgtggcagctgacctctcgacggagaagaatctgcgagggctggttaagattgcagagaaccttctgcataagccactaggcgaggacgattataagaccgacgaccgcgtcgagacgacgccgagagatggccgtgccatactaacctatgctggtatgctcgcacggtttgcaaagctcctttctgatgagaggaagcttaggcttcagaacatgggacactgtatgccggtcatagcaaatcgtgaagcttgagaggtcttccgaaacacatattgatacatccatcttataggagttagagagttcgttcgtgtaggctatctgcaagctgttgtgtgtgtattgcaagttgtgacgacgacgtgagtgtgtacgtaaatggataaggcgatatggtttgctttggagccctgtacgtaaatggagaaaatgtgatgccctggcgtctggttgtctagcattctaccagctggctctccgatcctagtcacatccatccagctcctccttttcagaacgccctgtacttctcaatgatgcagcactcctagtactaaacctttaatatatcataaacacttgtttttccccctttcaatatatatatgtatgcagctaaaactatgattgtg

SEQ ID NO: 210617 - DNA, 2655 bp, Zea Mays
caaacacggagctacagccgaggacagccaggtttccgaacagacccgcaaacacggagctacagcccgagagccaggctgctcggccatggcggcaaacacactctaaactaccctgccccggtgcccccgctccacgacgccgcggcaccgcacccgcacgtagtccggacggcgagcacttgagctgagtcggccgcgcttcggctttctcgcccgagttactcggtgccgcgtcttccctctttcggcggcgtgatctgcgtctcggcgctaagatagctgtcgtctcccggctcccgcacttgcacaagaccttgagctgatcggccggccttctgcgcgacgtcaaaagtcagaccggcctgtgagcggaattttcctggcttggatccgaaagcctgtgcattggctacgacaactggtggaaagcggttggtcatcaaatcgccgctgctaaagtttctgctccctgaactcagttggatcatagagttttggttcagtgtaccatcctgaattctgccgtgaattgttggatgtgttgtttgatcccaattgcattaaaaaaaaacttctattttgggctgggggctacaactacaagagagcaacaacaagaaggctcgatcagctcgttctttttgttgaccatctctgtctggcgagtgcttgaggaagaaaacgacttgctcagctcgccttttcgttgttgatccgatcaaagactagggaaatgggggtaatgtcacgacgggttctgccggcctgcagcagcctttgctacttctgcccctctgcgggcgcgctcccggcagcctgtcaagcggtagaagaagatcatagcagatatctaccagcttccaccggatggagagccaaacgatagaagggttgggaaactctgtgattatgtctcgagaaatccaacaagcataccaaaggtcagagttcattcataagtagctcataattaattcacaaaagctgagaagacggggggtcacacatcatacttcttttgccattgcaatggaaaacaactacgcatgcccaccacccagcaagggaaacctgatcacagtcttgagcatcgatggtggtggggtcaagggcgtcatccctgctaccttccttgcattccttgagtctaaactccaggagcttgatgggagcagcgcgcgcatagctaactactttgatgtcatcgctggcacaagcacaggtggtcttattgctgcaatgctggcagctccgtcgctgagcaatgccaagcaaccatgctatgaggccaaggacatcgtgccattctacctcgagcacagtcctcgcatcttcccatgcagaccagaactgggattttgggctggttcttcaagatcctacaaacagttaaggtgatgatcgggccaaaatatgacgggaagtacctgcacaaagtgaccagtgatctgctgggtggtaccagagtggaagagacgctgacaaatgtcgtcattcctactttcgatgtcaagtgcgtaaagccaacaatattcagcacattcaaggcaagatctagtgccttgatgaatgctcgtcttgctgatgtgtgcattggcacgtccgcagcaccgacggtcctccctgcgcactactttgaaaccgtggatcaccgcactggcgcatcgcgtagcttcaacgttatcgacgggggcctcgccgcaaacaatccgaacagatgaggcagaagagcaaggagttccccgagaccaagcccctggactaccacaggtatctggtagtgtcactaggcacaggccttccagagcaggacatcaagttcgacgcgtgccgtgtcgccaagtggggcatcttcggatggctcggccgccgggagaacaccgtgcccttgctgcagatgttcatgcacgcgagctcagacatgacggacagctacgtcgccgaccttttcaaagcgatcgggtgctcggaccaactgctgctgcgtgttcaggaccgcaacatacccatagcggctgtggcagctgacctctcgacggagaagaatctgcgagggctggttaagattgcagagaaccttctgcataagccactaggcgaggacgattataagaccgacgaccgcgtcgagacgacgccgagagatggccgtgccatactaacctatgctggtatgctcgcacggtttgcaaagctcctttctgatgagaggaagcttaggcttcagaacatgggacactgtatgccggtcatagcaaatcgtgaagcttgagaggtcttccgaaacacatattgatacatccatcttataggagttagagagttcgttcgtgtaggctatctgcaagctgttgtgtgtgtattgcaagttgtgacgacgacgtgagtgtgtacgtaaatggataaggcgatatggtttgctttggagccctgtacgtaaatggagaaaatgtgatgccctggcgtctggttgtctagcattctaccagctggctctccgatcctagtcacatccatccagctcctccttttcagaacgccctgtacttctcaatgatgcagcactcctagtactaaacctttaatatatcataaacacttgtttttccccctttcaatatatatatgtatgcagctaaaactatgattgtg

SEQ ID NO: 210618 - DNA, 2650 bp, Zea Mays
caaacacggagctacagccgaggacagccaggtttccgaacagacccgcaaacacggagctacagcccgagagccaggctgctcggccatggcggcaaacacactctaaactaccctgccccggtgcccccgctccacgacgccgcggcaccgcacccgcacgtagtccggacggcgagcacttgagctgagtcggccgcgcttcggctttctcgcccgagttactcggtgccgcgtcttccctctttcggcggcgtgatctgcgtctcggcgctaagatagctgtcgtctcccggctcccgcacttgcacaagaccttgagctgatcggccggccttctgcgcgacgtcaaaagtcagaccggcctgtgagcggaattttcctggcttggatccgaaagcctgtgcattggctacgacaactggtggaaagcggttggtcatcaaatcgccgctgctaaagtttctgctccctgaactcagttggatcatagagttttggttcagtgtaccatcctgaattctgccgtgaattgttggatgtgttgtttgatcccaattgcattaaaaaaaaacttctattttgggctgggggctacaactacaagagagcaacaacaagaaggctcgatcagctcgttctttttgttgaccatctctgtctggcgagtgcttgaggaagaaaacgacttgctcagctcgccttttcgttgttgatccgatcaaagactagggaaatgggggtaatgtcacgacgggttctgccggcctgcagcagcctttgctacttctgcccctctgcgggcgcgctcccggcagcctgtcaagcggtagaagaagatcatagcagatatctaccagcttccaccggatggagagccaaacgatagaagggttgggaaactctgtgattatgtctcgagaaatccaacaagcataccaaaggtcagagttcattcataagtagctcataattaattcacaaaagctgagaagacggggggtcacacatcatacttcttttgccattgcaatggaaaacaactacgcatgcccaccacccagcaagggaaacctgatcacagtcttgagcatcgatggtggtggggtcaagggcgtcatccctgctaccttccttgcattccttgagtctaaactccaggagcttgatgggagcagcgcgcgcatagctaactactttgatgtcatcgctggcacaagcacaggtggtcttattgctgcaatgctggcagctccgtcgctgagcaatgccaagcaaccatgctatgaggccaaggacatcgtgccattctacctcgagcacagtcctcgcatcttcccatgcagaactgggattttgggctggttcttcaagatcctacaaacagttaaggtgatgatcgggccaaaatatgacgggaagtacctgcacaaagtgaccagtgatctgctgggtggtaccagagtggaagagacgctgacaaatgtcgtcattcctactttcgatgtcaagtgcgtaaagccaacaatattcagcacattcaaggcaagatctagtgccttgatgaatgctcgtcttgctgatgtgtgcattggcacgtccgcagcaccgacggtcctccctgcgcactactttgaaaccgtggatcaccgcactggcgcatcgcgtagcttcaacgttatcgacgggggcctcgccgcaaacaatccgaacagatgaggcagaagagcaaggagttccccgagaccaagcccctggactaccacaggtatctggtagtgtcactaggcacaggccttccagagcaggacatcaagttcgacgcgtgccgtgtcgccaagtggggcatcttcggatggctcggccgccgggagaacaccgtgcccttgctgcagatgttcatgcacgcgagctcagacatgacggacagctacgtcgccgaccttttcaaagcgatcgggtgctcggaccaactgctgctgcgtgttcaggaccgcaacatacccatagcggctgtggcagctgacctctcgacggagaagaatctgcgagggctggttaagattgcagagaaccttctgcataagccactaggcgaggacgattataagaccgacgaccgcgtcgagacgacgccgagagatggccgtgccatactaacctatgctggtatgctcgcacggtttgcaaagctcctttctgatgagaggaagcttaggcttcagaacatgggacactgtatgccggtcatagcaaatcgtgaagcttgagaggtcttccgaaacacatattgatacatccatcttataggagttagagagttcgttcgtgtaggctatctgcaagctgttgtgtgtgtattgcaagttgtgacgacgacgtgagtgtgtacgtaaatggataaggcgatatggtttgctttggagccctgtacgtaaatggagaaaatgtgatgccctggcgtctggttgtctagcattctaccagctggctctccgatcctagtcacatccatccagctcctccttttcagaacgccctgtacttctcaatgatgcagcactcctagtactaaacctttaatatatcataaacacttgtttttccccctttcaatatatatatgtatgcagctaaaactatgattgtg

SEQ ID NO: 210619 - DNA, 3210 bp, Zea Mays
caaacacggagctacagccgaggacagccaggtttccgaacagacccgcaaacacggagctacagcccgagagccaggctgctcggccatggcggcaaacacactctaaactaccctgccccggtgcccccgctccacgacgccgcggcaccgcacccgcacgtagtccggacggcgagcacttgagctgagtcggccgcgcttcggctttctcgcccgagttactcggtgccgcgtcttccctctttcggcggcgtgatctgcgtctcggcgctaagatagctgtcgtctcccggctcccgcacttgcacaagaccttgagctgatcggccggccttctgcgcgacgtcaaaagtcagaccggcctgtgagcggaattttcctggcttggatccgaaagcctgtgcattggctacgacaactggtggaaagcggttggtcatcaaatcgccgctgctaaagtttctgctccctgaactcagttggatcatagagttttggttcagtgtaccatcctgaattctgccgtgaattgttggatgtgttgtttgatcccaattgcattaaaaaaaaacttctattttgggctgggggctacaactacaagagagcaacaacaagaaggctcgatcagctcgttctttttgttgaccatctctgtctggcgagtgcttgaggaagaaaacgacttgctcagctcgccttttcgttgttgatccgatcaaagactagggaaatgggggtaatgtcacgacgggttctgccggcctgcagcagcctttgctacttctgcccctctgcgggcgcgctcccggcagcctgtcaagcggtagaagaagatcatagcagatatctaccagcttccaccggatggagagccaaacgatagaagggttgggaaactctgtgattatgtctcgagaaatccaacaagcataccaaagatgacagcagaggactctaggttcacaccaaaggagcagagttttgagtttatcagcaatgatgttgagctgatgatttttcgagggctccgaggttccatttactcaacatctatttttttgcctcaaagaaagtaaaagctaaaataaagtagcgtttgtaaatcataaagaacatactagctttacaaggtgtgaacatttacttgcccagctatgcctcaacatgactgttgcaggataaccaagcttgtactcatatgtgatttctattagaagtaaagctaatataacacacacacacaaaaagacagggtcttgaagctgccagacatatgagcaatccctaaataaagtgtaaatgggacaagcacataaagatacttgcatagaaacaatgccgaaatcatctcggataagcttgccagcagtttagcatgctttgagtgtaaaatgtatgcgacattccttgtactactatacaaaaccaaaacttctttaccttttcagcatgagttgtcttttgtctccacgcctataaatagcgtttcacaggtcagagttcattcataagtagctcataattaattcacaaaagctgagaagacggggggtcacacatcatacttcttttgccattgcaatggaaaacaactacgcatgcccaccacccagcaagggaaacctgatcacagtcttgagcatcgatggtggtggggtcaagggcgtcatccctgctaccttccttgcattccttgagtctaaactccaggagcttgatgggagcagcgcgcgcatagctaactactttgatgtcatcgctggcacaagcacaggtggtcttattgctgcaatgctggcagctccgtcgctgagcaatgccaagcaaccatgctatgaggccaaggacatcgtgccattctacctcgagcacagtcctcgcatcttcccatgcagaccagaactgggattttgggctggttcttcaagatcctacaaacagttaaggtgatgatcgggccaaaatatgacgggaagtacctgcacaaagtgaccagtgatctgctgggtggtaccagagtggaagagacgctgacaaatgtcgtcattcctactttcgatgtcaagtgcgtaaagccaacaatattcagcacattcaaggcaagatctagtgccttgatgaatgctcgtcttgctgatgtgtgcattggcacgtccgcagcaccgacggtcctccctgcgcactactttgaaaccgtggatcaccgcactggcgcatcgcgtagcttcaacgttatcgacgggggcctcgccgcaaacaatccgaacagatgaggcagaagagcaaggagttccccgagaccaagcccctggactaccacaggtatctggtagtgtcactaggcacaggccttccagagcaggacatcaagttcgacgcgtgccgtgtcgccaagtggggcatcttcggatggctcggccgccgggagaacaccgtgcccttgctgcagatgttcatgcacgcgagctcagacatgacggacagctacgtcgccgaccttttcaaagcgatcgggtgctcggaccaactgctgctgcgtgttcaggaccgcaacatacccatagcggctgtggcagctgacctctcgacggagaagaatctgcgagggctggttaagattgcagagaaccttctgcataagccactaggcgaggacgattataagaccgacgaccgcgtcgagacgacgccgagagatggccgtgccatactaacctatgctggtatgctcgcacggtttgcaaagctcctttctgatgagaggaagcttaggcttcagaacatgggacactgtatgccggtcatagcaaatcgtgaagcttgagaggtcttccgaaacacatattgatacatccatcttataggagttagagagttcgttcgtgtaggctatctgcaagctgttgtgtgtgtattgcaagttgtgacgacgacgtgagtgtgtacgtaaatggataaggcgatatggtttgctttggagccctgtacgtaaatggagaaaatgtgatgccctggcgtctggttgtctagcattctaccagctggctctccgatcctagtcacatccatccagctcctccttttcagaacgccctgtacttctcaatgatgcagcactcctagtactaaacctttaatatatcataaacacttgtttttccccctttcaatatatatatgtatgcagctaaaactatgattgtg

SEQ ID NO: 210620 - DNA, 2789 bp, Zea Mays
ttttatagtggatgtctccatggtaccaaagttctagtgcatcacaaaggatactgaaatgggtgccaaagagaatggggaagagagagatgatcattcaagtgatgtggaaagagatggtaaacaagggaaggtaactgaatcagactatgaaccagctagaaattccctttcatcaccgggtgaggctaccagtaacgaagacactaaagtgaaaagagtctcaagggttccaaagaagctatcaaggaaagagtctaaagaaaacagcccacgctcagcaagaagcatttccaaaagtcaaatccacactaaactgcagtatatatcgtcaaacagtaaccagaacaaatcacccaaaacaaacaaagcggttaatggtgctaaaactgttgaaattaagaggccagagactccgaaagctccttcttgttcttcatctgagatgtctgaggaaacagatgacaaagctattgaggatagacccacagatgacaaagcaattgagggcagaatcaaggatgatagcgctgttgaaggcagagccaccaatgataaagccgttgatgacaaagcaaagaatgataaagacattgaggacggaatgaaggatgataatgccattgaatgtgaagtcactgatgataagcctattgacagcaaagtaactgatgatattaccattgagggaagagagattgaaggtaaagccattgaagaggcaaaggagattgatatattggatgaagctccaaaatctgatcagagtactggcactgatgatgaaattgttgatactgaagaaaacatagctgataatggcaactcagtttcttataaaattaacgaggaattatattcaaaaattgagaagttggagcaggagctacgtgaagttgctgccctcgaggtttctctctactctgtggtgccagagcacggttgttcatcacataagttgcatacaccagctcgccgtctatctagggtttacattcatgcatcaaaattttggtcctcagataagaaagcttcagttgcaagaaattcagtttctgggcttgtgcttgttgcaaagtcttgtggcaatgatgtttcaaggttgacattttggctatcgaacacagttgtcctgagagaaatcatcgcacaaacatttggtacttcacaacactcaagtccagttaaggttttcagctcaaatggcaatgcaaacaagcctgacaggagtttcacttcatcgcaatggaaaagtaactacaatggcaagtatgtgaaccccaatatcatgcagctgccagatgattggcagaaaactagcacattgctggatgcattggagaagattgaatcttggatcttttctcggattgttgagtctgtgtggtggcaggcaatgacaccccacatgcaaacccctgtagaagatttgtcaactccaaagatagggaggttgttagggcagtctttgggtgatcagcaacatgggagtttttctattgatctctggagaagtgcatttcaagatgcattcagcagaatctgtcctcttcgtgctggtgggcatgagtgtggatgtttaccagtcttggcaaaactggtgatggagcactgcatagcccggttagatattgctatgtttaatgccatccttcgtgaatcagagaatgagatacccactgatcctatatccgacccaattgtggactcaagagttctgccgattccagctggcaacttaagctttggatcaggcgcacagctgaagagctctgttgggaattggtccagatggttgactgatacatttggcatggatgctgctgaatctgaaaagggtggtcaagatgtggaagttaatggcgatgacagaagagacgcagccgaatcaacttgttttaagctacttaacgagttgagtgatcttctgatgctcccgaaggacatgcttctcgagaaagccattaggaaagaggtctgcccttccattggccttccactagtaacaagaatactctgtaacttcactccggacgagttctgccctgatcctgttcctggcatggttctagaggagctgaattctgagagcttgctggatcgatccacagagatagacatggtgagcacgttcccagtgaccgctgctccagtggtgtactgggcccctacgctggaggacgttagggagaaagtggctgacacggcatgtggcaacccagagctggaccggaggggttcaatggtgcagaggaggggctacaccagcgatgacgatctggatgccctggagttcccgctggcgtccctgtacgacaagagcaaccccccgtccccgtgcaacaatggcgtcgcccatttcagcactcggcaggtagcctccatggagaacgtgaggcacgagctcctgcgagaagtatggtgcgagcggctatgatctcgataaatacggcctgtggagcctttttgatctatgtgaacagtggaaatggtgggaaagacgtgaagaaactgcaatcgaaaagcgatgacaaaaatgctattcaattcttcgtgtatatccatccgttccttgtcagcccgtgcattggttgtttccccttttttatatgatatagtagaactgtattgtacagtggctatgaatgaatgtgatgtgatcatgaaagattgggagacatagcatcattttaaccttcattattatacccgtcctcccattttttaccttttttcaaaaggaatattgtgtcagtccttgtgccctgaaagtgatggatcgatttctt

SEQ ID NO: 210621 - DNA, 4121 bp, Zea Mays
aatatatttttccacgcagtcactccaaatattttcccacgcagtcttaagactttaatccgaagcgcacagtatttttccacgcagaaaccttccagaaacgagcggaaaagcgtcccccaacccagcacacgctgacgacacaccggcgaggcagacaggcagatcagccgcacctccccagtcccccttccccacctacgacgaccgccgcggacgaatcaaaaaagcttcctcctcccggcgtcgcctccgcgcgtggaggcgacgatccattccgccccccgtaggattttgctcctcccgatccggacgtcagatctcgagtggcggcacgcggatctgggggtttctctagaggcggcggcggcggccggaacaggggcagatggcgctctcggggatgcgggggctctcggtcttcatcagcgacatacgcaactgccacaacaaggagcaggagcgcctccgcgtcgacaaggagctcggcaacatccgcacgcggttcaaaaacgagaagggcttatcaccatacgagaagaaaaaatatgtatggaaaatgctttacatttatatgctgggttatgatgttgattttgggcatatggaaactgtctcgttgatatctgcaccaaagtatcctgagaagcaggttgggtatattgtgacatcttgcttactgaatgagaataatgatttcttaagaatggtaataaatacagtaaggaatgacataatcggacgaaatgagaccttccagtgcttagcattgacaatggtaggtaacattggtggtaaagaattttctgagtcactagccccagatgtccagaaacttcttatttcaagcagttgccgtcctgttgtcagaaagaaggctgctctatgccttctgcggctttataggaagaatcctgatgttgtgaatattgatggctgggctgaccgaatggcacaacttctagatgagcgtgatttaggtgtgctgacatctgtcacgagtctttttgtttcactagtatccaacaatgttgaagcatattggaattgtcttcctaaatgtgtgagaatattggagaggttagcaagaaatcaagatattccacaagagtacacttactatggaattccatctccttggcttcaggttaagacaatgagagctcttcagtacttccctaccattgaagatcccaacgcaagacgagctttgtttgaggttttacagcgcattttgatgggtactgatgttgttaaaaacgttaacaagaacaatgcctcacatgctgttctctttgaagctcttgctctggtcatgcatctggatgctgaaaaggagatgatgtcacagtgtgtggctcttcttgggaagtttattgcagtccgggagccaaacattcggtaccttggtctggaaaacatgactaggatgctgttagtaacagatgtgcaggatatcattaaaaggcaccaggctcagatcatcacatctttgaaggatccagatatcagcattaggagaagggctcttgatttattatatggcatgtgtgatgttacaaacgcgaaggaaattgtggaggagttgttgcagtaccttgatacagcagaatttgcaatgcgtgaagagttgtctctgaaggcagctattcttgcagaaaaatttgctccgcaactattgtggtatgttgatgttattcttcaacttatagacaaagctggagattttgtaagtgatgatatatggtatcgagtggtacaatttgttacgaacaacgaagacctacagtcatacgctgcaactaaagcgagagaatatcttgacaagcctgctttacatgagacgatggtcaaggtgagtgcctaccttcttggggagtatggacatcttttggcccggagacctggctgtagccctaaggaattgtttgctattataaatgataaacttcctacagtatcggcaagtactgtagctattcttctctcaacctatgccaagatattgatgcacactcaacctcctgatgttggactgcaacaacaaatcctcacaatatttaaaaagtacgagagctatattgatgttgaaatacaacagagagcagttgaatattttgaactaagcaggaaaggtcctgctttggcagatgtgttggctgaaatgccaaaattccctgaacgtgagtctgcactgttgaagaaggctgaagacgctgaaattgacacagcagagcaaagtgccataaagctacgcagtcagcaacaaacatctagtgctcttgttgtagctgatcacccccctgcaaatggatttgcaccaccagttaataatctcactcttgtgaagatgccaagtcaaactgtttctgacactcaggagagtggagtaagttatgaagaagctcctaagcctcctgttgaagctcccaaagaaaatgggactcctgtcgaagtgcagaacagggacacaaacattactgaaatcaacaatgagattaaagctgaacctccctctacatcccattctacctctcccggagacctcctcctggcagatcttttgggtcctcttgcgatagaaggccctcctgctgtagagcaaaatcctgcccaaggattgaatgctaatcaaagtccagctggtgacttggcacttgctacccttgatgatcagtccaactcagttcagccaattgtcaacgtcgaggagaagtttcatattttgtgcacaaaagatagtggggtgctgtacgaggatccttacatccagattggcttgaaagcggagtggcgtgcccatcatggccgtcttgttcttttcctgggtaacaaaaatacttcagcccttacgtcagtgcgggcgctgattttgcctcctagtcatttgaaaatggaactttcgtcagttcctgatactattcctccaagagcgcaggtgcaagttccccttgaggttgcgaatctccttgcaagtagagatgttgcggttctagatttctcgtatgcttttgggacttcactggtggatgccaaacttcgactccctgttgtattgaataaatttttgcagactataactcttacccctgaagaatttttctcccagtggaaagcgcttactgttcattcgctgaaggttcaagaagtggttaaaggtgtgaaacccatgcctctttctgagatggctaatcttttcatgagccttcacttggcggtcgctcctggacttgataacaacccgaacaatctggttgcatgcacgacattcttttctgaagcaacacgtgccatgctttgtctgatacgagttgaaacagatccacaagacaggacccaactgcggctaacagttgcctcgggcgaccaatatttgacattcgagttgaaagagttcatcaaagaacatctggttgatatcccaaggactcaggtcgccccacctcgcgcagcagtccagccacagttgcctactacagcacctgccacatacaatgaccctggtaccatgcttgctggattgctatgagaagtaacccgaaggaatagtgttttgatgtacatgacagttatttaatacgaggatctaacatctccacaagcatcttgctgccaagacgtacacgtggagcaaccaagaaagagctggcggagtgtagtctccatgaggattctaaaccgagaaagagcttagattctttttgtgcggtttgaaggccccctccctctccatgtagcagttgccgtattgtgtaagcgtaacttgttgtttctcattattatcatccccttttggtccatttgtataacctgtatcgcccatgtctggtggtggacaatcggtagtttttgtgtgttaatataaggtgctaggttttcccaccatgccgattgtaaagttgccctggtgcgcattgcactgcgatttgtacggaatagggaaggaaaaatttataggttttgctttgtgcatgttctatggtttgcatagctcccatctcttgatttcctttttcttctgctgctatgtggtggtgtgtgatggttcacgaggctcgattgtataatgtaacctggttggaaccggtgctccttttcttttggagttcccaattcatgga

SEQ ID NO: 210622 - DNA, 3642 bp, Zea Mays
cacgcttcatcatcgacagcttcgcctcgctgcctcactctcggccctggtgttctctgcccactaccgcctgagcctgaagcaccggttcctcacgacggagtaagggcttatcaccatacgagaagaaaaaatatgtatggaaaatgctttacatttatatgctgggttatgatgttgattttgggcatatggaaactgtctcgttgatatctgcaccaaagtatcctgagaagcaggttgggtatattgtgacatcttgcttactgaatgagaataatgatttcttaagaatggtaataaatacagtaaggaatgacataatcggacgaaatgagaccttccagtgcttagcattgacaatggtaggtaacattggtggtaaagaattttctgagtcactagccccagatgtccagaaacttcttatttcaagcagttgccgtcctgttgtcagaaagaaggctgctctatgccttctgcggctttataggaagaatcctgatgttgtgaatattgatggctgggctgaccgaatggcacaacttctagatgagcgtgatttaggtgtgctgacatctgtcacgagtctttttgtttcactagtatccaacaatgttgaagcatattggaattgtcttcctaaatgtgtgagaatattggagaggttagcaagaaatcaagatattccacaagagtacacttactatggaattccatctccttggcttcaggttaagacaatgagagctcttcagtacttccctaccattgaagatcccaacgcaagacgagctttgtttgaggttttacagcgcattttgatgggtactgatgttgttaaaaacgttaacaagaacaatgcctcacatgctgttctctttgaagctcttgctctggtcatgcatctggatgctgaaaaggagatgatgtcacagtgtgtggctcttcttgggaagtttattgcagtccgggagccaaacattcggtaccttggtctggaaaacatgactaggatgctgttagtaacagatgtgcaggatatcattaaaaggcaccaggctcagatcatcacatctttgaaggatccagatatcagcattaggagaagggctcttgatttattatatggcatgtgtgatgttacaaacgcgaaggaaattgtggaggagttgttgcagtaccttgatacagcagaatttgcaatgcgtgaagagttgtctctgaaggcagctattcttgcagaaaaatttgctccgcaactattgtggtatgttgatgttattcttcaacttatagacaaagctggagattttgtaagtgatgatatatggtatcgagtggtacaatttgttacgaacaacgaagacctacagtcatacgctgcaactaaagcgagagaatatcttgacaagcctgctttacatgagacgatggtcaaggtgagtgcctaccttcttggggagtatggacatcttttggcccggagacctggctgtagccctaaggaattgtttgctattataaatgataaacttcctacagtatcggcaagtactgtagctattcttctctcaacctatgccaagatattgatgcacactcaacctcctgatgttggactgcaacaacaaatcctcacaatatttaaaaagtacgagagctatattgatgttgaaatacaacagagagcagttgaatattttgaactaagcaggaaaggtcctgctttggcagatgtgttggctgaaatgccaaaattccctgaacgtgagtctgcactgttgaagaaggctgaagacgctgaaattgacacagcagagcaaagtgccataaagctacgcagtcagcaacaaacatctagtgctcttgttgtagctgatcacccccctgcaaatggatttgcaccaccagttaataatctcactcttgtgaagatgccaagtcaaactgtttctgacactcaggagagtggagtaagttatgaagaagctcctaagcctcctgttgaagctcccaaagaaaatgggactcctgtcgaagtgcagaacagggacacaaacattactgaaatcaacaatgagattaaagctgaacctccctctacatcccattctacctctcccggagacctcctcctggcagatcttttgggtcctcttgcgatagaaggccctcctgctgtagagcaaaatcctgcccaaggattgaatgctaatcaaagtccagctggtgacttggcacttgctacccttgatgatcagtccaactcagttcagccaattgtcaacgtcgaggagaagtttcatattttgtgcacaaaagatagtggggtgctgtacgaggatccttacatccagattggcttgaaagcggagtggcgtgcccatcatggccgtcttgttcttttcctgggtaacaaaaatacttcagcccttacgtcagtgcgggcgctgattttgcctcctagtcatttgaaaatggaactttcgtcagttcctgatactattcctccaagagcgcaggtgcaagttccccttgaggttgcgaatctccttgcaagtagagatgttgcggttctagatttctcgtatgcttttgggacttcactggtggatgccaaacttcgactccctgttgtattgaataaatttttgcagactataactcttacccctgaagaatttttctcccagtggaaagcgcttactgttcattcgctgaaggttcaagaagtggttaaaggtgtgaaacccatgcctctttctgagatggctaatcttttcatgagccttcacttggcggtcgctcctggacttgataacaacccgaacaatctggttgcatgcacgacattcttttctgaagcaacacgtgccatgctttgtctgatacgagttgaaacagatccacaagacaggacccaactgcggctaacagttgcctcgggcgaccaatatttgacattcgagttgaaagagttcatcaaagaacatctggttgatatcccaaggactcaggtcgccccacctcgcgcagcagtccagccacagttgcctactacagcacctgccacatacaatgaccctgttatttaatacgaggatctaacatctccacaagcatcttgctgccaagacgtacacgtggagcaaccaagaaagagctggcggagtgtagtctccatgaggattctaaaccgagaaagagcttagattctttttgtgcggtttgaaggccccctccctctccatgtagcagttgccgtattgtgtaagcgtaacttgttgtttctcattattatcatccccttttggtccatttgtataacctgtatcgcccatgtctggtggtggacaatcggtagtttttgtgtgttaatataaggtgctaggttttcccaccatgccgattgtaaagttgccctggtgcgcattgcactgcgatttgtacggaatagggaaggaaaaatttataggttttgctttgtgcatgttctatggtttgcatagctcccatctcttgatttcctttttcttctgctgctatgtggtggtgtgtgatggttcacgaggctcgattgtataatgtaacctggttggaaccggtgctccttttcttttggagttcccaattcatgga

SEQ ID NO: 210623 - DNA, 3347 bp, Zea Mays
ctggaatcccaaccaaagaggtaggtaacattggtggtaaagaattttctgagtcactagccccagatgtccagaaacttcttatttcaagcagttgccgtcctgttgtcagaaagaaggctgctctatgccttctgcggctttataggaagaatcctgatgttgtgaatattgatggctgggctgaccgaatggcacaacttctagatgagcgtgatttaggtgtgctgacatctgtcacgagtctttttgtttcactagtatccaacaatgttgaagcatattggaattgtcttcctaaatgtgtgagaatattggagaggttagcaagaaatcaagatattccacaagagtacacttactatggaattccatctccttggcttcaggttaagacaatgagagctcttcagtacttccctaccattgaagatcccaacgcaagacgagctttgtttgaggttttacagcgcattttgatgggtactgatgttgttaaaaacgttaacaagaacaatgcctcacatgctgttctctttgaagctcttgctctggtcatgcatctggatgctgaaaaggagatgatgtcacagtgtgtggctcttcttgggaagtttattgcagtccgggagccaaacattcggtaccttggtctggaaaacatgactaggatgctgttagtaacagatgtgcaggatatcattaaaaggcaccaggctcagatcatcacatctttgaaggatccagatatcagcattaggagaagggctcttgatttattatatggcatgtgtgatgttacaaacgcgaaggaaattgtggaggagttgttgcagaatttgcaatgcgtgaagagttgtctctgaaggcagctattcttgcagaaaaatttgctccgcaactattgtggtatgttgatgttattcttcaacttatagacaaagctggagattttgtaagtgatgatatatggtatcgagtggtacaatttgttacgaacaacgaagacctacagtcatacgctgcaactaaagcgagagaatatcttgacaagcctgctttacatgagacgatggtcaaggtgagtgcctaccttcttggggagtatggacatcttttggcccggagacctggctgtagccctaaggaattgtttgctattataaatgataaacttcctacagtatcggcaagtactgtagctattcttctctcaacctatgccaagatattgatgcacactcaacctcctgatgttggactgcaacaacaaatcctcacaatatttaaaaagtacgagagctatattgatgttgaaatacaacagagagcagttgaatattttgaactaagcaggaaaggtcctgctttggcagatgtgttggctgaaatgccaaaattccctgaacgtgagtctgcactgttgaagaaggctgaagacgctgaaattgacacagcagagcaaagtgccataaagctacgcagtcagcaacaaacatctagtgctcttgttgtagctgatcacccccctgcaaatggatttgcaccaccagttaataatctcactcttgtgaagatgccaagtcaaactgtttctgacactcaggagagtggagtaagttatgaagaagctcctaagcctcctgttgaagctcccaaagaaaatgggactcctgtcgaagtgcagaacagggacacaaacattactgaaatcaacaatgagattaaagctgaacctccctctacatcccattctacctctcccggagacctcctcctggcagatcttttgggtcctcttgcgatagaaggccctcctgctgtagagcaaaatcctgcccaaggattgaatgctaatcaaagtccagctggtgacttggcacttgctacccttgatgatcagtccaactcagttcagccaattgtcaacgtcgaggagaagtttcatattttgtgcacaaaagatagtggggtgctgtacgaggatccttacatccagattggcttgaaagcggagtggcgtgcccatcatggccgtcttgttcttttcctgggtaacaaaaatacttcagcccttacgtcagtgcgggcgctgattttgcctcctagtcatttgaaaatggaactttcgtcagttcctgatactattcctccaagagcgcaggtgcaagttccccttgaggttgcgaatctccttgcaagtagagatgttgcggttctagatttctcgtatgcttttgggacttcactggtggatgccaaacttcgactccctgttgtattgaataaatttttgcagactataactcttacccctgaagaatttttctcccagtggaaagcgcttactgttcattcgctgaaggttcaagaagtggttaaaggtgtgaaacccatgcctctttctgagatggctaatcttttcatgagccttcacttggcggtcgctcctggacttgataacaacccgaacaatctggttgcatgcacgacattcttttctgaagcaacacgtgccatgctttgtctgatacgagttgaaacagatccacaagacaggacccaactgcggctaacagttgcctcgggcgaccaatatttgacattcgagttgaaagagttcatcaaagaacatctggttgatatcccaaggactcaggtcgccccacctcgcgcagcagtccagccacagttgcctactacagcacctgccacatacaatgaccctggtaccatgcttgctggattgctatgagaagtaacccgaaggaatagtgttttgatgtacatgacagttatttaatacgaggatctaacatctccacaagcatcttgctgccaagacgtacacgtggagcaaccaagaaagagctggcggagtgtagtctccatgaggattctaaaccgagaaagagcttagattctttttgtgcggtttgaaggccccctccctctccatgtagcagttgccgtattgtgtaagcgtaacttgttgtttctcattattatcatccccttttggtccatttgtataacctgtatcgcccatgtctggtggtggacaatcggtagtttttgtgtgttaatataaggtgctaggttttcccaccatgccgattgtaaagttgccctggtgcgcattgcactgcgatttgtacggaatagggaaggaaaaatttataggttttgctttgtgcatgttctatggtttgcatagctcccatctcttgatttcctttttcttctgctgctatgtggtggtgtgtgatggttcacgaggctcgattgtataatgtaacctggttggaaccggtgctccttttcttttggagttcccaattcatgga

SEQ ID NO: 210624 - DNA, 441 bp, Zea Mays
ttctttctaggaggaaagcttcaggctaaggagttccttggtgcttccggtgacaagcgaaaggaagtcatctgcagtatggaggaggcagataagctcagtggttctgctgcaaggctaaggagttccttggtgcttccggtgattctctttctgttgtaaagcagctatcctgcgagtgcctctacacattgaggagtcctgccttcactcgttgaggagtcttgccgagcaacattgttaagttcagttatctgaattcagttggatcatggctgtcgataaacattttagtataatggatattgtagtcctcctgcgagcagtttctcttcgtgcatggagcgtctttgcttgtgagttgataaacattttagtataatggaggatactaatttcatggttgcactttgtggttgttttctatcatttgtttgtgag

SEQ ID NO: 210625 - DNA, 676 bp, Zea Mays
atcgaacgaaagggcataagcccgtggatcatgtgaaagggctacgtctcaatctctcaggcatccgcaccgccgtgctgcttacagggaggtggcgctcgctgggaggcggcagcgcgacgctcgcaaggaggcaacgcgatacctgtaggcggcctcgttgagacgttgtccctatcgtggaggtcttcctctcgacccagcagccgtagcccagctgtagcccaactcagatctctgctgtaacgtcatccaataggctaaggagttccttggtgcttccggtgacaagcgaaaggaagtcatctgcagtatggaggaggcagataagctcagtggttctgctgcaaggctaaggagttccttggtgcttccggtgattctctttctgttgtaaagcagctatcctgcgagtgcctctacacattgaggagtcctgccttcactcgttgaggagtcttgccgagcaacattgttaagttcagttatctgaattcagttggatcatggctgtcgataaacattttagtataatggatattgtagtcctcctgcgagcagtttctcttcgtgcatggagcgtctttgcttgtgagttgataaacattttagtataatggaggatactaatttcatggttgcactttgtggttgttttctatcatttgtttgtgag

SEQ ID NO: 210626 - DNA, 584 bp, Zea Mays
atcgaacgaaagggcataagcccgtggatcatgtgaaagggctacgtctcaatctctcaggcatccgcaccgccgtgctgcttacagggaggtggcgctcgctgggaggcggcagcgcgacgctcgcaaggaggcaacgcgatacctgtaggcggcctcgttgagacgttgtccctatcgtggaggtcttcctctcgacccagcagccgtagcccagctgtagcccaactcagatctctgctgtaacgtcatccaataggctaaggagttccttggtgcttccggtgattctctttctgttgtaaagcagctatcctgcgagtgcctctacacattgaggagtcctgccttcactcgttgaggagtcttgccgagcaacattgttaagttcagttatctgaattcagttggatcatggctgtcgataaacattttagtataatggatattgtagtcctcctgcgagcagtttctcttcgtgcatggagcgtctttgcttgtgagttgataaacattttagtataatggaggatactaatttcatggttgcactttgtggttgttttctatcatttgtttgtgag

SEQ ID NO: 210627 - DNA, 3092 bp, Zea Mays
ggcgtagtctggttgcttctagaggatggcgggatccgaaatctgtgaccctccgcgtcatctgaaccctagggccacggcccgccaccagtagctcgctcggctccagatcccgcgccacaccacatagcatggcagaagatacagcgtagcaaggtccggacgttcaccagagggcagtggggatggggatggggccggcccgcgtgcgctctccgtgcgggaggcctcggcggcggtgccgctcccgcacccatcggcggcggctgcgctcgaccttaggcggcggggcggccaggctggcgctgtgacctgaaacggtggcgggatggggaggaggaaggagcacctagagagagtccgagtggaggcgtactgctgggacgtgttcaagccagtggagatggtggagatcgacagcatggagaagcttgacgacgcgttcaggatggcaagttggtgtcagaaatgcatctacctaatgcccagaatggagaagatagcaggacaatatcctgggttactcagaccttactcctgcccctctctcctgtttattctattatctggctccatttgtgcagcacaaaacttagcactttgtttcattttggaatattcttgcttttagtttctgatttaattgtagcttcttgctaagtgattgacattatctggttcttattcatttcaagttgttctttcaaaaaaattggaataaaagtcattttggaatcgtgtggttctattgctgctagcttagtaaggtaaaatagcctgacctcgtcaacaattagttctttttaggagaaaaagatgcaacaaatgaggattgatgcttcccgcaagagtacatgatgtacaatatatatctttagatggtttcattgttgtagctgatactaagaatgtagcttttttctttattcaaggtggtcgcagcgatctgtgattgtttatgcccaaagcgtagggttacccgtcttgttagcgctaccttagtgccgcttttttgaaccctagacatctcagaagaggggaagcactcggagatgaagctgaagcagagcaaacgtgagacgcaccgtgggcattctctatccaaggggaaggtgtgacctcaggcctcttctgtgcgatgcattactcttaatccgtgtttgcgttggttgctttgaattaattgtcatgtgcttatttgttagcagccaaacaaaaaatcgctcaagttatgataacccgactattccttgacctattatacctgtttccttataacttcttatgattgcacatcataattacttgagaacatatatttgtgaattgctttggtgtccccaacaaactattgtatgttccataacactatagacgtacaaatagtaattggaattgtttctgtacagagtaataatgaacatgcattggataaacagtaggaaacaaaagaagggcaacatcattactctgatcctcgacttacatttctatttgtttttccttcgtacagtacattccctgtcatttgtttgaatgatatgtcaagctttgaattctccaaatcatgcacaatcataagaaacacgtgcagcttattaggccacaattttccatgctttttgatcagtactgaaccccataaatggagactacattgtgtttgacaaaaaacatgcatctttaagtgtcgtgataattttttccacaaatcaacaaccataacccaaaataatgtatcactaatatttaaagctgctacttctagttttctctagaaacctttatgcgtattttgtggacttgctcctactaaggttttgctatttgcaaatttatatagatcagtctcaccattcaaaaagtgcttggatgaaagggaaaaagttaccattcaaaaagtgcttggatgaaagggaaaaagtttggatgaaggcattggtctataaatttttagaaagtccaatatgtgctaaatcctatgtattcgacattgtgtgtcctaatctccccttatcaaaaatagcatagagaaaaaaagaataagtgcaacacaaatgcacaaaaaacagtcaatgtttcggtaaaaatatgctttacactttgacagaaaaaagaggaatatagaataagtagcataaacaagatacatcaaaaataataatgagagtacaataaaaaatgtaggtatcaagatatggatcccaccttgtgaccaaacttacttttattttggctttacagtttgatctatggaatgctaagttcttttgcttgccaactttgctcactcaagcaacttctttctttaaagttatcctattattcatgatttttatttggatgttttggaccttttcttcaaacattagcgagatgcagtgctagtgttgttaatatacctacttgcaggttgctcttttcttatattatttccctatgtgtcgtgctacattataaatatcaagtaattttaatggtacttcttttctatatcttgttctccccacaattttatgttctacatgagtggagagatcatatagctcatgagaaagatgagggtactggttagtggttgtatactgccaaataaagcttgaatcgagataggtgttgttgtttttttctttatatcctgttataatggtgcaaaattggatctacaactttgctagctcccccccccccccccccaaaaaaataaagcagatacctacagatgttggacattgtaaaagaattgtaaaatcaaaatatccatatgttgagaacaatgttgtcgtaatcgcttaccttacactgttcgtactgcaattgattattcttatgcctttaaagaagtagctgaagaactaaagaaggaacggttaggacatgtttgttaggatgaacttatgttgagttcattccactctttgaaatcttaagaaatgtgctaagtctagcaccattgcttgcttaagctcttggtgcacgttactttaatgctaaatttgatctgatactcatgtactcatgtctctgtaacgactactctgcatatacacatgttcatgatacaatatcaagttatacatgcttataacaag

SEQ ID NO: 210628 - DNA, 920 bp, Zea Mays
gtacacattctggtggctttatgatgaaaagcagcagcagcagcaggtagcatagcatagatatgacggcggcggaggtggaggccgccaaggacatcgccgaggagaaggccgtcgtgccgttgccaccgtcgcccgccaagccggccgacgacgactccaaggccatcgtcgctcttgtcgtcaaggacgctgctgctgggaaaccttctacagctattattggaggctcaactgaaagagatgcttacctcgccaagatcgtgtccgagaagaggctgagtctgatcaccgcctgggaggagagccagaaggcgagagccgacaacagggctgccaagaagcttgccttcatcacgtcctgggagaacgccaagaaagcggagatggaggcggagctcagaaagatcgaggagcaactgcagaagaagaaggcggcgtacgaggagaagctcaagaacaagctggcgatgctgcacaggacggcggaggagaggagggcgcagacggaggccaggcgcggcgaggagaccatcctggcggaggagatggccgccaagtaccgcgccaagggcgagggccccaccaagctctttggcctcttgaaagcgtgacctctgctatggagaatgccctgtttcgtgcgtgtattaatttcgtattctcaacaagtgcacttggtgtgtgtgctgtttgttattttctctcttgtattccaaggcttgcttgacaatatctgttgtattgtatttgtataggagtgcagtgcagtgcagtgctattctttcttctcgcttctcttttgatgattggcaaccgccttcttctctgctgcattttcttcgtttgatggacggaaacaaaacgtactctctcgacacacaccctgtttctccacgctggaatctgattgtataggt

SEQ ID NO: 210629 - DNA, 985 bp, Zea Mays
gagagtgccagtttttgcttggcaacataacattatggccttatctagcctctatgaagcaactgtttaaactggcaatgttgtgcgactgatctagaagcaaagcgttccaaaacaaataagtccagtaataataaaggcagtctaagaacagaggttgaaactgactcaagaagtgctggcaaggctgttagtaaaaacattccagcagcagagccaccaaaacaagattatatccatgtcagggcaaggaggggtcaagcaactgatagtcatagtcttgcagagagggcacgtcgtgagaaaataagtgaacgaatgaaagttctccaagatcttgtgcctggatgcaacaaggttattggcaaagcatcagtacttgatgagataattaattacatccagtcgttgcaatgtcaagttgagttcctgtccatgaaactagaggcagtgaatgcccaggcaaaccagggagttgaagtatttccagccaaagattacggttctcagacatacaacacagctcctgggctgacatttgatacgcaaaccagtagagaatacgcccagggcacgtcgacctcggaatggcttcacatgcagattggcagtggctatgaaagggtttcatgaacgagatgaatccaggcagccgctaaataaagtgaaccatgatcaatcatggccgtgcttgtagatcattctttttcattttttttgaaaccatcatgttccagacgcattttttattcatgcttggagctgtaattccagccggaacatgtatttttgatgaggcgctcatttgtttccccatctgaatctcaagactgtttctgctgttcatgtattccatggaatttctgtagatcgcgttcgtctgtcagaaggatgaataaatcagttgatgctttgattttgaatccattcaggaccatccttcaggccgcacgagttttggattcagaaactttgaccatgccca

SEQ ID NO: 210630 - DNA, 986 bp, Zea Mays
agttttcaaggcaaaatgatagcttcacggtttaatatggaactgagcatgccggtgtgatctgtttacctgtaccgctgacctcagtactgatctagaagcaaagcgttccaaaacaaataagtccagtaataataaaggcagtctaagaacagaggttgaaactgactcaagaagtgctggcaaggctgttagtaaaaacattccagcagcagagccaccaaaacaagattatatccatgtcagggcaaggaggggtcaagcaactgatagtcatagtcttgcagagagggcacgtcgtgagaaaataagtgaacgaatgaaagttctccaagatcttgtgcctggatgcaacaaggttattggcaaagcatcagtacttgatgagataattaattacatccagtcgttgcaatgtcaagttgagttcctgtccatgaaactagaggcagtgaatgcccaggcaaaccagggagttgaagtatttccagccaaagattacggttctcagacatacaacacagctcctgggctgacatttgatacgcaaaccagtagagaatacgcccagggcacgtcgacctcggaatggcttcacatgcagattggcagtggctatgaaagggtttcatgaacgagatgaatccaggcagccgctaaataaagtgaaccatgatcaatcatggccgtgcttgtagatcattctttttcattttttttgaaaccatcatgttccagacgcattttttattcatgcttggagctgtaattccagccggaacatgtatttttgatgaggcgctcatttgtttccccatctgaatctcaagactgtttctgctgttcatgtattccatggaatttctgtagatcgcgttcgtctgtcagaaggatgaataaatcagttgatgctttgattttgaatccattcaggaccatccttcaggccgcacgagttttggattcagaaactttgaccatgccca

SEQ ID NO: 210631 - DNA, 2761 bp, Zea Mays
attttgaggtgcaccagctcacagtcgtcggtctgtcaggtgtttgtaggatctcctaggtgagcccctgctgcttggagacagccatggccaccggcgtggctccagctcctctcccacatgtcagagtgcatcatgggggcgtcgggttcaccaggagcgtcgattttgcgaaggtcttgtctgctcccggtgccggcacgatgagggcaagctcctctagaggcagggcgctcgtggcgaagagctctagtactggctcggagaccatggagctcgagccatcttcagaaggaagcccacttttagtacccaggcagaagtactgtgaatcaacacaccagacaaggaggaggaaaactcgaactgtgatggtggggaatgtgccacttggcagtgatcatcccataaggattcaaaccatgacgacttcagataccaaggatgttgcaaaaacagtagaggaggtgatgaggatagcagataaaggagctgatcttgttagaataacagtccagggtaggaaggaagctgatgcctgctttgagatcaagaacactctggttcagaagaattacaacattccactagtggccgatattcattttgctcctacggtagccctaagggtggcagaatgttttgacaaaattcgtgtgaacccaggaaattttgctgatcgtcgtgctcaatttgaaaagctggaatatactgacgacgactaccaaaaagagctagagcatattgagaaggtgttttctccattagttgagaaatgcaagcagtatggaagagcaatgcgaataggaacaaatcatggtagtctttctgaccgcataatgagctactatggtgattctccacggggaatggttgagtctgctttggaatttgctagaatatgtcggaagttggacttccacaactttgtattttcgatgaaagctagtaaccctgttatcatggtccaagcatatcgcctgcttgtggcagaaatgtataacctaggatgggattatcccttgcacttgggtgttacagaagctggagagggtgaagatggaaggatgaaatctgctattggcattgggacactgctaatggatggtttgggtgatacaatccgtgtctccctcacagaaccaccagaagaagagattgatccttgccaaaggttggcaaatcttgggacgcaggccgcaaaccttcaaattggggtggccccatttgaagaaaagcacaggcgttattttgatttccagcgtaggagtggtcaattgcctttgcagaaggagggtgaggaagttgactacagaaatgtcctgcatcgtgatggttctgtactgatgtcagtttccctggatcagttgaaggctcctgatctcctttataggtctcttgcagcaaagcttgtggttggcatgcctttcaaggatctggctactgtagattccattcttttgagggagctcccccctgtagaagatgctgaagctaggcttgcactcaaaagattagttgacatcagcatgggcgtactggcccccttatcggagcagttgacaaagccactcccacatgcaattgtacttgtcaacctcgacgaattgtcaagtggtgcacacaaacttttgccagaaggcactagactagctgtcactcttcgtggtgatgaatcatacgagcagctagatattcttaaggatgttgatgatataacaatgttgttacataatgttccatatggtgaggagaagacaggcagggtgcatgctgctaggaggttatttgagtacttacaggccaatggcttgaacttccctgtaattcatcacataaatttccctgaaaccattgacagagatggtcttgtcattggtgctggggccaacgttggtgctctcttagtcgatggtcttggtgatggtgtattccttgaagctgctgaccaggaatttgagtttctgagggacacatctttcaacttgctccaaggttgcaggatgcgcaacacaaaaactgaatatgtgtcttgtccttcctgcggccgaacactctttgaccttcaggaaatcagcgctgagattagagaaaagacctctcatctgccaggtgtctcgatcgctatcatgggctgtattgtcaatggaccaggagagatggctgatgccgattttgggtacgttggaggcgctcccggaaagatcgacctttacgtcggcaagaccgttgtgcagcgcgccatcgccatggaaggtgccactgacgccttgatccagctgatcaaggaccatggccgatgggtggatcctcctgccgaggagtagggctgtaggctgtagccaagtctgtagtttatatattctgtaaagcgaaacacgcaatgcagtaactgagcatacgatgtacatccctacacattttgtacatttattgagatctgagaaataaactagaaaccgtcggtgacggcatgtctgcagcaccccaaatgaagcacatacgatttacatattagtagtagcccatgtgagcaagacataatcctatacaatcttgaagtctgcattatatattttttccaacagaggtagcttagaaagtttttcgagcaatgcaattttgttcgttactttccgtttactttttcttttttttagcgttgagggttatataaatagatttataatacaaagagaaaaacggtcgtgattacacaacaccaaaatttttattgtggtcttgagagtttgtgatgatc

SEQ ID NO: 210632 - DNA, 3026 bp, Zea Mays
aaaaaaaagcagcgcctccacctccacctcccgactccaagccaaggcggcccacggagccacaccgcacaccccatcccgcccggagcagcaaagcataggtgctcgagcgctccctccagagctccccgcctgccgccccgtcctcaccctcctcggtcgcctcccgccgaggctcggctcccgtccgcagccaccacgtgcgacctcccctcccctgttcctgagaatctccgtaggtcggcatggggtgaccagatcggtgctctccagctgaattctgctcgcggctcgtctcggaggcagcggagatggcgagcgccggcgtggcgggctgctcagggagtgctggcgatgctttgttcagggaactctggcatgcttgtgctgggccgttggtcacagtgcctcgccaaggcgagctggtttactacttcccacagggtcatatggaacagcttgaagcatctacagatcaacaacttgatcagcacttacctttgtttgatctaccacccaagattctctgcaaggtggtcaatgtagaacttagagctgaaactgattctgatgaagtttatgctcaaattatgctgcaaccagaagcagattgagcccaccagcccagattctgagccaccggagcctgaaagatgcaacgtctattccttctgcaagaccttgactgcttcagatacaagtacccatggtggattctctgtcctcaggaggcatgctgaagaatgtttgccccaactggacatgactcagaatccaccatggcaagaactgctggctaaagatctccatggaaatgaatggcatttccgtcacatctttcgagggcaaccaaggaggcatctacttacgacaggttggagtgtttttgttagctcaaaaagattggttgctggtgacgcgtttatctttttgagaggtgagaacggagagctgagagttggggtaaggaggctcatgaggcaactaaataacatgccatcttcggttatctcaagccacaacatgcatcttggagtcctagcaactgcatctcatgccatctccacaggaactctcttttctgttttctacaaacctagaacaagtcgatcggaatttgtcgttagtgtaaataagtaccttgaagctaagaatcacaaggtgtctgttggcatgaggtttaaaatgagatttgagggtgatgaatctcctgaaagaagattaagtgggacaattattggtctgggaagcatgccagctaactcaacttctccatgggctaactctgattggagatctttgagggtccaatgggacgagccttctgctattctgcgtccagatagagtttcaccatgggaactagaaccccttgatgcaactaatccacaaccacctcaacctcatttacggaataagcgtgcacgaccccctgctttactttctattgctccagaacttcctcaagtttttggttttttgaaatccccagctgagcctgcccaagctttctcattttcaagaccgcagcaaactcaggaattataccattcaaatcccagttcaatcttctcatcatcgttgaatgtaggattcagttcaaagaatgaccgttctactccaatcaacagtcatttgtactggacaatgaggcagacaagaactgaatcctactctgctagcattaacaaagctcctactgaaaagaagcaagaatctgctacttctggctgcagattgtttggcattgagataggttctgcagtatcaccagtggctactgttgctagtgttggccaggatcagccacctgctctctcagtagacgttgaatctgattagctgtcacagccatccaatgccaacaaaacggatgccccagtggcaagcagcgagcgctctcttaacgagtcagagagccggcaagtcaggagctgcaccaaggtaatcatgcaaggaatggcggttggcagggcagtggacttgacaaggttagatgggtatgctgatctccaccgcaagttggaggagatgtttgatatccagggagagctttctgccaacctcaagaaatggaaggtcatttacacagatgacgaggatgatacgatgctggtcggggacgatccatggaatgaattcctcaggatggtaaaaaggatatacatttactcttacgaggaggccaagtctttgactcgcaaggcgaagccgccggttgttggtgacaccatcaagccagacccaaacaaattgccaccggaatctgacgtgccacatgactcaaacaacaatgctcccgttgctgctgattatcaggactgatggatgctaacttggctcctaccttttctttcccctcttggatgtcggtcatgggaggcaatgcacgctccttgggacttgtaagagttatctgttttgttgcttcgcgggcccaaaggacgcttccctgcaccatctgcctttgtttggaacggcttggaccgccgtggtccttttacctgcagcaaggaaaggaatggctgggagggaatggatactggtatcgttccgtgtgtggcaccccgtgatctgtttgccgtgctttgtaggaggcatggcgtattgccgggtactttggttttggagactgctactgactgctgccgtcgtcgggccgctcctctcacctctggtaaataggactttgtacacaattattttgttagtagcagtatatgtacatcatcggtcgtgttgcttgctacatgtactcctatgtagcatcctcccctgcattttagtcctggctaggtatcagatgctctggtgcaaaaatgtctctgcttgttccaacggcatgctcttttcggcccgtgctgccttgctgggtgtcgtgtgtgccttttcggttggaacattgctgccaccgcccggcatttggtgctttcttggtgttatgtgtctgccctcgtgtacaaggcatctgtaacgcctggggtctctgtttgacgcgatgctgatgcgggcgcggccctttctgc

SEQ ID NO: 210633 - DNA, 2881 bp, Zea Mays
ggagtagtcgtcgccacatcccgcttcccccgtacgccgtacccccgcagctcgctctcgccttctcctccggttcctgctgcaacctgcactccgtagtccgccctttctgcccgccgccggccacttcaagactactccccgccgcgttacctcctcctcgtcctcctggggttacccagctctgttcccctttcagggaacgccttgagaggcggggcgggtccttggtccggaggcgcggcgacggcgagtgatttttgttcgccagagggagagttttttttttcaccgggtttggtgggaagtaaggaggcggccgcgagtggcgagacgttcacgggttagatctggcggtacggcgtcgcggatctgagcgaggtttcggtggagcgatcaggaggtggtcactatcttcgcctcatttcgagtagtttgggcgcctgtagtttgcctgtttccttttcggtgtctgatcaagaagatgatgtgctcagagggcttctagttgttgctgatatcttgtcttgtgttgtatcacccggaagctggaaaggagcgcatcactcctgctctccccttttactccttggttacttggtatttcttggatatccaggctggaaggggttagatccagttcctgcggccctagtaataaggtgcacttggggaaggtgccatgacctacttccccggtgaggtggtggagcacattttcagcttcttgccgtcgcacagcgaccggaacacggtctcccttgtgtgcaagttgtggtacgatgtcgagaggctgagccgacgaggtgtgttcgtggggaactgctacgctgtgctccctgagcgtgtggtgctgcgattccccaatgtaaaggcgctgacggtgaaggggaagcctcactttgcggacttcaaccttgtgccgcctgattggggtggctacgcggggccatggattgaagcaacagccaggagctgcctgagtcttgaggagctgcgcatgaagcggatggttatctctgatgagaaccttgaactgctagctcggacattcccaaaattcaaagtcctcgtccttatcagctgcgaggggtttagcacggatggtctagctgccattgccaatcactgcaagctcctgagggagttagatttgcaggaaaatgacgtggaggaccgtgggcccagatggctttccttccctgattcctgcacctcattggtttccttgaatttcgcttgcatcaaaggggaagtgaattctggtgcattggagagacttgtcgctaagtctccaaacctacgcagtttgaggttgaatcgctctgtttcagttgacacactctcgaagatactagagcgaaccccaaatttggaagacttggggacaggtaatttgacagatgagttccaagctgagtcctttgtcagacttactagtgctctggagaaatgcaaaaggctgaggaatttgtctggattttgggatgcttctcctatctttgttccgtttatctatccactctgtcatcaactaactggcctaaacttgagctatactcccacactggattattctgatctgactaaaatgatcagccgctgtgtgaaactccagcgtctttgggtactggactgcatttcagacaagggtttgcaggtggtggcctctagttgcaaggatctacaagaactcagggtgtttccatcagaatttaatgttgctggtgcttttacggtgacagaggagggacttgttgcaatatcatcaggctgcccaaaactgagctctttgctgtatttttgtcaccagatgaccaatgaagcactaactactgtagccaagaattgcccaagtttcatcagatttagactctgtatccttgagccaaagaagccggatgccatgacaggccagccgttagatgaaggctttggtgcaattgtccgtgactgcaaaggtctaagacgactgtcaatgtcaggccttctcacagacagggttttcatgtatatcagaatgtatgcgaaataccttgagatgctttctatagcttttgctggagatggtgataaggggatgatggatgtgatgaacggatgcaagaatctgaggaagcttgagattagagacagtccatttggtgattttgcactcttgggaaatgttgccaaatatgacacaatgcgatccctttggatgtcatcatgcaatgtcacattaaaggggtgccaagtccttgcatcgaagatgccgatgctcaatgtggagatcatgaacgaactagatggaagtagtgaaatggagaaccatgaatcgggaaaagccacactggtttgtgcccttatcctggagcaacatggccgggattcatcatcatctctgtaccaactgctcccctcttccagtgtctggtcatatggccacccaggccctttatcgccttgtgcattctcactcgagaggaggacagaatcagatgactttttttttcttcttttcacgccatgtaatctgtagtgtacctgtcttcatttgcttttcactttggcacggtggattgtgctgtcgcggtactgttctagtgttttgattcgtaaacctgagaactgtcgggacattccggtgacgatgatttctttcttgctcctgtgaatgcagtgtgtgtgcaaattttaggtttatactacatctctccacgtaaatttgctagatgtagccgactacccacgtagcggttcattaatgatcttggtttaattaatggctgagtattttttttctaatttatgtactttctctattttgtttacatattttattatattaggtttattctgagataaacatttgtgtttttttgcctatcgatgatataag

SEQ ID NO: 210634 - DNA, 3006 bp, Zea Mays
gagagataggctggtggagtagtcgtcgccacatcccgcttcccccgtacgccgtacccccgcagctcgctctcgccttctcctccggttcctgctgcaacctgcactccgtagtccgccctttctgcccgccgccggccacttcaagactactccccgccgcgttacctcctcctcgtcctcctggggttacccagctctgttcccctttcagggaacgccttgagaggcggggcgggtccttggtccggaggcgcggcgacggcgagtgatttttgttcgccagagggagagttttttttttcaccgggtttggtgggaagtaaggaggcggccgcgagtggcgagacgttcacgggttagatctggcggtacggcgtcgcggatctgagcgaggtttcggtggagcgatcaggaggtggtcactatcttcgcctcatttcgagtagtttgggcgcctgtagtttgcctgtttccttttcggtgtctgatcaagaagatgatgtgctcagagggcttctagttgttgctgatatcttgtcttgtgttgtatcacccggaagctggaaaggagcgcatcactcctgctctccccttttactccttggttacttggtatttcttggatatccaggctggaaggggttagatccagttcctgcggccctagtaataaggtgcacttggggaaggtgccatgacctacttccccggtgaggtggtggagcacattttcagcttcttgccgtcgcacagcgaccggaacacggtctcccttgtgtgcaagttgtggtacgatgtcgagaggctgagccgacgaggtgtgttcgtggggaactgctacgctgtgctccctgagcgtgtggtgctgcgattccccaatgtaaaggcgctgacggtgaaggggaagcctcactttgcggacttcaaccttgtgccgcctgattggggtggctacgcggggccatggattgaagcaacagccaggagctgcctgagtcttgaggagctgcgcatgaagcggatggttatctctgatgagaaccttgaactgctagctcggacattcccaaaattcaaagtcctcgtccttatcagctgcgaggggtttagcacggatggtctagctgccattgccaatcactgcaagctcctgagggagttagatttgcaggaaaatgacgtggaggaccgtgggcccagatggctttccttccctgattcctgcacctcattggtttccttgaatttcgcttgcatcaaaggggaagtgaattctggtgcattggagagacttgtcgctaagtctccaaacctacgcagtttgaggttgaatcgctctgtttcagttgacacactctcgaagatactagagcgaaccccaaatttggaagacttggggacaggtaatttgacagatgagttccaagctgagtcctttgtcagacttactagtgctctggagaaatgcaaaaggctgaggaatttgtctggattttgggatgcttctcctatctttgttccgtttatctatccactctgtcatcaactaactggcctaaacttgagctatactcccacactggattattctgatctgactaaaatgatcagccgctgtgtgaaactccagcgtctttggacaagggtttgcaggtggtggcctctagttgcaaggatctacaagaactcagggtgtttccatcagaatttaatgttgctggtgcttttacggtgacagaggagggacttgttgcaatatcatcaggctgcccaaaactgagctctttgctgtatttttgtcaccagatgaccaatgaagcactaactactgtagccaagaattgcccaagtttcatcagatttagactctgtatccttgagccaaagaagccggatgccatgacaggccagccgttagatgaaggctttggtgcaattgtccgtgactgcaaaggtctaagacgactgtcaatgtcaggccttctcacagacagggttttcatgtatatcagaatgtatgcgaaataccttgagatgctttctatagcttttgctggagatggtgataaggggatgatggatgtgatgaacggatgcaagaatctgaggaagcttgagattagagacagtccatttggtgattttgcactcttgggaaatgttgccaaatatgacacaatgcgatccctttggatgtcatcatgcaatgtcacattaaaggggtgccaagtccttgcatcgaagatgccgatgctcaatgtggagatcatgaacgaactagatggaagtagtgaaatggagaaccatggtaacctctctaaagtggataagttatatgtttaccgtacaactgctggagtgagggatgatgcaccaaattttgttcaaatattatagagctagctgcaattaccttggtatcttcccttcctacgagaatcgggaaaagccacactggtttgtgcccttatcctggagcaacatggccgggattcatcatcatctctgtaccaactgctcccctcttccagtgtctggtcatatggccacccaggccctttatcgccttgtgcattctcactcgagaggaggacagaatcagatgactttttttttcttcttttcacgccatgtaatctgtagtgtacctgtcttcatttgcttttcactttggcacggtggattgtgctgtcgcggtactgttctagtgttttgattcgtaaacctgagaactgtcgggacattccggtgacgatgatttctttcttgctcctgtgaatgcagtgtgtgtgcaaattttaggtttatactacatctctccacgtaaatttgctagatgtagccgactacccacgtagcggttcattaatgatcttggtttaattaatggctgagtattttttttctaatttatgtactttctctattttgtttacatattttattatattaggtttattctgagataaacatttgtgtttttttgcctatcgatgatataag

SEQ ID NO: 210635 - DNA, 2500 bp, Zea Mays
gctggtggagtagtcgtcgccacatcccgcttcccccgtacgccgtacccccgcagctcgctctcgccttctcctccggttcctgctgcaacctgcactccgtagtccgccctttctgcccgccgccggccacttcaagactactccccgccgcgttacctcctcctcgtcctcctggggttacccagctctgttcccctttcagggaacgccttgagaggcggggcgggtccttggtccggaggcgcggcgacggcgagtgatttttgttcgccagagggagagttttttttttcaccgggtttggtgggaagtaaggaggcggccgcgagtggcgagacgttcacgggttagatctggcggtacggcgtcgcggatctgagcgaggtttcggtggagcgatcaggaggtggtcactatcttcgcctcatttcgagtagtttgggcgcctgtagtttgcctgtttccttttcggtgtctgatcaagaagatgatgtgctcagagggcttctagttgttgctgatatcttgtcttgtgttgtatcacccggaagctggaaaggagcgcatcactcctgctctccccttttactccttggttacttggtatttcttggatatccaggctggaaggggttagatccagttcctgcggccctagtaataaggtgcacttggggaaggtgccatgacctacttccccggtgaggtggtggagcacattttcagcttcttgccgtcgcacagcgaccggaacacggtctcccttgtgtgcaagttgtggtacgatgtcgagaggctgagccgacgaggtgtgttcgtggggaactgctacgctgtgctccctgagcgtgtggtgctgcgattccccaatgtaaaggcgctgacggtgaaggggaagcctcactttgcggacttcaaccttgtgccgcctgattggggtggctacgcggggccatggattgaagcaacagccaggagctgcctgagtcttgaggagctgcgcatgaagcggatggttatctctgatgagaaccttgaactgctagctcggacattcccaaaattcaaagtcctcgtccttatcagctgcgaggggtttagcacggatggtctagctgccattgccaatcactgcaagctcctgagggagttagatttgcaggaaaatgacgtggaggaccgtgggcccagatggctttccttccctgattcctgcacctcattggtttccttgaatttcgcttgcatcaaaggggaagtgaattctggtgcattggagagacttgtcgctaagtctccaaacctacgcagtttgaggttgaatcgctctgtttcagttgacacactctcgaagatactagagcgaaccccaaatttggaagacttggggacaggtaatttgacagatgagttccaagctgagtcctttgtcagacttactagtgctctggagaaatgcaaaaggctgaggaatttgtctggattttgggatgcttctcctatctttgttccgtttatctatccactctgtcatcaactaactggcctaaacttgagctatactcccacactggattattctgatctgactaaaatgatcagccgctgtgtgaaactccagcgtctttgggtactggactgcatttcagacaagggtttgcaggtggtggcctctagttgcaaggatctacaagaactcagggtgtttccatcagaatttaatgttgctggtgcttttacggtgacagaggagggacttgttgcaatatcatcaggctgcccaaaactgagctctttgctgtatttttgtcaccagatgaccaatgaagcactaactactgtagccaagaattgcccaagtttcatcagatttagactctgtatccttgagccaaagaagccggatgccatgacaggccagccgttagatgaaggctttggtgcaattgtccgtgactgcaaaggtctaagacgactgtcaatgtcaggccttctcacagacagggttttcatgtatatcagaatgtatgcgaaataccttgagatgctttctatagcttttgctggagatggtgataaggggatgatggatgtgatgaacggatgcaagaatctgaggaagcttgagattagagacagtccatttggtgattttgcactcttgggaaatgttgccaaatatgacacaatgcgatccctttggatgtcatcatgcaatgtcacattaaaggggtgccaagtccttgcatcgaagatgccgatgctcaatgtggagatcatgaacgaactagatggaagtagtgaaatggagaaccatggtaacctctctaaagtggataagttatatgtttaccgtacaactgctggagtgagggatgatgcaccaaattttgttcaaatattatagagctagctgcaattaccttggtatcttcccttcctacgagcatgcctgggaccagggcaacagtggtaagttcttgaatcgtctcccttt

SEQ ID NO: 210636 - DNA, 867 bp, Zea Mays
tggcaggagctctacctctcaattaagaagaagaacctatttagtccttgaattacataactttgatttgcaattggagggagcaggaatagaacatcttaatcctgttaagcctctgattggcatagcagatgtattcctttgctttggaccaagattctgcatgtcatcactttgagaagccatcaaggttgatagtaaattttgtgcgttgtgttttacatgtgtagagaagcagtaacccaagagcatggacaaaaaatcaatagatatcaagcaatccttgcagcccgtctgaaggctaagtttttctctaagaaggcttttgacagagggaacatttttgaatcagaaaccattgttggaggtgaaacaattcggtcaagcaggtggccatgtacaagatcatttgcaaacccagaatttttttcccgcgacaagaacagccatgagaagggaaattctccatcttcagcagcagatttctctgccaagaacaactctccacccttggctggtgaagcctcaccaaagaataatgctagtgctttggtcacagaaaacaatttaacaactggaaatagacagcaatccaagaagaattgacctgatggattaatgtaggataatcaggttatgttctgttcttctgtagcctgagggtagcaacctgaagtatacacttagcaggaaaggcaaattgacgccaaaaatgtttgtaacctgctctaaattcagtttgttgtacctgttctagaaagcatctgtagcgaggaataccgttgtttacttggtatttaaattgatgtattatagactccctattgaaccattgattgctcaaatctgaaccccaaattttcttta

SEQ ID NO: 210637 - DNA, 399 bp, Zea Mays
cagctttggaggaacgcagaaacgtcgaaaccagcacccggaaacccagacaaagcacgagccacgcacgccccgctgtctccctcccgccgtcccgccgccaccgctactgccggagtctctcgccaccgtcgttgctctcccgccttcaccgtgccaactcccctccttgcctcccccgcgcttcagtcgctccactccccatcgctttcgcctggtcagaattccagatccaggtgtcctttgacccagaccgcgcctgcctttccctccgctcggattcttcgccgtcttcgttcctactgggcgccgccggggtggagcggagatcggatccgccaggagctgattccttctctcgtagtttgatttcggctattgttcattgcttgtactgat

SEQ ID NO: 210638 - DNA, 737 bp, Zea Mays
atcttcattcccttaggaaaccttgatatttgtttgtgcccactgccgaggagaactttggttgttgaggagatcttaacgatagatataaaacctggatggaagaaagggacaaaaataacatttcctgaaaagggtaatgaggctcctcatataattcctgcagatattgttttcataattgatgagaaaccccatgatgtattcacaagagatggtaatgatctggttatgactcagaagattactttggctgaagccttgacagaatgtactgttaatataacaacattagatggtcggaatctgacagtgcagataaataatatcatctaccctggctatgaggaggttgttccccgagagggaatgccgattcagaaggattcttcaaagaagggaaatcttaggatcaaatttagcattaaattcccctcgaggctgacctcggagcagaaagcagaaatcaagaggctactaggttcataaggagcatgcacaaccttttttttttctggtgacgcaatgctgtatccagtgtacattcagatgttaaatgtgaataccagcaaagtctcggtttccttaaactgtgccagttcctttggcatatggatgttttgagatgcaaagttgaattgtttcatttatcggggaataattctaaattctactagatacttctgtgtgattttgctgtgaggatgtccattatgcacctaacaaaagctttattt

SEQ ID NO: 210639 - DNA, 1467 bp, Zea Mays
ctttttcatagctaaacgaaatgcacctcagtggtctgtaggcaggcaggcaggcatcgacgtgcccacctcgttccgctctgacgtctgagatcgcgagatcgggaacccctgcccgtctgctccggaatctcgcccgcacgaaacttccccgacccatcgaccacaccagccccatcccctccgtcgctcccaagtcccaactgccgccacctctccgcgagccgacgccgacgcctacggtcaccaggacagagggacggctgctaccgcgggagtatgggggtggactactacaaggtgctgcaggtggggcgcggcgcctctgacgacgagctcaagaaggcttaccggaagctggccatgaagtggcacccggacaagaaccccagcaacaagaaagaagcggaggccaagttcaaacagatctcagaggcatatgaggtgctaagtgattcccaaaagcgggcaatctatgatcaggccggcgaagaggggcttaaggctcaggtcccacctactggagcaggtggtcccagtgggtcttccttctatggagggaatgcatcgacattccagttcaaccctcgcagtgcagatgatatttttgctgagttttttgggttctcaagcccattctcaaccatgggtggcatgggcggaggtgctgagagaggcatgaggggctccaggtttgggatgttcggcgatgacatatttgggtcccaccctcagtttcctggtgaggcatcaatgcatgttccacagcggtctcagaaggttcctccaattgagaatcggttgccatgcaaccttgctgatttgtacaaaggtaccaccaagaaaatgaagatttcacgagaggttttagatgccagcgggagaactttggttgttgaggagatcttaacgatagatataaaacctggatggaagaaagggacaaaaataacatttcctgaaaagggtaatgaggctcctcatataattcctgcagatattgttttcataattgatgagaaaccccatgatgtattcacaagagatgataaataatatcatctaccctggctatgaggaggttgttccccgagagggaatgccgattcagaaggattcttcaaagaagggaaatcttaggatcaaatttagcattaaattcccctcgaggctgacctcggagcagaaagcagaaatcaagaggctactaggttcataaggagcatgcacaaccttttttttttctggtgacgcaatgctgtatccagtgtacattcagatgttaaatgtgaataccagcaaagtctcggtttccttaaactgtgccagttcctttggcatatggatgttttgagatgcaaagttgaattgtttcatttatcggggaataattctaaattctactagatacttctgtgtgattttgctgtgaggatgtccattatgcacctaacaaaagctttattt

SEQ ID NO: 210640 - DNA, 1386 bp, Zea Mays
ctttttcatagctaaacgaaatgcacctcagtggtctgtaggcaggcaggcaggcatcgacgtgcccacctcgttccgctctgacgtctgagatcgcgagatcgggaacccctgcccgtctgctccggaatctcgcccgcacgaaacttccccgacccatcgaccacaccagccccatcccctccgtcgctcccaagtcccaactgccgccacctctccgcgagccgacgccgacgcctacggtcaccaggacagagggacggctgctaccgcgggagtatgggggtggactactacaaggtgctgcaggtggggcgcggcgcctctgacgacgagctcaagaaggcttaccggaagctggccatgaagtggcacccggacaagaaccccagcaacaagaaagaagcggaggccaagttcaaacagatctcagaggcatatgaggtgctaagtgattcccaaaagcgggcaatctatgatcaggccggcgaagaggggcttaaggctcaggtcccacctactggagcaggtggtcccagtgggtcttccttctatggagggaatgcatcgacattccagttcaaccctcgcagtgcagatgatatttttgctgagttttttgggttctcaagcccattctcaaccatgggtggcatgggcggaggtgctgagagaggcatgaggggctccaggtttgggatgttcggcgatgacatatttgggtcccaccctcagtttcctggtgaggcatcaatgcatgttccacagcggtctcagaaggttcctccaattgagaatcggttgccatgcaaccttgctgatttgtacaaaggtaccaccaagaaaatgaagatttcacgagaggttttagatgccagcgggagaactttggttgttgaggagatcttaacgatagatataaaacctggatggaagaaagggacaaaaataacatttcctgaaaaggataaataatatcatctaccctggctatgaggaggttgttccccgagagggaatgccgattcagaaggattcttcaaagaagggaaatcttaggatcaaatttagcattaaattcccctcgaggctgacctcggagcagaaagcagaaatcaagaggctactaggttcataaggagcatgcacaaccttttttttttctggtgacgcaatgctgtatccagtgtacattcagatgttaaatgtgaataccagcaaagtctcggtttccttaaactgtgccagttcctttggcatatggatgttttgagatgcaaagttgaattgtttcatttatcggggaataattctaaattctactagatacttctgtgtgattttgctgtgaggatgtccattatgcacctaacaaaagctttattt

SEQ ID NO: 210641 - DNA, 1472 bp, Zea Mays
ctttttcatagctaaacgaaatgcacctcagtggtctgtaggcaggcaggcaggcatcgacgtgcccacctcgttccgctctgacgtctgagatcgcgagatcgggaacccctgcccgtctgctccggaatctcgcccgcacgaaacttccccgacccatcgaccacaccagccccatcccctccgtcgctcccaagtcccaactgccgccacctctccgcgagccgacgccgacgcctacggtcaccaggacagagggacggctgctaccgcgggagtatgggggtggactactacaaggtgctgcaggtggggcgcggcgcctctgacgacgagctcaagaaggcttaccggaagctggccatgaagtggcacccggacaagaaccccagcaacaagaaagaagcggaggccaagttcaaacagatctcagaggcatatgaggtgctaagtgattcccaaaagcgggcaatctatgatcaggccggcgaagaggggcttaaggctcaggtcccacctactggagcaggtggtcccagtgggtcttccttctatggagggaatgcatcgacattccagttcaaccctcgcagtgcagatgatatttttgctgagttttttgggttctcaagcccattctcaaccatgggtggcatgggcggaggtgctgagagaggcatgaggggctccaggtttgggatgttcggcgatgacatatttgggtcccaccctcagtttcctggtgaggcatcaatgcatgttccacagcggtctcagaaggttcctccaattgagaatcggttgccatgcaaccttgctgatttgtacaaaggtaccaccaagaaaatgaagatttcacgagaggttttagatgccagcgggagaactttggttgttgaggagatcttaacgatagatataaaacctggatggaagaaagggacaaaaataacatttcctgaaaagggtaatgaggctcctcatataattcctgcagatattgttttcataattgatgagaaaccccatgatgtattcacaagagatgtgcagataaataatatcatctaccctggctatgaggaggttgttccccgagagggaatgccgattcagaaggattcttcaaagaagggaaatcttaggatcaaatttagcattaaattcccctcgaggctgacctcggagcagaaagcagaaatcaagaggctactaggttcataaggagcatgcacaaccttttttttttctggtgacgcaatgctgtatccagtgtacattcagatgttaaatgtgaataccagcaaagtctcggtttccttaaactgtgccagttcctttggcatatggatgttttgagatgcaaagttgaattgtttcatttatcggggaataattctaaattctactagatacttctgtgtgattttgctgtgaggatgtccattatgcacctaacaaaagctttattt

SEQ ID NO: 210642 - DNA, 1687 bp, Zea Mays
ggcgcgtgtgagccacaccgcgccaggctgcccctccctccgccgcacaacctcaccgatcccactttaagccacaccatcgccccaccgtctcctctccggcgacctcgctggcagcgtgcgcacgagcgtctgcgtccggcctccacacgggccgcctcgccgtgcgcgccgccgccctcccggcagacggccgcagtgacggcgctgcctcctataaggaacttggtctgtactccttgaaaaagaggattgaagatgcagttgtgcgggttgaaacgaccgcttccgatgctctggagttggaggaagcacagagaattaagcaggaagaagtactgcagaaacgtaacttgtgggataatccagctaagtcacatgagactctgtctgctctggctgatgctatcagggtggtcgaccatcttaaagatcttcgcttcaaggctgaagaggcgaagttgattagtcaattatcagagatggatgccataaatggtgagctatttaagcaagcatacaaatcttcagtagacgctagtgagtatctagatcgctaccagatgtacaagcttcttaagggtccgtatgacaaggagggagcgtgcattattgttactgcagtatctaacggtgttacttctgagctgtgggcagagaaggtctttggcatgtatacaagttgggcacggaagcaaggttacaaggttggattgattgagaagatattttcaactagtggccatatccaatctgcaacaatggagattgaatcagagtacatgtttggcaccctttctggagaaaaaggaatgcatcaaatgatatactcctcccttgaaaattctgacattgatcaggcattatcagctagagtcgacataattcccctgttcttggatagaccagttgttcttcacttggatgacgatgatatagagacctctccctcaccttctgtacataagaagggagatagaagaaatggtgttgccgttagggttcaacacgtaccaagtggagtcactgctgaaagttcaggtgagagaagctactttgcgaacaagctaaaagccacaagtaggttgaaagcaaagctccttctaatagctagagaattgaaagtatcggatataaaaacaatcaacagacaagctgtagaggataaatgcaactgtggagcacgaagatacacatttggacgtcagaaattggtacatgatctcaatacaggcatccaattgtcagacttgaactcagtcttggaaggcgatatcgaaccattcatcagaggccgtattacatccagacaattgtgatgcacccagctctcacaaagtcattgatctgttcgctcgttatgattctgtacatttatttcttttcttttacagaacaaatcacatcataagataatatctgtaaatatatcacatttcaagtcaaaagggcatgccaaaaggtatacaaaacatcaatattaatgagcattgtcaagcttgaatctcttttattgtgtagagttagtggaacttgttggctatcaacaccgcatcctcaatagctagtccttcgccttacaccacctcattgtcatagaaaccagactacaaatctgaccttgaagagtcaattcatgcaaatacaccattggacaagatgtaacatttggtgttttttatgtgat

SEQ ID NO: 210643 - DNA, 1638 bp, Zea Mays
ccctgcgtgtgcgtgctgcgtgctgctactatatataaattgcaagcaagctaggcaggcaggctagcccagcgctcggccctcggctccttaaggcttcatcttctcaagttccggccgtccatcgccgccgccggcctcggccggctcagttcctgcctgccagccaaaaattccacaccacccacccagagactgaggcgcgcggtggtgaagacgtgatcgaaagtcgaaaccaaaacgatatatagatggggcgcgggcgcggcaaggtggaggtgcgtcgcatcgagaacagcgtgagccggcaggtgaccttctcgaagcggcggcgcgggctggcgaagaaggcgcgggagctggccgtgctctgcgacgccgacgtcgcgctgctcgtcttctccgacaagggcaggctccacgacttcgccgcgcacggcagcatggagcgaatccttggccgatacgagaggtacttgctatgtgaagatagggacgatgtaacccaagactaccctgaagaatcgcaggggaacatgagctatgaccacatcaagttgaggtccaaactcgaagctataaagaagagccaaaggaatctcatgggggagcagctcgagtccctgacgttcagagaggtacagcagcttgagcaccggatagacagcgctctgaggaacgtcagatccaggaaggaccacatcttgctcaactcgatccaggagctccggaacaaggcaagcatgccaaataaagaatttaccttaacatcgtcaaaaacataacatttttttattcggttgcaaagtggctagtagaatgttgatccattttctagatttctgattagttcttcagattctttattatcgcttcattgttttggttgttctcattgtttttatttgtaagaggtggcgcagtaacaggaagttctgtacttttggatcccaccttgcaggaaacttttctgatggaacaaaatggcattctagagaaggagaaggctgcagtgggggcatcatcatccctgcacaccaccaccagcaccgcagcagcttcttccacggcagcggcggcggcggcccttccaaacctgaacatctgtcccgacgactccgacgagccaggaatggcggcggcggcggggatcaggttgccgtggtggatgctccagccatctgccgtcagccaacggcaggaacagcactgaactgcttgtcttctcagatgatccacgctgcttgttccagctcgattctagtttctattagaactcgattcagctaaggcgggaatttgtgatctttctattgatctgccgttcttattggttgctagatcgattttatccttgtccttcttagtatctgaacctctgctgtgtcgtttgtcgtagttcttggtcgcaaaagctccggtttgcgtctctagtttggtttggttcctgtaaaatctgctgttgtccttcaatgagctgtgcaggccagttagatgattacttccactaacactatgacagacaattaggcccgagaaggcccaggctgcctttggcatatggatcaaatttgggctccgatggcccaacttttgataaattcgagctagtccatctgggctcatttttcagaaaat

SEQ ID NO: 210644 - DNA, 592 bp, Zea Mays
ccgccatacaccaacaataaccagcgcgtcgtacgttccactgcacacgaacggcgtacgcacgcatcaccaccaccaccaccaccaccccatcttcgtctccgcaccactctcttcgccggcgtgcaatgactacctcgacgcgcccttgcgccggcgcagcggccgcgttcctgctactagtgctcttctcctccgccgcggtgtccctggcaacggccgccggcagggagagcaagcagggccagcacgcagcgggcgcgagcgtgtacgtggtgatggtgaagccaccggccgagggcgtcgactccaaggcgtaccagatgggcatcctcgccgccgcgctcggcagaacatcctgacgtgctgcaggcgctgcctgacgtcaagtacacactgcaggacagcaaccacctcaaccgatgatttcagtcgagcgtgctttccgacgaccttcaccaacctgcaggattagctgatgaccagcgctgccatatctagcttcaccatgtattactatctcgtaattcacgcgcatattatgggagtgtttggttgctcctgctaaagtttagcccgggtcacatcaagc

SEQ ID NO: 210645 - DNA, 712 bp, Zea Mays
ccaagatcgaaattagtccttggtacccaattcaggctttgatgattgctttacagcgccgatatggcctcccgcccaaagctgtctggtattcagaagcaggttttggcgctgtacaggggattccttcgaacagcacgtcttaaggcccctgaagagcgccacaggatcgagtccgttgtcttggcagagttccgtgacaaggcaaagagtgttgaccgtaggaactttatacatatcgagtacttgttgaggagtgggaagaagcagcttgagcagctcaagaatcctgatattactggacttgctacccttgtagtaaagaaatgaggtccattcattgccagaacaaagcatcatcatggtaccggtgtttctagtatgaacatttgggacctgccactgatggtgtccaaataaaacaaatatgaccatacattacagattttgatatccagggactttctggggttttctaattagcctattggaatcttaagataaatcttgtagcccctgtccagtgactcagagtaatattgttttactgtcttttggtgtaagcagaggttagcattaacaaaacaatgtgattggtctgaacttgtgcgatatgaagcaatggattcagctcaacttgacttcaccgactttaccaagttcttaggaagaaatgcattaacatctatagatctaaataaatgcattatca

SEQ ID NO: 210646 - DNA, 2995 bp, Zea Mays
ccggcgtccggcttcgccatcacgacgcctcctccctccctcctctcctcttcactgacgctttctccctcccgtccttgctttattccacccccgcaaaaacccccgacaccccgaaaagctcaccccgcacatggagagctccgtctagggttggttcccgggagcgcgtccatggtgatgccgactgtggcctccgcggccgcagcggcgcttcacccggcgatctcgacgcggcgcgcgggggtcgtcgggaacggcattgcgtccgccgcggcggcgggtggacgcctggccggcggcgggcgaggggcggtcgtgcgtgccagggtggcggaggccgcgccggtggcggccgagggcggcaggttggaggcgcctcccgctgcacccatggtggagatccccgtcacctgctatcagatgctaggcgttaccgagaaggctgagaaagatgaaatcgtgaaggccgcgatggagttgaaaaatgctgggatagaagatggatacacagctgaggtctccactttcagacaggctctcctagtagatgtcagagataaacttctgttcgaacaagattatgcaggaaacataaaagagaaggttccacctaggtcctctcttcatataccttggagctggttgcctgctgctctgtgtattttgcaggaggttggagaagagaagctagttttggaaattggtcaggcggctctacgacgccctgattctaaaccttatgttcacgatgtgcttcttgcaatggcattagcagaatgctctatagcaaaagccagctttgagaagagtaaagtgtcccttggctttgaggctctggcacgcgctcaatatcttttgaggagaaaaccatctttggagaagatgcccattcttgaacagattgaagaatcacttgaagagcttgcgcctgcttgcacattggagcttctaagcttgcctcagacacttgaaaattctgaacgcaggcgaggtgctattgcagctctctgtgaactgcttagacagggccttgatgttgaatcatcttgtagagtccatgactggccttgtttcttgggtcaagcaatggacaaactattagccaatgaaattgtggatcttcttacttgggatactttggctacaactcgtaaaaataaaagatcgttggagtcccagagccagcgggttgtagttgacttcaattgcttttacatggcgatgcttgctcaccttgcatttggatttacaacccgccagactgagttgatcaagaaagctaaaaccatctgtgaatgtttagttgcatctgagagcacagacctaaaatttgaggaatctttctgctcatatcttcttggagagtatttgaaaagcttcagcagcttcaaagtactggaagttcaaattcaaagaactatggattggataaaaagaaagacagcagtggcaaggttactgtcaaccaatcactggaactgtggctgaaggatgtggccctttctcgttttgcagatacaaaagattgtccgccatctttgaccaacttttttggagctcctaaacgtgtccttaacacatccaagcagaaactgggatccccaagatcagtccttttgagctctcagccatcttctagtgcttcattatgcaacagaacttcaacagaacagagcccaagattgagtcccaacagccatctgggggaggctgttaagcaacttgcacctgccaacttggggctccaatcatcaatggataggcaagtaaatggttcagggacagcatctgttcccctgaagcgcaatcctggatcccatatcagaacattggaattatggggactaagtggagatgttatgggaaagcttgcatgtagcgcactccttggctttgttgtatttagcacattaaaattgaccaggtttcagtttgggcatgtgagatacacggacccaagtagagagtctgcatccatgttgtccttgaatgaagcgtctgcaaaagaaggctcttttatcaccagtcgtgtcaggaagcattttgaaaatatatcaaaatttctttggctgagtgataggcctaattcaaatagcaaaggaagtgataaacacccagcggttaatgatattactgctgcagtttgcaagcaaaagatggatattcaagaagcagaaacacttgtaaaacagtggcaagacataaaatctgaagctcttggccctgactatcaaactgacatgctacctgagattcttgatggttcaatgctctctaagtgggaagacttagcgttattagcaaaggaccagtcttgctattggagatttgtgctgctaaatcttaatgttgttcgagccgagataatcttggatgaaataggtgctggtgaggcagcagaaattgatgctgtacttgaggaagcggctgagcttgttgacgattcccagcccaagaaaccgagttattacagcacatatgaagttcagtacgtattgaggaggcagaatgatggatcttggaaaatctccgaggctgctgtccgggacctgacgtgatttcggccaactcggcaaacgggctacacaaccattggcgtataggcggcatggcaatcttaacctattaggaatgtgtagtggcactattaggttacctgcagttcaatttgagttctttgcattagttagctgagctccgttgggatgctttgaggtcttgagctgctctcatggtgagcttggccctttggattcaggatttgacacaatagttgctggcagtacagatgctaaccagtgctgattccacattcttccttttccgatatgatgtgaattatgttatctagtttttgagttttacccacgtgtaattgaaatccgtgaccgccattgttcaaagaacaatgcaatttgctgaattgatgtttgcgtttcacggcacctgtctgttactactttgtgtgactgcaacctttagttcaataaag

SEQ ID NO: 210647 - DNA, 3029 bp, Zea Mays
caccccgcccgcccaacctataggcgagaccggagagtgccatatcccgcgacgccgcagcatccgcttgactccactttatgcaagtgtgcctccggcgaggcctctcgctagttcggcagcacacctcccgcgtccttcccccactgtctctccaccctacccgcttcttccttcaccaatccgcgtccgacccgatgggtgagggttccgttcctggtaaggacgccaaggggaaggggaaggccaagcaccccgcccaggcttcggccctggtcgctcgcgacgactcctacctggaggccgtcacacataagaggattcgcttgttcgaggagatccaggcaaggcaggccgtcgagcggctgaatatcggcggcgaagttatcaagataactctgcctgatggtgcaatcaaagaagggaagaaatggataacaaccccaatggatattgctaaggagatatcaagtggatttgcagctagttgtttgatagctcaagtggacgaaacactctgggatatggggaggccactggaaggtgactgcaaattgcaaatgttcaagtttgataccaatgaaggccgtgacaccttctggcactcaagtgctcatattcttggagaatctcttgagagagcatatggctgcaagctgtgtattgggccttgcaccacaagaggggagggtttctactatgatgcttactacaatgagctgacattaaacgaggagcactttggtgtcattgaaaaccaagctaaaaaggctgttgcggaaaagcaaccatttgaacgcatcgaggtcagcagggcagaagctcttgaaatgtttgctgaaaataaattcaaggttgaaattattaatgagttgcccgaggacaagaccattacagtatacaggtgtggtcctttagttgacctatgccgtgggccacatatcccgaatacttccttcgtcaaagctttcgcttgtctgaaggcttcatcatcatattggagaggaaaagcagaccgtgaaagcctgcagagagtatatgggaatatctttccctgattctcgacgtctcacggaatataaacattttctagaggaagctaagaaacgtgatcataggatactagggaaatcacaggaactcttctttttccatgaacttaggccctggaagctgtttcttccttccacatggtgctagaatatataacaaactgatgaactttatgcgaaaacagtacagagatagaggataccaagaggtgttgagcccaaatatttacaatatgcaactttgggaaacttccggacatgctgcaaactacaaggagaacatgtttgtttttgagattgagaaacaggaatttgggcttaagccaatgaattgtcctggccactgtctaatgtttgctaatagggtccggtcatacagagagttgcctcttcgcatggctgatttcggagtgcttcatagaaatgagcttagtggtgcacttactggtttgacacgggttagaagattccagcaggatgatgctcatatcttctgcagagaggaccaaatcaaggacgaggttaaggctgttttggaattcatcaattatgtttacgagatatttggcttcaaatatgagttggagttgtctacgagaccagagaagtatctaggtgaaattgaaacttggaacaaagcagaacaacaattgacagaagctttgaatgagtttgggaagccgtggaagattaatgaaggggatggtgctttctacggtccaaaaattgatattggtgtgtttgatgcccttaagaggaaatttcaatgtgcaaccttacagctggattttcagctgcccattcggttcaagctgacttattctgctgaggatgaagcaaaaattgaaaggcctgtgatgatacacagggcaatcctaggttctgttgaaaggatgtttgccattcttttggagcattacaatggcaaatggcccttatggctaagccctcgccaggccattgtttgttcagtatcttctggttcagtggaatatgcgaaacaggttcttgccatgctacatgaagctgatttccatgttgatattgatgtgagtgacaggacaatacaaaagaaggtacgggaagcccaggtagctcaattcaactacattcttgtcgtaggcgcacaggaggccgagactggaaatgtctgcgttagggtaagagataatgccgacctggccacaatgagcgttgatggcctcatcacacgtttgagggaggaaatcgtagccttcaaatgattttgatgctgcataatttcctagcacttcgcaatcattgactgttcatttgtgattttgattgagttttcagggaacagtactgagttcctccaaggctccaagtgtattcttgttggtacggttggaagctactaagggcatatttagaagcacctagtttttaataaactggtttataaaaactgagatggttccaaacatatcggtttatatcctagtttttaataatctggtttataaaaactggatttctagtttcttaaaaattaagaagctagtctctcttagctaaaaccaatttatgaaaattaaggtagttctaaacatcataaaccaatttttttcttcataatccagtttctacaaactagagataaaaactaggttgcttctaaatagggtctaaacattgtctttttttattaattatatagatgtgaagttaaatgctacctatagtaaaaagttcctagtaaatactacctgtagtgtcaaaacagcttgttgtatttgactttgcatggtcttaaacatatatattgaccactaaattcttttgtacaatcttaaaatgatgagatcatatgcaacttacatgttcttaaactgttttttttggaaatattgatgtttgtatagttttaaaggtttgatgttatataagattttcctgaccgggaggaacatattagttttatgttatataaatttctttgtttcttttatttag

SEQ ID NO: 210648 - DNA, 2220 bp, Zea Mays
aggtaagccacagtggccgacctcaacagcgaccccccacccgactgccttgagaaagacgcttacctgaccgtccagatcgcgagaaaccttgtcgcgagcgcggccgctgatggtggaagccgagacggagcgacggacgacgacgacgcgaccttatctggtgtcggtcgaccagcagccgtccgcggctccgcccgacgcgatgtccccaaccggcagccgagcgcggattgccgaagcaccacactctcctcgctgattcgtgcggccgccctccgaagctccgcccgacgcgacgccaccactgcttcacgacggcaggtggcggagctcgttgcgcgccgcgcgcgtgcagacgtcggcgaacggggctcccgggacgtccgcgctggccagtcgtgtctggtctatggaagaaatagccgagcgaccagatattagatatccatctattttcctctagtcccctattgaccatgatattcttatgtctcgtttttttgaaaagagatggtgcaatgtgacgaggtgccctccgggttatttcaaggatgaaagcattgataaaattttggtgccaagaatgaagaaaatgccagtaaagatgtttagatccatcagacataccaaggattttgatatgtctctcaactatgacaaagcttatgaactgcctccaggcattccatcacacaagtttgcagagtattctgtatcgggactgacagatgccagtgaaaagtatgcacaccgtaatttatctgcacccatcaaagcaaatctacatttttctttgagcagaagtggaattatcgctcttgatagagcagaagcagtaattgagataactgaatgggttgaagttccaaagaagatattgactccagagagtaacatcaccaatcagaattcatcttctaaagtaggagtagctaatagcacgacagatattaaggaaaatttgagttctggcagtgataataattccagcactcccattaatgggagtaatgttcaagaaattattacagagaaggtgctaaagaaaagaacatttagggttccattgaaggttgtggaaaaaacaactggtggtggaacaattctttcaaaggagttgtattctgaagcaaaaaataggttagaggcactcgataagaaggatgctgagcggaggaaaactgccgaacttaagaataacctagagtcatacgtatattctatgaaggagaaggtgcaggattggttgtacatggacggtgaagatgctcaagctaatgaattcaaagaacgccttggtcaacttaaggccattggtgaaccgattcttttcagattgagtgaattaaaagcccgaccagctgcctgtgaaaatgctcgattgtatcttgatgagctgcaaaagattgtgaacaagtgggagacaaataaacaatggctccccaaaaagagagtagatgaggttgtgagtcaagcagagaaagtgaaagcttggctggaggagaaggaaaacctgcagaaaaatacccctgtctatagctcaccagttttcacatctgaacaagtttatgagaaagttctggacttacaagataaggtctcaagtgtcaacagaattccaaaaccaaaacccaaggccgagaagaaaatagcagaggaagagcctgctagcaaggggaaaaccacatcttcggaatctgcacccaacgagggtgagtacaccgaaacgtctcaggaacctaaggctcgagaaggggatcattcagcatcagccaacagtagtgatttagatcctgaatctcacgacgagttgtgagtagcagaatccatagaaacaggtaggaaagattacgcatatatagtacacaagaaggcagtttgaggataaattttggttgctcaaatttccccaatttttatttgacgaccaaaagatgaggctatgtagtagggtgccgaggaatactagatgctgtagggccgaaatgattttatcggtagtttctgattgctcattgctgtaaggcagctttatattggtgtaagttactcgcctcaaaggcgttattcaggatctagaaacgctttgttgtgctgaactcatttcatttttttgacgagtaacgctatatagattctacgccaagagtattgttgtaatgaattcatttgattttttaaacgagaaattctatatagattttacatcaatctttg

SEQ ID NO: 210649 - DNA, 2782 bp, Zea Mays
atgctgagctcgtcggcgtcgaggcgggaggccgcggcggcgcgggcaaccaagaacggcgagctccccaagtcggccgctgccgtcgcctggaaggacgtcgcggccaccgccaggagcggcgagctgtccaaggcggtgactggcgccgagctctccaaggcggtggccgccgtcagggacgccgcggccgtgcaacacgaggggtggatggtgcgctacggccgccggaagatcggcaggtccttcttccacacgcgctacttcgtgctcgagagcaggctgctcgcctactacaagaagaagcccaaagacaacatggtgcccctcaagtcactgctgatagatgggaattgcagggtggaggatagggggctaaaaaatcatcatgggcaaatgatttatgttctctgcgtttataaccagaaagagaaggagcatcaaatcacgatgggtgcacatgatatcgaagatgcattggcctggaaaaagaaaatagagctcctcattgatcagcaaccagactctgcagttaaaacccataagtcgttcgctacaatagactttgacatggaccttggagggcagttctccttgtcagatcatgacagtgcagctgaagatgaagaggaacgacctactttagttcgcaggacaactatagggaatggtcctcccgattcaatacatgattggaccaaagatgctgattttggtatgtccggtcagaatgagcccactcaactctattctaagaagaattggcgactacttcgatgccaaaatgggttgcgcatttatgaagaacttctggaagttgaataccttgcaagaagctgtagccgagctatgagggctgttggagtagtggaagccacatgtgaagccatttttgggctgatgatgagcatggatgcaacaagatatgagtgggactgtagctttcgccagggtagtttagttgaagaggttgatggtcacactgcagtactatatcataggttgcaattgcattggtgtccaaggttgatctggcctagggatctgtgttacgttcgatattggcgacgtaatgatgatggaagctatgttgtgctatttcggtctacagaacatccaaactgcatccgtcagcgaggatttgtgagagcttttattgaaagtggagggttcaagatttgtcctcttaagtgtcgcaatggaagaccccggactcaggttcagcaccttatgcagattgatctgaagggatggttcttgaactactctacttcctttcagtatcattctttgctgcagatactgaactgtgttgccgatgatattcatataactccaaggattcctgcaatggagagcatggctgatgtgaatttagcacaaaaggacgagaagcttaaagaagttgactccaaaactaaaccagaagatcaacaacaagcagaaaataaaaatatgggaacaattgatgaagaatcagatgacgatgaggactatcatgttcctgaagctgatatagaggaaatcactaacaaatctgacaatgaagctaaacacacagatgagcctccagaaaaaattgatttatcttgcttttctgggatacttcatcatgatccggatgagaaaagccgcaactgttggacagtacctgatagcaagcttttcaagttcgtagcaagaatttcccaaatgacaaatcgaagatacctgctgcaagttatctcatggagcttgcagccattgattggtttaaggacaccaagcgtatggataatgttggcaggcagaaaaattgtgttgctcaggttgctgctgagaaagggatgcatacattcattgtcaacttacagattcccgggtcaactcactatagcatggtcatgtatttcgtcacaagttccttgaaaaagggatcattactgcagcgcttctttgatggcgatgatgacttccgtaacagcaggctgaagctcataccatcggttccaaagggctcatggatagtgcgacagagtgttggcagcaccccttgtttgttggggaaggctgtggattgtaactattttcgaagtcctgggtatttggaggtggacgtcgacattggttcttctgcagtagcaaacggagttttgggcttggtgtttggtgttgtcacaacattagtagttgatatggctttcctaatacaggcaaacacatatgaggagctcccagagcaagttataggcgcagctcgtctatctaacgtggaaccgtctacagcagtagttcctgaccttgaaaataacagcgacggcaacaaagataacagcagtaacgacgctacgtcctctgaggatgattcgtcaaagaagaccaactgattctacctttctttaaagatttcgaaagaccaactgattcaacctttatttgaagatttcgatgagagccgcaggtgtctagttcattttttctccttttaacttctgtgctgtgcacgtatcttcgcgggcttgcaccagattgcagtctggtacatctcctttggcgccttcaattgagtccagaatttcacatgatctcctgtatccttctccattacagtccgctcttgccttatccatgtacatgctgctaccagacttggtgtagatagtactatgtgatgaacacgttcaactcagtaactgatcatctgagttgtagtgcttgctttgtgtgggtaaccaacacatgatggtggtgtgcttagcttaatgcgtagatatcaacaactgggttgtgtgtccaatggttg

SEQ ID NO: 210650 - DNA, 2366 bp, Zea Mays
cttccaaccgctccctccccttcctccgtctccacgtcgatcgcgcccccccagaggccagaccgtgcgtcgcgcgccaaggggaagatgctgagctcgtcggcgtcgaggcgggaggccgcggcggcgcgggcaaccaagaacggcgagctccccaagtcggccgctgccgtcgcctggaaggacgtcgcggccaccgccaggagcggcgagctgtccaaggcggtgactggcgccgagctctccaaggcggtggccgccgtcagggacgccgcggccgtgcaacacgaggggtggatggtgcgctacggccgccggaagatcggcaggtcctcccgattcaatacatgattggaccaaagatgctgattttggtatgtccggtcagaatgagcccactcaactctattctaagaagaattggcgactacttcgatgccaaaatgggttgcgcatttatgaagaacttctggaagttgaataccttgcaagaagctgtagccgagctatgagggctgttggagtagtggaagccacatgtgaagccatttttgggctgatgatgagcatggatgcaacaagatatgagtgggactgtagctttcgccagggtagtttagttgaagaggttgatggtcacactgcagtactatatcataggttgcaattgcattggtgtccaaggttgatctggcctagggatctgtgttacgttcgatattggcgacgtaatgatgatggaagctatgttgtgctatttcggtctacagaacatccaaactgcatccgtcagcgaggatttgtgagagcttttattgaaagtggagggttcaagatttgtcctcttaagtgtcgcaatggaagaccccggactcaggttcagcaccttatgcagattgatctgaagggatggttcttgaactactctacttcctttcagtatcattctttgctgcagatactgaactgtgttgccgatgatattcatataactccaaggattcctgcaatggagagcatggctgatgtgaatttagcacaaaaggacgagaagcttaaagaagttgactccaaaactaaaccagaagatcaacaacaagcagaaaataaaaatatgggaacaattgatgaagaatcagatgacgatgaggactatcatgttcctgaagctgatatagaggaaatcactaacaaatctgacaatgaagctaaacacacagatgagcctccagaaaaaattgatttatcttgcttttctgggatacttcatcatgatccggatgagaaaagccgcaactgttggacagtacctgatagcaagcttttcaagttcgtagcaagaatttcccaaatgacaaatcgaagatacctgctgcaagttatctcatggagcttgcagccattgattggtttaaggacaccaagcgtatggataatgttggcaggcagaaaaattgtgttgctcaggttgctgctgagaaagggatgcatacattcattgtcaacttacagcgcttctttgatggcgatgatgacttccgtaacagcaggctgaagctcataccatcggttccaaagggctcatggatagtgcgacagagtgttggcagcaccccttgtttgttggggaaggctgtggattgtaactattttcgaagtcctgggtatttggaggtggacgtcgacattggttcttctgcagtagcaaacggagttttgggcttggtgtttggtgttgtcacaacattagtagttgatatggctttcctaatacaggcaaacacatatgaggagctcccagagcaagttataggcgcagctcgtctatctaacgtggaaccgtctacagcagtagttcctgaccttgaaaataacagcgacggcaacaaagataacagcagtaacgacgctacgtcctctgaggatgattcgtcaaagaagaccaactgattctacctttctttaaagatttcgaaagaccaactgattcaacctttatttgaagatttcgatgagagccgcaggtgtctagttcattttttctccttttaacttctgtgctgtgcacgtatcttcgcgggcttgcaccagattgcagtctggtacatctcctttggcgccttcaattgagtccagaatttcacatgatctcctgtatccttctccattacagtccgctcttgccttatccatgtacatgctgctaccagacttggtgtagatagtactatgtgatgaacacgttcaactcagtaactgatcatctgagttgtagtgcttgctttgtgtgggtaaccaacacatgatggtggtgtgcttagcttaatgcgtagatatcaacaactgggttgtgtgtccaatggttg

SEQ ID NO: 210651 - DNA, 1286 bp, Zea Mays
attcttattttaaagagacatgtactgttgaggttaaccaacataatctgggaaaataaagggattacaattaagcatgtgtatcactaaaaagatagtttcttttctggaaatcacactctggtcaggtctattttggttgttagctgaaacaagttttcttgttgaaaagaacacaatatgactagactgggtcatgacttcaataccttatcgttgttttgtttaggctgtgtttgtttatgcagtggccggaaatgagttcgtaattattgtatcaactcgatgtaatgattgtgaattaataaaatcctccgcttagcaaaaaaggacaggcctgacgcagtggtgaaaagtcttcccactatgccaaaggttctgaattcgacgcagcctctctgcaaaatgctgcgttttgttaggatcacagaaaggctcttgcagatagggagtttgaagcattacaggataggatttctgggaagatgataaattttcgaagagtttcttgcataaacgggactgttccactgtccccatcattaatgtcagctgaggaactttgttctatgtgcaagtttgtggaggatggaaaagagagattagtagttggtagtttagaccttaatcagtgtctttggctaccagatgaattgactggaaagaggcctggggtaaatgaagacatccagacaagagcatatctaagcaatgtctgtgttgccaaggagcttcagaaaaaaggcttaggctatacattagttgacaaatccaagaaattagctcttgaatggggcataacagatctgtatgttcatgtcgccatcaacaacgtagcagggcaaaagctgtacaagaagtgtggatttgtttatgaaggcgaagaacctgcatggaagggtaggtttctggggagaccaaggaggctgcttctttggcttgatatgagcaaagtgcttgtgcgatcgtgcatgtaaatacatatttagctatttgtaatcatattattgcaattgttggttttaatattcgacccaaatctccaattgattgcagtctgaatcatccctcttttctgaccacacctttctcaacgatgtcctacaaaagtttttggaggcagattaggaacaaaatcctagaaatgctttagatgttacacaaagggcagttggatttggaaagaattgattatgggggtgattgtgttgttgccaaaaattaaaggggcataccatgtaagagcaactcaaacaaaggtgttgaattatgtcatatcttaaaat

SEQ ID NO: 210652 - DNA, 1219 bp, Zea Mays
ataagccaaacactccggcagctgtggtggagacgcctccgcctcccaaacacccgaatcaaactaacagccaccgatggcgtcgccatcgcggttgctcccgcccacgcctccttcggccgcccagccccgcggcccgcgggatcgcctcgccttgccgcgcctccggtgcctcgccgccgccgcagcctccgcctcgcccactgatggcgctgtgctgctggagcgtggcggttccgcggcggtggccgtgcgggagttcgtcacgcttgacgagctccgcgctgccgtgcgcctccgcgtccgcaccttccacgagtacgcagacgactccgtcggaaccgagttttgttaggatcacagaaaggctcttgcagatagggagtttgaagcattacaggataggatttctgggaagatgataaattttcgaagagtttcttgcataaacgggactgttccactgtccccatcattaatgtcagctgaggaactttgttctatgtgcaagtttgtggaggatggaaaagagagattagtagttggtagtttagaccttaatcagtgtctttggctaccagatgaattgactggaaagaggcctggggtaaatgaagacatccagacaagagcatatctaagcaatgtctgtgttgccaaggagcttcagaaaaaaggcttaggctatacattagttgacaaatccaagaaattagctcttgaatggggcataacagatctgtatgttcatgtcgccatcaacaacgtagcagggcaaaagctgtacaagaagtgtggatttgtttatgaaggcgaagaacctgcatggaagggtaggtttctggggagaccaaggaggctgcttctttggcttgatatgagcaaagtgcttgtgcgatcgtgcatgtaaatacatatttagctatttgtaatcatattattgcaattgttggttttaatattcgacccaaatctccaattgattgcagtctgaatcatccctcttttctgaccacacctttctcaacgatgtcctacaaaagtttttggaggcagattaggaacaaaatcctagaaatgctttagatgttacacaaagggcagttggatttggaaagaattgattatgggggtgattgtgttgttgccaaaaattaaaggggcataccatgtaagagcaactcaaacaaaggtgttgaattatgtcatatcttaaaat

SEQ ID NO: 210653 - DNA, 3970 bp, Zea Mays
gaacatattcattaagtcttggtcagaataaatttgtacgttggacttgctatcagcacagaaataggacaacttcagtacagtaccatacccacaaggaaactagtccacaatttcatcaagaaggtctttaaaatttatgtctgaaccaacaacttgcataccatggtcctcagttcctcacaattgggagtaattatactgatttttagattgaaactggtctcaatgtcatttctacatatgaaccatatagagtttactcacatatacacatttcaatccaatcctaacgacacatggcactactgttatgcattcgaagaaagaaaacaagaagcgctcacgccgtcacgcgtccggaagccaagctggtcgcccgtccgccatcctttccaaatctgcaccaaatcggcctcctgcctgaaacacacgcgaggggccttctcccgcggcctccccgctcgcgtagccccggcgcccgctctctgctgctctagggtttgccttcaatggggaaccagaaaaggcggggattgatgagttagagacattcatgggcaaaagggtcatttcgcgtctagttggcaccaagagccgtagcgggctagtggcgactgactggggtcggggtcgggcgaggcattcctccctctgcgctttgctggcaacgacgacgaatagggttctgtagggaccgagattctggatacctcactcccttgattcagaatgactccactgagtcattgctccgttggcaatgtcagcctgtttcacatcggaagctacaggaccacccgagaaatccagataagaaggttccagggctcggcgaggtattcgagagtagcatcgccgtcgcctcggagactgctgcagccgcaaacagcgttccacctgatcagtatctacaagagaagaagctggtcctctccccagaggccaagaaccttgtccgcggcgaccgtggggactgatgtcactgtggaggatctgaatccgtctccctcggaggaagcctccgatgggaactctgaggctgcacctgacgccgttgatgcgagcgagcaggccgaggctagcacgggacaagcctcttctgctcgcaaattgggacgcaacatacggaagagcgagatgcctcctctgaatgaggaggatctagtgcctggcgcatcttttactgggaaggtgatgtctatcaagccattcggagttttcgttgacattggggcattcacagaaggccttgtccatatctccagagtaagtgatgggttcgtgaaagatatatcttctctcttcactgttggacaagaggtgtcagtgagattgcttgaagcaaataaggaaacaaagcgtatctctctgacgatgagggaaggcgatgactatgtcaagcctcaaaaagaaatgccgaaggctgcaaatggtgggcggagtgccaccgcaactcctaaaagctcgccaaggcaaacaagggaaaggcaggaactcaaggagacacttgagtcaaaatatgtaccagggcaatctctgaatggcactgtgaaaagcacaacgagagcagggacatttgtgacgttgcctgatgggagtgaaggattccttcccagagaagaggaagcattggcgttatttacccttatcggacaatctgcaatggaaattggtaaacagataagggttaaagtactgaatgttgcacagggtcaggccactttgacgatgaaaggggtggaagatgatgaagacgatctgaagacgctaaatatggagcttaagcgggactggtccagagggactaatgcgttcgagttggctttccgtaggaacaaagagatatctgcattcttggatcagagggaaaggaccaaagtgccggctgatacttcagtttctgctccggaagctgaaagctatcaggaggaagctgctccagaagatgaggaaagtagtgaagaattgagctctgtgtcagaagtagcaactgatgtttctcctcctgtatctgatgcctcctctcaggtgggaattcagtattctacttctgtggcaaatgctgctgaggaccaaactgtaggatctgaaagttcacctacaattagtgttgaactgtcctccaacgggaccccagatagctctattgtgtcttcagtttcagaaactgcagataaacctactgaacctgaagaatcttcagcggtagaagaggttcttgtaactgcaagcagcgaggcagggaaagaaccagctgctgacactgaggctgtaccagccttgaatgagaaaactggtgccgaggttgctgctgctgctggagttgcacaagcaagcaccacgacagccactatttctcctacccttgtcaagcaattgcgtgaggcaactggagcaggcatgatggactgcaaaaaggctcttgctgaaacagggggtgacatagataaagctcaagaattcctacggaagaaagggttggcggctgctgacaagagggctggcagagcaacagctgagggaagagttggctcttacatacatgacagcagaatcggggtccttattgaagtgaattgtgagactgactttgtgtctcgaggtgacattttcaaagagttagttgacgatcttgccatgcaaattgctgcttgccctcaagtgcagtacatctctattgacgacgtccctgaggagcttgtgaagaaggagaccgagctggagatgcagagggaggaccttttgtcgaagcctgagcagatccgggctaagattgtcgaagggcgtgtaaagaagaggcttggagaattcgcgttgttcgaacagccattcatcaagaatgacaaggtcacaataagtgagtggctgaagcaaactatagctacaactggagagaatatgaaggtcaggagatttgcccggtacaacctaggtgaagggctggagaagaaaagccaggattttgctgctgaagttgcagcccagacagcagcgaagccgccaccatctgctcctcccaaggaggacaagcctgctgaaacaacagaatccgccgagaagaagccggctgttgcagtttcagcctcgttggtgaagcaactccgagacgaaaccggcgctggcatgatggactgcaagaaagctctggccgagtctgacggcgaccttcagaaggctcaggagttcctgaggaagaagggcctctcatccgcagacaagaaatcctctcggctagccgccgaaggactggtcggctcctacatccacgacagccgcatcgggtgcatgatcgaggtcaactccgagaccgacttcgtggcccgcaacgacaagttcagggagctggtgaacgacctcgcgatgcaggtggtagcgtgtccgcaggtcgactacgtctcggtggacgacatcccggagagcgtcgtcggcaaggagaaggagatcgagatgcagagggaggacctgcagtcgaagcccgagagcatcagggagaagatcgtggaagggcggatcgcgaagaggctcggcgtgatggccctcctggagcagccctacatcaaggacgacagcaagacggtgaaggatctcgtgaaggagacggtcgcctcactcggggagaacattaaggtgcggaggtttgtccggtacaccctgggcgaggactgatcggtgtgaggtcgggcagcgatccctccgtcgcagcgcagcgcagccctggcatgagaagtcgggcacgtttttggcatgagaaggtctgtgactcggttccatctgtaattccgtatcacctgttactgctgttcgtggttcagaagagtaagaggggttggttagtatatccatcaaagcatatatatatatacaacattaaggcaaattgaattttgtatcttttatctgtgcttcgtttcaaaacatgatcgaattgtagcatggacgtatggtcttggccaatgtaattgtcttg

SEQ ID NO: 210654 - DNA, 3280 bp, Zea Mays
ttgtcagtgcagccaagcaaaacaatggtgcctttaaattttcatgcagcttccagtttttgtttgggttctgtagggaccgagattctggatacctcactcccttgattcagaatgactccactgagtcattgctccgttggcaatgtcagcctgtttcacatcggaagctacaggaccacccgagaaatccagataagaaggttccagggctcggcgaggtattcgagagtagcatcgccgtcgcctcggagactgctgcagccgcaaacagcgttccacctgatcagtatctacaagagaagaagctggtcctctccccagaggccaagaaccttgtccgcggcgaccgtggggactgatgtcactgtggaggatctgaatccgtctccctcggaggaagcctccgatgggaactctgaggctgcacctgacgccgttgatgcgagcgagcaggccgaggctagcacgggacaagcctcttctgctcgcaaattgggacgcaacatacggaagagcgagatgcctcctctgaatgaggaggatctagtgcctggcgcatcttttactgggaaggtgatgtctatcaagccattcggagttttcgttgacattggggcattcacagaaggccttgtccatatctccagagtaagtgatgggttcgtgaaagatatatcttctctcttcactgttggacaagaggtgtcagtgagattgcttgaagcaaataaggaaacaaagcgtatctctctgacgatgagggaaggcgatgactatgtcaagcctcaaaaagaaatgccgaaggctgcaaatggtgggcggagtgccaccgcaactcctaaaagctcgccaaggcaaacaagggaaaggcaggaactcaaggagacacttgagtcaaaatatgtaccagggcaatctctgaatggcactgtgaaaagcacaacgagagcagggacatttgtgacgttgcctgatgggagtgaaggattccttcccagagaagaggaagcattggcgttatttacccttatcggacaatctgcaatggaaattggtaaacagataagggttaaagtactgaatgttgcacagggtcaggccactttgacgatgaaaggggtggaagatgatgaagacgatctgaagacgctaaatatggagcttaagcgggactggtccagagggactaatgcgttcgagttggctttccgtaggaacaaagagatatctgcattcttggatcagagggaaaggaccaaagtgccggctgatacttcagtttctgctccggaagctgaaagctatcaggaggaagctgctccagaagatgaggaaagtagtgaagaattgagctctgtgtcagaagtagcaactgatgtttctcctcctgtatctgatgcctcctctcaggtgggaattcagtattctacttctgtggcaaatgctgctgaggaccaaactgtaggatctgaaagttcacctacaattagtgttgaactgtcctccaacgggaccccagatagctctattgtgtcttcagtttcagaaactgcagataaacctactgaacctgaagaatcttcagcggtagaagaggttcttgtaactgcaagcagcgaggcagggaaagaaccagctgctgacactgaggctgtaccagccttgaatgagaaaactggtgccgaggttgctgctgctgctggagttgcacaagcaagcaccacgacagccactatttctcctacccttgtcaagcaattgcgtgaggcaactggagcaggcatgatggactgcaaaaaggctcttgctgaaacagggggtgacatagataaagctcaagaattcctacggaagaaagggttggcggctgctgacaagagggctggcagagcaacagctgagggaagagttggctcttacatacatgacagcagaatcggggtccttattgaagtgaattgtgagactgactttgtgtctcgaggtgacattttcaaagagttagttgacgatcttgccatgcaaattgctgcttgccctcaagtgcagtacatctctattgacgacgtccctgaggagcttgtgaagaaggagaccgagctggagatgcagagggaggaccttttgtcgaagcctgagcagatccgggctaagattgtcgaagggcgtgtaaagaagaggcttggagaattcgcgttgttcgaacagccattcatcaagaatgacaaggtcacaataagtgagtggctgaagcaaactatagctacaactggagagaatatgaaggtcaggagatttgcccggtacaacctaggtgaagggctggagaagaaaagccaggattttgctgctgaagttgcagcccagacagcagcgaagccgccaccatctgctcctcccaaggaggacaagcctgctgaaacaacagaatccgccgagaagaagccggctgttgcagtttcagcctcgttggtgaagcaactccgagacgaaaccggcgctggcatgatggactgcaagaaagctctggccgagtctgacggcgaccttcagaaggctcaggagttcctgaggaagaagggcctctcatccgcagacaagaaatcctctcggctagccgccgaaggactggtcggctcctacatccacgacagccgcatcgggtgcatgatcgaggtggtagcgtgtccgcaggtcgactacgtctcggtggacgacatcccggagagcgtcgtcggcaaggagaaggagatcgagatgcagagggaggacctgcagtcgaagcccgagagcatcagggagaagatcgtggaagggcggatcgcgaagaggctcggcgtgatggccctcctggagcagccctacatcaaggacgacagcaagacggtgaaggatctcgtgaaggagacggtcgcctcactcggggagaacattaaggtgcggaggtttgtccggtacaccctgggcgaggactgatcggtgtgaggtcgggcagcgatccctccgtcgcagcgcagcgcagccctggcatgagaagtcgggcacgtttttggcatgagaaggtctgtgactcggttccatctgtaattccgtatcacctgttactgctgttcgtggttcagaagagtaagaggggttggttagtatatccatcaaagcatatatatatatacaacattaaggcaaattgaattttgtatcttttatctgtgcttcgtttcaaaacatgatcgaattgtagcatggacgtatggtcttggccaatgtaattgtcttg

SEQ ID NO: 210655 - DNA, 1955 bp, Zea Mays
cgcagcagctccgaaccttctcccagtcccaggcagccagcgcaggaagctcaccgggaagccggtgcaatcacacaccacacatccccgctacaaatcccagcccccggtcgacatccctcccactcctcccccatgcgcaccggcaccggcaccggcagctcaccgatccccggagccgctactataagtacaaagcttccccggcggcggtccacccggccatggcggcagtcggagcgcgcccagtgctgtaccaccaccacccccacccggcgccggcgggcggcgcccccgcccccatgtcctcttcctacttctcccgcggcggaggcagctccagccccgcgtccagcctctccgccgcgcacttggacatatccgagttcctcttcgacgacgcctccgtcgtcgtgccgccggacgccagtggtggcggtgcgatcagcgcaggcggcgctgggagcgcggcggcgccggagcggccgcgcacggaccggatcgcgttccggacgaggtcggaggtcgaggtcctggacgacggctacaagtggaggaagtacggcaagaagtccgtcaagaacagccccaacccaaggaactactaccggtgctcgacggaagggtgcaacgtgaagaagcgggtggagcgggacagggacgaccccggctacgtggtcaccacgtacgaggggacgcacaaccacgccagccccagcacggtgtactacgccagccaggacgccgcctccggccgcttcttcgtcgccggcacgcagccgccggggccggggctgtaataagatgtacagactctgtcccaatggatgttggacccgattcttagttacatcttgtatgcagtgcaggtgtggctgaacgctccccaggcaggaggcatcagtcgcagcccttggctacgccggccgtgccaccaggccctagccatgtttgcagactccgcatgggtaggcactgaagcaaactagtagacctttttggctcttgtacacaaactgaactatatgaaactttggtactacttttttttccctgtcaaatataccccctccggccttccattcatcaggtatgtttgtatgagattgcaagcccagtgtgtgtgtgtgtgtgtgtgggagttacaatatacacgctgacacaccaacaccaaactacacactggaccctggagtacaaaactgtcatctgatacagcgatgggtagagaggccttgaatcatgaaggttacagcgcgttaattttagtgatcgtctcagccgcttggctctttacaagctcgactatcatacagcattaggggcatactaagtgccagggggggctcacggtagagatgccgattggagagatttttagccaacagaaacaagagcggggttgagcgccataaccctccacggaaaacgcatctaccatatatacatgtacaattcttgacgcccaacggacccaaaaaaaaaactgtgggccggtcaagtctcgtgcggacgaccagctagcacctagcagcagttctttggccatgccatggtcagctcagctctactgtgatggacccagaacgcccgatgctacgagttgctcctgagcttttctttcgaggtttcaggtcaaccacgatgacggtgacgttgtcctcggtacccttcttcagcgcgaccctcacgagataatccgctgcggcttgggcagcggggtcggtggtggatccatcaccctcgtcgcacaacgaccacgatgcgccagcggcaccgttgttcttgtgccacacttggatttgccggcgcgcagctttgcatgcctcttcgttcgtcaccacatcccacagcccatcgcttgcgaggatgagacagtcgtcatctttcgccctgggaacgaccgtgacctctggttttggaatcacgaacggcttcagataccggtccccaat

SEQ ID NO: 210656 - DNA, 1537 bp, Zea Mays
tcgacatccctcccactcctcccccatgcgcaccggcaccggcaccggcagctcaccgatccccggagccgctactataagtacaaagcttccccggcggcggtccacccggccatggcggcagtcggagcgcgcccagtgctgtaccaccaccacccccacccggcgccggcgggcggcgcccccgcccccatgtcctcttcctacttctcccgcggcggaggcagctccagccccgcgtccagcctctccgccgcgcacttggacatatccgagttcctcttcgacgacgcctccgtcgtcgtgccgccggacgccagtggtggcggtgcgatcagcgcaggcggcgctgggagcgcggcggcgccggagcggccgcgcacggaccggatcgcgttccggacgaggtcggaggtcgaggtcctggacgacggctacaagtggaggaagtacggcaagaagtccgtcaagaacagccccaacccaaggaactactaccggtgctcgacggaagggtgcaacgtgaagaagcgggtggagcgggacagggacgaccccggctacgtggtcaccacgtacgaggggacgcacaaccacgccagccccagcacggtgtactacgccagccaggacgccgcctccggccgcttcttcgtcgccggcacgcagccgccggggccggggccgggctccctcgtcaactaatattatccatcccgacggccgtgtaataagatgtacagactctgtcccaatggatgttggacccgattcttagttacatcttgtatgcagtgcaggtgtggctgaacgctccccaggcaggaggcatcagtcgcagcccttggctacgccggccgtgccaccaggccctagccatgtttgcagactccgcatgggtcaaccacgatgacggtgacgttgtcctcggtacccttcttcagcgcgaccctcacgagataatccgctgcggcttgggcagcggggtcggtggtggatccatcaccctcgtcgcacaacgaccacgatgcgccagcggcaccgttgttcttgtgccacacttggatttgccggcgcgcagctttgcatgcctcttcgttcgtcaccacatcccacagcccatcgcttgcgaggatgagacagtcgtcatctttcgccctgggaacgaccgtgacctctggttttggaatcacgaacggcttcagataccggtcccctgcagcgagtgtttccaacttcgagttagcaaaaaaaaaaggtgacggagaattggacaaatgctacccaattccaacccacagagaagtcagctgaactgctggttcaactaaattttctagtgaaattgggggaaacaatattgtccgggagttttaacatgatggcgtatgtgtatctgatctgaagatggcgatgaatgtgagcatttccagacaagatacattgatggttaggcatggtccaagctgcaagtgccacttgcaggaaccatgccatgaggtacctttgccgtgtcgattaaagttgtcttttctac

SEQ ID NO: 210657 - DNA, 1243 bp, Zea Mays
gacgcaccgcacaccctagcataggaggcaaagaagtacagagggaggaggcgggcagcagatacgcggcgtgacagacacccagggccaggaagggtgctgtttatccatgctgctccggctgaagatcgtcgtcggcgtccactcggtggtgctcccggttcctgttccaggcggctatggccatggcgcctgctacgcggcagtagagccctgctggcgccgcagccggaggccagcgctagcggcggcgggtggcctcgtcgcgaggcggccgaggcagagcgccacggtggtgatggcgctgaaggaggagccggagggcagcagccgccgcggcttcgccggcggcggtccgagctgggaccccgggctggagatccaagtccccttcgagcaaagaccggtgaacgagtactctgctctcaaggatagcgccctctactcgtgggcggagctgagcccagggtccttcttcctccgcctcggcggcctgtgcctcgtgaccttcactgtgctcgcggctccaattgccgccgcaagcttcaatccaggaaaggatccactcaagttcgtgctagcagctgggatcgggacgctgcttctggtgtcactggcggttctcaggatatacctggggtggagctacgttggtgatcgcctgctgtcagcggtggtaccgtacgaagaaaccggatggtacgacggccagatgtgggtgaagccaccagaggtgttggcccgtgacaggctcctgggatcttacaaggtgaagccggtggtcaacctgctgaagcagacgctggtgggcaccggcgcgctgctcgtgggcgccgtgtcgctcttcgcgttcgccgcgccggtcgaggacttcctccacgccctgagccagcctccctcctccgccaccgcctcgtccaagccgagcttgaggtgcgcggccgtcacgtactcacgtgtgcccacggtccacggcgaacatatgctgcaagcaaagctctttgcatggtgcgtctcttctcttgttaactgcagcttcgtttcatgatgcgtgcaacgcatcgcccctacgcaggaaggaggagctgctgcggctaccagtcgaggtgatgcaggacgacgacctcgctgcggccgcggccgaggccgccgacggccggcccgtctactgcagggaccgctactaccgggccctcgccggcggtcagtactgcagctcctagattcataaggagaaggagaa

SEQ ID NO: 210658 - DNA, 1580 bp, Zea Mays
gacgcaccgcacaccctagcataggaggcaaagaagtacagagggaggaggcgggcagcagatacgcggcgtgacagacacccagggccaggaagggtgctgtttatccatgctgctccggctgaagatcgtcgtcggcgtccactcggtggtgctcccggttcctgttccaggcggctatggccatggcgcctgctacgcggcagtagagccctgctggcgccgcagccggaggccagcgctagcggcggcgggtggcctcgtcgcgaggcggccgaggcagagcgccacggtggtgatggcgctgaaggaggagccggagggcagcagccgccgcggcttcgccggcggcggtccgagctgggaccccgggctggagatccaagtccccttcgagcaaagaccggtgaacgagtactctgctctcaaggatagcgccctctactcgtgggcggagctgagcccagggtccttcttcctccgcctcggcggcctgtgcctcgtgaccttcactgtgctcgcggctccaattgccgccgcaagcttcaatccaggaaaggatccactcaagttcgtgctagcagctgggatcgggacgctgcttctggtgtcactggcggttctcaggatatacctggggtggagctacgttggtgatcgcctgctgtcagcggtggtaccgtacgaagaaaccggatggtacgacggccagatgtgggtgaagccaccagaggctcctgggatcttacaaggtgaagccggtggtcaacctgctgaagcagacgctggtgggcaccggcgcgctgctcgtgggcgccgtgtcgctcttcgcgttcgccgcgccggtcgaggacttcctccacgccctgagccagcctccctcctccgccaccgcctcgtccaagccgagcttgaggtgcgcggccgtcacgtactcacgtgtgcccacggtccacggcgaacatatgctgcaagcaaagctctttgcatggtgcgtctcttctcttgttaactgcagcttcgtttcatgatgcgtgcaacgcatcgcccctacgcaggaaggaggagctgctgcggctaccagtcgaggtgatgcaggacgacgacctcgctgcggccgcggccgaggccgccgacggccggcccgtctactgcagggaccgctactaccgggccctcgccggcggtcagtactgcaggtgggacgacctgctcaactgataaatacctagagcagtattgctgtggtacgacgcggcaggacaggacgtattttttttgtcagatgggaaatttcggactgaactgctagaaattgagttcttaatggcacacaagcataaggaacagcaagaaaaagcaacacagaatcagagaaaaaacaagagtttatatattcacttttctctctttgtttctggagttacatctggtctttccgtttcttgagttacctctgatctttttgtttcttgagttacatctgtagagagtgaccttttatttacagcaaaggatgcaagggttaatacacattacagtgtgtacttctcagtttctcccctctaactaattttgcc

SEQ ID NO: 210659 - DNA, 826 bp, Zea Mays
caaatttatatcctttctccccgtacgatcgttcagattgacggccatgatgcaccctacgagaagcttccctttctccttgtccttgcaaccctccgccctttcggttgtcgcaatataaacttgccggggagcgtggcgaccatttgcccccagcagatcttgtgaccctccctcagccgcgtcgcgtcgcatcctacgatccaaagctctctctggtcgcaggtcgcagccatggcgaagaactacccgaccgtgagcgccgagtacagcgaggctgtggacaaggccaggcgcaagctccgagccctcatcgccgagaagagctgcgccccgctcatgctccgcctcgcgtggcactccgcggggacgttcgacgtgtcgtcgaggaccggcggtccattcggcacgatgaagcatcagtcggaattggctcacggcgctaacgcggggctggacatcgcggtgcggctgctcgagcccatcaaggaggagttcccaatcctctcttacgccgatttctaccagctcgcgggagttgtggccgtggaggtcaccggtgggcctgagattcccttccaccccggtagggaggacaagcctcagcccccacctgagggccgccttcctgatgccactaagggttctgaccacctgaggcaagtttttggcaagcagatgggcttgagcgatcaggacattgttgccctctctggtggccacaccttgggaaggtgccacaaagagcggtctggtttcgagggggcctggactacaaaccctttggtctttgacaactcttacttcaaaaatcaatctattccat

SEQ ID NO: 210660 - DNA, 756 bp, Zea Mays
atgatgaattgattggttctgaccacctgaggcaagtttttggcaagcagatgggcttgagcgatcaggacattgttgccctctctggtggccacaccttgggaaggtgccacaaagagcggtctggtttcgagggggcctggactacaaaccctttggtctttgacaactcttacttcaaggaacttctgagtggtgataaggagggccttcttcagctcccaagtgacaaagccctgctgagtgaccctgtcttccgccctcttgtcgagaaatatgctgcggatgagaaggctttctttgatgactacaaagaggcccacctcaagctctccgaactggggtttgctgatgcttaaatagaccctatcctggagtgatacattctgctgcatgtggtcttttgcatctggagtcaatgtgaacaagcagattgtcgtattgtctttctcgtaataaatttgtcaatgttgagcccttaggcttgaattgtgggaccctttgttcgttttcctagactctgatgctgtatgcaactgaaacgagtaaatctatgatcttaaggctgcagtatgttcttgtgttactgtgcgtttatctagtttccgttggttcggttcacagcttgtgtggtttaataggttgtgcttgtgctgcgtgactggtcgtgcaacttgagtccgagtcttccatagttccaattttctcttggcggctaacacacttgatgtgccttgctatcctatgatcggagta

SEQ ID NO: 210661 - DNA, 3612 bp, Zea Mays
aaagcacaccatcttctgtctacataaacaagctacctgcagcgcgatgtgctccactgcagtgctgctagttcgcacaggcgttgtgcttgtgtgtttggccgccttggcgcgagcgccgagcaaggtccatgctgccgccggcaccggggatgggctccttgctatccctaccaacgcctccctgtcgcactgcccctcttggtgcggggatgtccaaatctcctacccgttcgggatagggccgggctgcttccgtcaaggcttcgagctcacctgcgatcacacagctccttctcccaggctcttcttcgtgtcggggaacagctcgatccaggtgacttctgtacatatcggcatcagtagggttcgggtttcagctgttgggttcaacgtcaccatgagcgcaggcgtggacacctacacccagtcctggaaggcccctccaggtgtcatttcttatggaagtaattatctgttcactgttggatgtggtgtctacgtctacgtgttcggtgataatatgacagatatcattggttattgcacgagtatttgcacagataacagagagatcatggagagggcaaacacgccttatagtgcctgtacagggttaggctgctgcatgattccaatacgtggcggccaaggcatcactctcaaactaggtcgcctcaatagtaccattccacacttcggtgaagcgctctcccgtgtcaagattatcgtttcacaatactatgaattcgttgctgatgatgtttacacaagttgggtgaatacaagcaacgttgatgacatgctattttacattgcaatcatggaccaaccgagctgcgcgagtgcccagtcccaagagaacaagaatacctacgcatgcagtagtgaaagcatctgcgacgacgatctaccaccagtagtatctcaaggaggctacaattgcttctgccctggtcgtcaaatagagggcgtcaacccctatattgaagatggctgcatagcatattataacccagaggcaccgagtattaggaactgtatgagattatgtggaaacataagcgttccatttccttttgggattgaagaaggctgctacgcaaatgataacctacgactcaactgcacaagcaacggcactcttattcttgatcgagggtacgcacaatatcatgtgaccaatttgtcacttgatgatgggcttttgatggttacaaacatgctgaatgccacaagcttcaacaatatggagagggtagtcatcactaactatgacggttactatcacaacaacttccaaccaacttacatggcggttgtggatggtaattatgatttctctcaggaggatacaacaataaaatgggttatagcaaacataacttgtcagaaagcaatgcaaaataatgctacatatgcgtgcgtaagtgacaacagtatatgcaaagatgtcatgcaagggaatatacgtgacgggtaccgctgcaagtgttctgatggcttccaaggaaacccataccttcaaaataattgtacagatattgatgagtgccttattccaaataaatgcaatggaatatgccacaattttgatggaggcttcaattgtacaagttgccctcacgggaaagagtatgatccaaaaaatcataaatgtgtcatgtcagctaagcagcgtattctaatttttgggattgtaattgggcttgtttgtggtcttggatccataagttttgcacttggtgcaattgtactcaccggtaagtggaaaaaaggtatccaaaggagaattcgaagagagtacttcaagaaaaatcaaggtctactcttggagcaactaatatcaaatgaaaatgccacaaacaaaacaaagatattcactttggatgaactagaggaagcaaccaacaagtttgatgctactcgtgttctaggtcatggtgggcatggcactgtttacaaagggattttgtgtgatcagcgtgtcgtggctataaaaaaatctaaaatagtggagcaaatagagatagatcagttcatcaatgaggttgctattttatctcaaatcattcaccgcaatgtggtgaaactttttggttgttgcctagaagatgaggattgcaacggaagcatcaggagcacttgcttatttacactcagctgctgcaataccaattttccatagagatgtgaagtcttctaatatactcttggacgacaacttcactgtaaaggtttcagattttggtgcttcaagatctctatcccttgatgaaacacatgtggtgacaattgtccaaggaacattcggttatttagatccagagtattatcatactggttctctaactgagaagagtgatgtgtatagttttggagtgatacttgtggaacttttgacaagaaagaaaccaatttttatcaatgaatcgggtgccaaacaaaacttatctcattacttcattgaaggactacaggaagggactctcatggaaataatagattctcaagttgtggaagaggcagaccaagaagagattaatgaaatctcctcacttatagaagcgtgcttaagatccaaaggaggacatagaccaagcatgaaagaagtagatatgagattgcaatgtctaagaacaaagaggctacggaataaaacacatcttttgattgaaaagggtggagaaatggaacctttgttatgcgcagaagctcagcacccacatgaacgtatcaatccaatttataatgaggaacgtttaacaattccaatgatgtctgggtgttacagtttggagcaagaacttgcggcagcatctagtatgattcgctaacttggtatttgcttggatgttggacacatctatagtaaccatctatttttagagaggaactatatggtatattttgttcctttcgcataagactatggtatatatggtgtgtatatgtatataatatatatgacattgctatgtttacatataatgtaatttccgtatttcaaactgtaatgcgttttagttttgttttgattacaaatttggtactctaattgtaatagtttctaaaaccaatcataatatatagttataatacacttgagatttggaatttgtattagtattgaaataaacttgagatttggacaatgtaatagcattgaaaagtagaatttttatatttttatcacttaaaaaatcaaaagaaattctatattaggtaaatatgaatattacaagcatgggattacactaattcatgctcttttttaagaactcgatgctgattctttgttttggtgacatgtattcattcgctatggtccaagcacacatctggagttcattctgtccttcaaggaaagttttggcgtaaacacaatggcaaaagagaaacttcattattaacgacctacattattaacattagtatcatcgtagaacctcaggaacaagtttatgtcgccaccgaggtgtaaaacctgttattttattttaatggctcgttgaagagatgccctttaatcttatttttttctttctaaatttaacttttaaaatggcttcgcttagttttttttgttatgtagatgtagtttatgtatcg

SEQ ID NO: 210662 - DNA, 3347 bp, Zea Mays
ggaaagcacaccatcttctgtctacataaacaagctacctgcagcgcgatgtgctccactgcagtgctgctagttcgcacaggcgttgtgcttgtgtgtttggccgccttggcgcgagcgccgagcaaggtccatgctgccgccggcaccggggatgggctccttgctatccctaccaacgcctccctgtcgcactgcccctcttggtgcggggatgtccaaatctcctacccgttcgggatagggccgggctgcttccgtcaaggcttcgagctcacctgcgatcacacagctccttctcccaggctcttcttcgtgtcggggaacagctcgatccaggtgacttctgtacatatcggcatcagtagggttcgggtttcagctgttgggttcaacgtcaccatgagcgcaggcgtggacacctacacccagtcctggaaggcccctccagataacagagagatcatggagagggcaaacacgccttatagtgcctgtacagggttaggctgctgcatgattccaatacgtggcggccaaggcatcactctcaaactaggtcgcctcaatagtaccattccacacttcggtgaagcgctctcccgtgtcaagattatcgtttcacaatactatgaattcgttgctgatgatgtttacacaagttgggtgaatacaagcaacgttgatgacatgctattttacattgcaatcatggaccaaccgagctgcgcgagtgcccagtcccaagagaacaagaatacctacgcatgcagtagtgaaagcatctgcgacgacgatctaccaccagtagtatctcaaggaggctacaattgcttctgccctggtcgtcaaatagagggcgtcaacccctatattgaagatggctgcatagcatattataacccagaggcaccgagtattaggaactgtatgagattatgtggaaacataagcgttccatttccttttgggattgaagaaggctgctacgcaaatgataacctacgactcaactgcacaagcaacggcactcttattcttgatcgagggtacgcacaatatcatgtgaccaatttgtcacttgatgatgggcttttgatggttacaaacatgctgaatgccacaagcttcaacaatatggagagggtagtcatcactaactatgacggttactatcacaacaacttccaaccaacttacatggcggttgtggatggtaattatgatttctctcaggaggatacaacaataaaatgggttatagcaaacataacttgtcagaaagcaatgcaaaataatgctacatatgcgtgcgtaagtgacaacagtatatgcaaagatgtcatgcaagggaatatacgtgacgggtaccgctgcaagtgttctgatggcttccaaggaaacccataccttcaaaataattgtacagggattgtaattgggcttgtttgtggtcttggatccataagttttgcacttggtgcaattgtactcaccggtaagtggaaaaaaggtatccaaaggagaattcgaagagagtacttcaagaaaaatcaaggtctactcttggagcaactaatatcaaatgaaaatgccacaaacaaaacaaagatattcactttggatgaactagaggaagcaaccaacaagtttgatgctactcgtgttctaggtcatggtgggcatggcactgtttacaaagggattttgtgtgatcagcgtgtcgtggctataaaaaaatctaaaatagtggagcaaatagagatagatcagttcatcaatgaggttgctattttatctcaaatcattcaccgcaatgtggtgaaactttttggttgttgcctagaagatgaggattgcaacggaagcatcaggagcacttgcttatttacactcagctgctgcaataccaattttccatagagatgtgaagtcttctaatatactcttggacgacaacttcactgtaaaggtttcagattttggtgcttcaagatctctatcccttgatgaaacacatgtggtgacaattgtccaaggaacattcggttatttagatccagagtattatcatactggttctctaactgagaagagtgatgtgtatagttttggagtgatacttgtggaacttttgacaagaaagaaaccaatttttatcaatgaatcgggtgccaaacaaaacttatctcattacttcattgaaggactacaggaagggactctcatggaaataatagattctcaagttgtggaagaggcagaccaagaagagattaatgaaatctcctcacttatagaagcgtgcttaagatccaaaggaggacatagaccaagcatgaaagaagtagatatgagattgcaatgtctaagaacaaagaggctacggaataaaacacatcttttgattgaaaagggtggagaaatggaacctttgttatgcgcagaagctcagcacccacatgaacgtatcaatccaatttataatgaggaacgtttaacaattccaatgatgtctgggtgttacagtttggagcaagaacttgcggcagcatctagtatgattcgctaacttggtatttgcttggatgttggacacatctatagtaaccatctatttttagagaggaactatatggtatattttgttcctttcgcataagactatggtatatatggtgtgtatatgtatataatatatatgacattgctatgtttacatataatgtaatttccgtatttcaaactgtaatgcgttttagttttgttttgattacaaatttggtactctaattgtaatagtttctaaaaccaatcataatatatagttataatacacttgagatttggaatttgtattagtattgaaataaacttgagatttggacaatgtaatagcattgaaaagtagaatttttatatttttatcacttaaaaaatcaaaagaaattctatattaggtaaatatgaatattacaagcatgggattacactaattcatgctcttttttaagaactcgatgctgattctttgttttggtgacatgtattcattcgctatggtccaagcacacatctggagttcattctgtccttcaaggaaagttttggcgtaaacacaatggcaaaagagaaacttcattattaacgacctacattattaacattagtatcatcgtagaacctcaggaacaagtttatgtcgccaccgaggtgtaaaacctgttattttattttaatggctcgttgaagagatgccctttaatcttatttttttctttctaaatttaacttttaaaatggcttcgcttagttttttttgttatgtagatgtagtttatgtatcg

SEQ ID NO: 210663 - DNA, 1759 bp, Zea Mays
tcgcccccgccaggcgccagcctcccgtatttgatgtttcacaaacgcgtgagcggctcgccctcctctccagtccctcctccctccggtccgcacaggggagcagccggcagcagctagctaccacagcagcaataagctaatcagctacgatggcggactacgtgtatggccccgggcggacccacctgttcgtgccgggccccgtgaacatcccggaccccgtgatccgcgccatgaaccggcagaacgaggactaccgctcgccggcggtgccggcgctgaccaaggtcctgctggaggacgttaagaagatcttcaagaccacgacgggcacgcccttcatgatcccgacgacggggacgggcgcgtgggagagcgcgctgaccaacacgctgtccccgggcgacagggtcgtgtccttcctcatcgggcagttcagcctgctgtggatcgaccagcagcggcgcctgggcttcgacgtggacgcggtggagagcgagtggggccagggcgccgacctggccgcgctggagcgcaggctccgcgaggacgcgccgcggcacgccatcaaggccgtggccatcgtgcacaacgagacggccacgggcgtcaccaacgacctggccgccgtgcgcgcgctgctggacaagcacgcgcacccggcgctgctgctggtggacggcgtgtcgtccatctgcgcgctggacttccgcatggacgagtggggcgtggacgtggcgctcacgggctcgcagaaggcgctgtcgatgccgacggggatgggcatcgtgtgcgccagccccagggcgctggaggccagcaagacggccaggtccgtgcgcgtcttcttcgactggaaggactacctcaggttctacgacatgggcacgtactggccctacacgccctccatccagctcctctacggcctccgcaccgcgctcgacctcatcttcgaggaagggctggacaacgtcgtgaggaggcacaaccgccttgggacagccaccaggctcgccgtcgaggcgtgggggctcagcaactgctgccagaaggaggagtggttcagcgacaccgtcaccgccgccgtcgtgccgcccaacatcgacagcgccgaggtcgtcaggcacgcgtggaagcggtacaacctcagtctcggcctcggcctcaacaaggtcgccgggaaggtcttcaggatcggccatctcggcaacctcaacgagctgcaacttctgggatgtctgagcggtgtggagatggtgctcaaggatgtggggtacccagtgaaactaggtagcggcgtggcagccgcggcggcgtacctgtcaaactccacgccgctcatcccatctaggatctgagaacaatgtaaggggaggatatcgcaaacaaggccagcgacaacgagtgggcagacgaacgaacaaagcgttgctacatagtactctctcagaatgtaaagttaaatttcacacccagctgttgctacatagtagtatagttttatgaattacaggtttgattaaacttcaaattaatctacatgtatagccctgcccagatttaactatattgggaccgtattacttaccgatcaactctgctttacagtagtagtcttttttttgaaatacggaaattacattatatgtaaacatagcaatgtcatatatattatatacatatacacaccatatataccatagtcttatgcgaaaggaacaaaatataccatatagttcctctctaaaaatag

SEQ ID NO: 210664 - DNA, 1175 bp, Zea Mays
cgaaaaactacgcgcccaagcagcgccacgcggcctccccgccgcgcaccacgagccactcgctcgctcccccgtcctagtagtggctagtgcgcgcgcaacacacacggacgcgcgcgctccgtactcgggagtcgggcctcgactcggcacgcgtccgcggctccgcgcccaggccagggtgtgttgtgtcttccagtctccacgctcctgagaccacatctctctctccatggcgacggccatctcgttcccgcgcgcgccgctggtcactccccgcgcgtgcaccccccgccggcttgtccacgtgtcggcggcgcgcgcctctcccccgcgcggaggagggcgcgtcggtcgccgctccccgacggtccccgctgtagcgggagcctcctcctcctcctccggcttggctccggacacaagcgtgccggcgtgggacgctctcggcggcgtctccgtcctcgccgcgggaacaggcaacgctgtggcgctgacggacctgtgggactccgccgagggggtggccgtggttgcgctgctgaggcatttcgggtgcttctgctgctgggagctggcctctgttctcaaggacgccatggcggagttcgactcggcgggggctaagctgatcgccatcggcgtcggaaccccggagaaggctcgcatcctcgccgaccgggcttacagcgtgcttggactgtaccatggtctgggccggacgctcttcagtccagctagtgcaaagatatattcgaggctcgactacatcaagaaggcgacggagaactacacgctggaaggcacgcccgccgacctcaccggcgtcctgcagcagggtggaatgttcgtgttcagagggaaggagttgctgtactcgtggagagaccaaggcacgggtgaccatgctcctctggacgacgtgcacagcgcctgccgcaaaattcccagtcgcttgacctgatggaacggattccggcagcacatgaacccgtcccagcattcaggcgctgctatctaggaaatgccatatcggatagagagaccaaaactgctatacatctgcttccaaattggttcgtcctgaacgtgtaaaatccacacatgacatatgtacacaagatgctttttttcccacagaaaactaagaacagtgtatcccgtcgcgatccagt

SEQ ID NO: 210665 - DNA, 3911 bp, Zea Mays
gccagtttatccatcggattcgatccttccgtttgcagtatggatccccaccgccgctcaccggaatacaactccctcctcctcgccggcccgcgcctgggtcctctgaagcaagcccacgcgcgcctcgtcgtctccggccacggcgattccttgccgctcatcaccaagctagccacgctcgcggttgcggccggcgccgcctcctacgcccgcctcctcgccgcctcccacccggcacccgactcctttctcttctgctccctcacgcgcgccaccgcgcgccgcgggctccccgccgccgccctcgccttctaccgctgcctactcgccgccgccctccccttctccagcttcgcattcacctccgtcgccaaggcctgcgcggacctgtccgcgatccgcgctggtatgggcatccacgcccacgccgtcctcctcgggctcggctccaaccggttcgtgcagacgtcgctcgtcgtgctgtattccaagtgcggccagctggatgttgcgcgcaagctgttcgacgcgattcgtgacaagagcgtagtcgcttggaacgcgatgatttcagggtacgagcagaacgggctcgctggaagggcgatcgaggtgtatagggagatgcaaatggccggggaagctccagattccgcgacgtttgtggccacgctctctgcctgtgcgcaggctggcgctttggacttgggacgtcaggtggacaagctcattgtttctgagaggatggagatgaatgtggttcttggtgctgcacttgtgaacatgtatgccaggatatggcatgcacggacatggcggcgaggcagtcaagctattcaatttgatgagacagcaagggccaccacccaatgatgtcacttttgttgcggtgctgtctgcgtgcgcacatgctggattggtaagcgagggccgggatgcttttgcttcaatgaagagtgtctacggattggtccctcgtgttgagcactattgctctatggttgatatgtatggaagggcaggacttcttgatgatgcgatgcgatttatacatgattcgatacccggagagcctggacctgaagtttggacagctatgcttggtgcatgcaagatgcacaaggatttcaatcttggagtggaggttgctgagcgattgatcgccctcgagcctgagagtccatctcaccgtgtgctgctttctaatctatatgctttgtctggtaaaatgaaccatgttgagaaggtgagggatacaatgattaagagaagattgaagaagccaataggatatagcttgattgagattgctggtgttgctcatttgtttcgcatgggtgagaagtctcaccccaaaacttcagagatttaccaatatttggagaaactgatcgaaaagattactgatgttggttatgtgcctaaaactgactcagtgttgcatgagttggaagaagaggaaagggagtttgcattaagataccatggtgaaaaactggctgtagcctttggactcatgatgacttctgggtgcaccactccaatcaggataattaaaaacctgcggatatgtgaggattgtcatctagctatcaaatatatgtcagccgtggagaatcgagagataattgtcagagatatgcaccggtttcaccatttcaaagctggaaagtgttcctgtcaggaatattggtgacgaggcctctctcgcaagctaaaaatctgaggaacaagagctgcaactcagcaacattgggagtgggacaccagcaacaacacctttactacccatcaaaattcacaagtaagcactagcaattgaccatcattttaaattgtgttctattacacaattgtccacaatataagttcctggaggtcagaacaactaaccactgattagagtcgactagtcatcctagtcgatcttatcgtccctaaggcgactaggtcgactatacgatttaaaaacattgatttcactaaggctgaactatatgctgctgtaatcattgtcggtcatttgccttttctgttagtctgtcttattggtccttactaggattccatattttttcaatcagaatttggtttaaatatttatgatatgatggggctgatagttgtgccactctttatcatcaaaataataaacatttgcaagctatccagacaacagtcccaactatgggagcaagcatatataatcttttgattcaaattgaagctaagatagtaagttttggcaactagaaaatgatgggagaatacacgatctctagcagggcctacctggacaactggtcaactggataaagcaaattgatctctaactgcataatagcacgagatgaaaaatattttgttggccatctgttgattatcattatcaattttaactacttaaaagcacaatgtgagaaatgttttaacttagcttcgtaatggaaatggtttgtgggaatgcattgtacttctacattctgttaattaccggtgttcatagatgccatgaatgcactttagatgcagtatcacaatgattgactgcatgccctttcccggtagtgggaacttcagcggtattgcatttctcactgttaaggtcagtttataagccagtttttctttcttttttttaaaaaaaaataagattctttttcatttggggacaccaacttattacatgttcaacattcctattccataaccagacatcgatctgacttgttaacagacctgggttaggaacgtagtatggtcttctatatgatgttagatgcttcagcggttcagccttgaatctgtatggtcctaacttcaattttaattgcacataaatacataatcatagaaatgaattgaaatatctgcaatgactgctgcctcgtaatttttatcatagagctttaccaaactattcatttcactatcgctatgtttcaaaggtatctgtgttgtctgacagactattcttgttcagactgatgctgccaaatagagagcattaaccatggatgtaggaggatcttatcctaaaacccagccttacaaacggaaccataaaaaagaagattttgcatcaaagttgataatagggattaataggacatgttggaaatataccatgggacgtaacaagtacgtatgttggaaatctactatggggtataatagctgacgatatgaaaaagctcttctctgattgcaaaatgtttgttcatccgatctggaactgacaagaagatagacgaaccaaacggttgtgtggatgttgatttttttcctgatggcacatctcttgatgttcatcttatatggatatttggcaccttggccgttgttgttggagttagaacatttgtaaagggtcctttgtgcatatagcatatatggaagaggtacacatgaaaattgaccccccaaatcacaatatggtatcgcgtgctagggtttggcctcacaaccgctgcccgtaggcactgcagccagccatgcactgtcgatccatcaacgccgggtctgtgcgtctggccgccgcctgcgtggggctgctctcacgccgcatccgcgttgttgggggactggtcatggtgccgcctccacgtcgtcgaggagcgcggtcgtcgccctccgcctgcgtggggctggcgggcctcagatctgaaggcggtccaggtccggccgtggcgtgtggcctgcgggcgcaccaccgccgccgctgggaggctgctgccgacgccgtattaggacgcgaagccgaggcggaggagggaggccggcatgctgaagtgcgttgggtggacgatgtcatgcgcgtcctccgcaccatgtgagaaaagctgctcaaagcaagcctagtgcatcttcatccttgaccacagatagatcatgcagtttgccttcag

SEQ ID NO: 210666 - DNA, 1500 bp, Zea Mays
tagaaatcgcagaaacacccttccggcttccgactctcctcgcatcctccccctgtccctgcgtgcgtagtgcgtctccggctccgcgcacgtcgcaggggtacgcatgcaattacaccgggtggtgggggcttcttccacctctggctggttgtcttgatggcgcccgctgtagaagccgtgaaggagacaggcaccttccagaaggttcctgccttgaacgaaaggatactgtcatccatgtccaggaggtctgttgctgcacacccttggcatgatctggagataggtcctggtgctccaaccatattcaactgcgtcattgagataccaaggggcagcaaggttaaatatgaacttgacaagaaaactggactgatcaaggtggaccgtgtgctgtattcatcagttgtttaccctcacaactatggattcattcctcgcacgctttgtgaagacagtgatcctttggatgtactggttataatgcaggagcctgttatcccaggctgtttcctacgtgcgaaggccatcggccttatgccgatgattgatcagggagaggcagatgacaagatcattgcagtgtgcgctgatgatcccgagtacaggcattacaatgatatcaaggagctcccacctcaccgcttggctgaaatcaggcgcttcttcgaggactacaagaagaatgagaacaaggaggttgctgtgaatgactttctaccagcgagcgccgcttatgaagccatacagcactctatggacctgtatgctacatacatcgttgagggcctgaggaggtaggattctgatggctaggaaaggtggggaggatgttgacgaaaaactgggagaccatttaccgcatggaacgagtaccgttattattttatttgtgtcgtgtatactgctagtagtgaaccctcaatcaaagaccgaaatcccctggggagtcggagtcggtagtaggtgaagctagtaacaaggttggcgaaatattattttctggcctgactgcctatatatgttgtacgtgattggtatcgtaatattcattcgcttttgtgatacataattcgttattggatcttcaattgtgttctgctctcggaacacggtggcgatgtgcctcgtagaaaaatgcaaaggcctcagcgttcttgtttgttactttgctgttatggaaaactgacaggacctgaagtcctgaacgttgtctggtggaatttgtccagcattcccctttcagctggttgcgtatttgaatcctgcacgtaaaaacaaccgcgcacttgtttaactacaattgatctagatttctttaagggctagtttgagagaaaaaaaagaggggctagaatctccttatttaagaagtaaacagaaaaatattaaatttaacagcagctcatggttgtttggatgcccgtcttagagcagcttcaatagttttctaaacaactctctaagtattaaatttaagaagtaaaaagaaaaata

SEQ ID NO: 210667 - DNA, 1376 bp, Zea Mays
ctgccgtgccatacgtaacgttgcaggttgtcttgatggcgcccgctgtagaagccgtgaaggagacaggcaccttccagaaggttcctgccttgaacgaaaggatactgtcatccatgtccaggaggtctgttgctgcacacccttggcatgatctggagataggtcctggtgctccaaccatattcaactgcgtcattgagataccaaggggcagcaaggttaaatatgaacttgacaagaaaactggactgatcaaggtggaccgtgtgctgtattcatcagttgtttaccctcacaactatggattcattcctcgcacgctttgtgaagacagtgatcctttggatgtactggttataatgcaggagcctgttatcccaggctgtttcctacgtgcgaaggccatcggccttatgccgatgattgatcagggagaggcagatgacaagatcattgcagtgtgcgctgatgatcccgagtacaggcattacaatgatatcaaggagctcccacctcaccgcttggctgaaatcaggcgcttcttcgaggactacaagaagaatgagaacaaggaggttgctgtgaatgactttctaccagcgagcgccgcttatgaagccatacagcactctatggacctgtatgctacatacatcgttgagggcctgaggaggtaggattctgatggctaggaaaggtggggaggatgttgacgaaaaactgggagaccatttaccgcatggaacgagtaccgttattattttatttgtgtcgtgtatactgctagtagtgaaccctcaatcaaagaccgaaatcccctggggagtcggagtcggtagtaggtgaagctagtaacaaggttggcgaaatattattttctggcctgactgcctatatatgttgtacgtgattggtatcgtaatattcattcgcttttgtgatacataattcgttattggatcttcaattgtgttctgctctcggaacacggtggcgatgtgcctcgtagaaaaatgcaaaggcctcagcgttcttgtttgttactttgctgttatggaaaactgacaggacctgaagtcctgaacgttgtctggtggaatttgtccagcattcccctttcagctggttgcgtatttgaatcctgcacgtaaaaacaaccgcgcacttgtttaactacaattgatctagatttctttaagggctagtttgagagaaaaaaaagaggggctagaatctccttatttaagaagtaaacagaaaaatattaaatttaacagcagctcatggttgtttggatgcccgtcttagagcagcttcaatagttttctaaacaactctctaagtattaaatttaagaagtaaaaagaaaaata

SEQ ID NO: 210668 - DNA, 3219 bp, Zea Mays
tagctttgactcacaacagcaaagctgaataacagatcactcccgtctcccatccccttcctctcctagcaatcctctgccggagtccaagctccaatcagatccggacccacccctccccctccgaagaagccctaggcatgccccgcagccgatgaggtcgctccgccgggtcctcatcccgctcgtcctcctcgcaggactcgtcttccgcgtggacgacggcggcggcgcgttcctcccgcccccgccccccgcgctccccgctcccccgccccgcctcgcacttaacggagaagcggctccggaggatgatggggcggcggtttcccgctccacggagatcgtcgcggcggaggcgcgctccaccgagttcgtcgccccagcgaggcccaagaagcagagcttccgggagctccttgtccggccgcagcctgcgcgccacgagccggctagtttggttaccgacgaggcgaaagccgaatccaggggctttcttggtcttatctccataataaaagcattttgggccatattcttgttttgtgttgatctggagcacggaaggaggagcctttgctgattagctctgtgcttcagttttgggataatggcacaattcagcttgtggacaaactgtcgcaatctcctctgtgggagatcaccacagggcctccactatcagaccagattaataccgctgagtctggtctgaattacctcatttatcctttcaatgagaacaagaacatgaatggtactgaactttgggaggtttataatgggaacaccgtgaggctcccatggaaattggaggaattcgttgccagaagcccatacattcgggattctgttgttactattggatcaaaagtttcaaccgtttttgttgttgattctgatagtggtgagattatttacaggcacagtattccagctgtgttaaatgaattggaaggaccagggattgaaggaacaccatccaagctaaatgcccgtactaattatgacagcgataatatcatggtgcttgtgagaaatgactattctcttagtgcatcagatcttggcaagcatttatttaactggacaagaacttctttctctgtgaaatacaaccaccctgacattccatgcatcagaagtgagggtttgccacttgctttacctgattcacgttcagctaatgtaattgtcttgaaagaaggtaccccttttatttccatccatggttctgatgccctggaaccagttcaaaccccaaggaagctaccaaacactgctgggaagtcagatatcgtattggatgattctcaaaatcaaacgtatgatggtgctcgatctcatgtcatctctgctgattctgaagctaccgaaacccccactaggaacacttatgtatggttattttcttttttccccatatttttggtcattggttatctgttgagcttgacctctgcaagcaagtcttgcaggcaatttgtgattcagcttattaagccattcacgcgcgacaagaaatcggtggacattagaggcaggtcagagggatctcctaaaagaagaaaaacacggaagaaggatggacttgtcaatagccctgagaccttgacagcatctgacaaggagtgcagtgaaactggtgggtcaactgaggcaccaatggaaaattctgcactaaaagatgcccttggtggtcgtcacattggtaaactatatgtctccaataaagaaattggtagagggagcaatggcacagttgtttttgaaggatcgtatgatggtcgtcaagttgctgttaaacgtctgctgcgttcccacaatgacatagctgaaaaggagactcagaatcttattatatctgatcatgatccaaatattgttagactatatggttgtgactatgacagcgattttgtttatatctcccttgagaggtgtcactgcagtttggctgatctaattcaaaaacactcatatctgtcttctggagagtctgtttctaacaatgaggccagtttcagcatcaagtcaaagatttcaaatgttaagggaatggatgtggaattgtggacacatgatgggcttccttcagcacaactcctgaagctgatgagagatgtggttgctggccttgtgcatctgcatgacttgggaattattcatcgtgatttgaagcctcaaaatgtcttaataagcgcaggaggacctattagagcaaagctttctgatatgggtatcagtaagcacctgcaagatgacatgacttctgttagccatcatggtacaggatttggaagctctggctggcgggcacctgaacagcttcgtcatggtcgtcaaactcgtgcaatggatctttttagtttgggctgccttattttctattgtatcactaaaggcaagcatccgtttggtgagtactatgaaagggatgtgaacattgcaaacaatcgctttgatctctttatggtggactacataccagaagcagtccatcttatatctcatttgttacaaccaaacccagaggcaagaccgacagcagtatatgtcatgcaccatccactcttttggagccctgaattgcgtctttcgtttctaagggataccagtgacagaattgagaaaaccagtgaaactgacctcataaacacactggaaagcataggatctttggcgtttggtggaaaatggggagagaaattggatgctgctttggttacagacatgggtcgttatagaaaatataactttgggtctattcgtgatcttctgaggtatatcagaaataaatcgggtcattacagagaactttcagatgatctcaagggcatacttgggtcactaccagaggggtttgatcgctattttgctagccgatttccaaagttgctaattgaggtgtacaaggtcttgtgggtgcactgcaaggacgaggaagctttcagtaaatatttcaaaggaagttagttatagctggagaggattgtcctttcctactgtacatactaaccctgatgtagaacaagtacatgtgtaccatatgactcgtattataggataaaaaagagctcaatctgtacattatgcaccggtatggtaggaccgtgtcatttgcacagcctaatgctctgatggcttggacattgtgcatcgtggaatcttcgtaatcgttgtgtgtttgatgaagtcttaacctagctagaggcctag

SEQ ID NO: 210669 - DNA, 3024 bp, Zea Mays
agcaaagctgaataacagatcactcccgtctcccatccccttcctctcctagcaatcctctgccggagtccaagctccaatcagatccggacccacccctccccctccgaagaagccctaggcatgccccgcagccgatgaggtcgctccgccgggtcctcatcccgctcgtcctcctcgcaggactcgtcttccgcgtggacgacggcggcggcgcgttcctcccgcccccgccccccgcgctccccgctcccccgccccgcctcgcacttaacggagaagcggctccggaggatgatggggcggcggtttcccgctccacggagatcgtcgcggcggaggcgcgctccaccgagttcgtcgccccagcgaggcccaagaagcagagcttccgggagctccttgtccggccgcagcctgcgcgccacgagccggctagtttggttaccgacgaggcgaaagccgaatccagctctgtgcttcagttttgggataatggcacaattcagcttgtggacaaactgtcgcaatctcctctgtgggagatcaccacagggcctccactatcagaccagattaataccgctgagtctggtctgaattacctcatttatcctttcaatgagaacaagaacatgaatggtactgaactttgggaggtttataatgggaacaccgtgaggctcccatggaaattggaggaattcgttgccagaagcccatacattcgggattctgttgttactattggatcaaaagtttcaaccgtttttgttgttgattctgatagtggtgagattatttacaggcacagtattccagctgtgttaaatgaattggaaggaccagggattgaaggaacaccatccaagctaaatgcccgtactaattatgacagcgataatatcatggtgcttgtgagaaatgactattctcttagtgcatcagatcttggcaagcatttatttaactggacaagaacttctttctctgtgaaatacaaccaccctgacattccatgcatcagaagtgagggtttgccacttgctttacctgattcacgttcagctaatgtaattgtcttgaaagaaggtaccccttttatttccatccatggttctgatgccctggaaccagttcaaaccccaaggaagctaccaaacactgctgggaagtcagatatcgtattggatgattctcaaaatcaaacgtatgatggtgctcgatctcatgtcatctctgctgattctgaagctaccgaaacccccactaggaacacttatgcaatttgtgattcagcttattaagccattcacgcgcgacaagaaatcggtggacattagaggcaggtcagagggatctcctaaaagaagaaaaacacggaagaaggatggacttgtcaatagccctgagaccttgacagcatctgacaaggagtgcagtgaaactggtgggtcaactgaggcaccaatggaaaattctgcactaaaagatgcccttggtggtcgtcacattggtaaactatatgtctccaataaagaaattggtagagggagcaatggcacagttgtttttgaaggatcgtatgatggtcgtcaagttgctgttaaacgtctgctgcgttcccacaatgacatagctgaaaaggagactcagaatcttattatatctgatcatgatccaaatattgttagactatatggttgtgactatgacagcgattttgtttatatctcccttgagaggtgtcactgcagtttggctgatctaattcaaaaacactcatatctgtcttctggagagtctgtttctaacaatgaggccagtttcagcatcaagtcaaagatttcaaatgttaagggaatggatgtggaattgtggacacatgatgggcttccttcagcacaactcctgaagctgatgagagatgtggttgctggccttgtgcatctgcatgacttgggaattattcatcgtgatttgaagcctcaaaatgtcttaataagcgcaggaggacctattagagcaaagctttctgatatgggtatcagtaagcacctgcaagatgacatgacttctgttagccatcatggtacaggatttggaagctctggctggcgggcacctgaacagcttcgtcatggtcgtcaaactcgtgcaatggatctttttagtttgggctgccttattttctattgtatcactaaaggcaagcatccgtttggtgagtactatgaaagggatgtgaacattgcaaacaatcgctttgatctctttatggtggactacataccagaagcagtccatcttatatctcatttgttacaaccaaacccagaggcaagaccgacagcagtatatgtcatgcaccatccactcttttggagccctgaattgcgtctttcgtttctaagggataccagtgacagaattgagaaaaccagtgaaactgacctcataaacacactggaaagcataggatctttggcgtttggtggaaaatggggagagaaattggatgctgctttggttacagacatgggtcgttatagaaaatataactttgggtctattcgtgatcttctgaggtatatcagaaataaatcgggtcattacagagaactttcagatgatctcaagggcatacttgggtcactaccagaggggtttgatcgctattttgctagccgatttccaaagttgctaattgaggtgtacaaggtcttgtgggtgcactgcaaggacgaggaagctttcagtaaatatttcaaaggaagttagttatagctggagaggattgtcctttcctactgtacatactaaccctgatgtagaacaagtacatgtgtaccatatgactcgtattataggataaaaaagagctcaatctgtacattatgcaccggtatggtaggaccgtgtcatttgcacagcctaatgctctgatggcttggacattgtgcatcgtggaatcttcgtaatcgttgtgtgtttgatgaagtcttaacctagctagaggcctag

SEQ ID NO: 210670 - DNA, 2148 bp, Zea Mays
atttctccatgcccctacccagccattcccctaaaaatctccagccgtctgtcttgctgctcgttcctgcagctcagacgtcgcctcccttctaccccttgctcctcagccaggcttgttagccgagcccctccaactagcgtgctagacctttgacgccgtttccccgtcgtccaagctccaccatgcccacacgtccgtcctgctcctccatgcacacgcccatgcatccttatctccctggaaacttcactcgtgtacggctccctggtgataatattcagcgatgcttcgccagggcaccgttcccctgcgcgctcgctggacgccgtcgcacatgctccctgctcggcctccccggcgtgctgctccctcgccttggtgcccctgcgagctccttctctctggcccggtttccagctcgggcctcgctagatgccgatgccgcttttctgacctcgtctcgatactcaatcgctgcagcacgccatgccgtgtgtgctgcactgtcatcattcgctatcctcatttttgctaatttttctcgtcgtttctcgtctacaaccttgtcagctcctgcgtgtcgtgcgcgtcttgtgttcgggtcgagccccaggattttgaggaaaaggaagctccagtgcattggccggtgaaatgaataaaatggattttgaagaaaaggaagctccaatgcatcagccggtgaaatgaataaaatggtggtaattatggtccttgtgaaatctgagatcaacttagtcgcgtgacacaccaagataacacgtgttatgtgctctccatcaacaagtgaagctcaccgaagaaggatcattaactctaccggtgtctactgctcagaacagggtctcgctgccgcagaacgttgtcgcagaccgcttcaccgtcgaccctttgaactgcgtcatccccggttaatctcgcgcgcgtaccgacagcttcgaagaacacctagatgaggtggtacttgaagaagtctactccagtgcctgctcatcaagtggatggagctatctaactaaaggttaggtataaggatctagaatctcttctctgcaacaaaggcaagccccggtgcatttaccccttccttgtatttttaaaaagacttttatatactttaagtctagtgaaatgtgcattaagtttataggaattgattggaaactattggatgcattgactaccttgatatccattcctgttatatatacttctttcgaagtatcaaatattgtttacaaaaatgcttagccctgcttagatctggtggatagaggttgtcttttgcaataatgcctagctcaggggttatcctgaggacggatggcttctaccagcaagaatattttcattgggagcatggtgggatcttactacaaagttccctataatgctcttttcatcctaaggaacacaaaacaatcctaaggatggaagtacttaaatcgagacttgggctaggaacaggtgatgctcctcccaggttaattaaggattggatgcgtatgtaggcctgtatgatcaaggactatcttaactggccacatgccctggatatgggacagggtaagcttgaacccctctattccatacatgaaaagacaatcgcgcactgggagtggagagatggcgagagtgacacatacgctcctggcaaaggaccgcctaaaaggggtggtgtgctctcgggtggcgcgcacctgttcatgcagtggaggatccgtgggaattgtagacatatgcaagagttacgagaaacatatgtcgtgtggttagagatcctcagctgagtaaatcgattcggatcgtcgttatatccccggaaagtggagacttgatctctgtccttcaacctaagtcaggatgtaaacattatgaataaaaatgatgttgtattgatgagatgctgaaataagactagatgtaaccagagtctattaatatttaatctggcgttaaaatattgaaagtaaggactcactttagtaagctatttctgcaaacgtatctaagttgattcttgctaaagccttttccttgattcctatttaaccagcatatccttaagagtcatttttccttagtcgggtaagacttgcgaaagtgcacgccgtacttagggtt

SEQ ID NO: 210671 - DNA, 2023 bp, Zea Mays
tcccctaaaaatctccagccgtctgtcttgctgctcgttcctgcagctcagacgtcgcctcccttctaccccttgctcctcagccaggcttgttagccgagcccctccaactagcgtgctagacctttgacgccgtttccccgtcgtccaagctccaccatgcccacacgtccgtcctgctcctccatgcacacgcccatgcatccttatctccctggaaacttcactcgtgtacggctccctggtgataatattcagcgatgcttcgccagggcaccgttcccctgcgcgctcgctggacgccgtcgcacatgctccctgctcggcctccccggcgtgctgctccctcgccttggtgcccctgcgagctccttctctctggcccggtttccagctcgggcctcgctagatgccgatgccgcttttctgacctcgtctcgatactcaatcgctgcagcacgccatgccgtgtgtgctgcactgtcatcattcgctatcctcatttttgctaatttttctcgtcgtttctcgtctacaaccttgtcagctcctgcgtgtcgtgcgcgtcttgtgttcgggtcgagccccaggattttgaggaaaaggaagctccagtgcattggccggtgaaatgaataaaatggattttgaagaaaaggaagctccaatgcatcagccggtgaaatgaataaaatggtggtaattatggtccttgtgaaatctgagatcaacttagtcgcgggtctcgctgccgcagaacgttgtcgcagaccgcttcaccgtcgaccctttgaactgcgtcatccccggttaatctcgcgcgcgtaccgacagcttcgaagaacacctagatgaggtggtacttgaagaagtctactccagtgcctgctcatcaagtggatggagctatctaactaaaggttaggtataaggatctagaatctcttctctgcaacaaaggcaagccccggtgcatttaccccttccttgtatttttaaaaagacttttatatactttaagtctagtgaaatgtgcattaagtttataggaattgattggaaactattggatgcattgactaccttgatatccattcctgttatatatacttctttcgaagtatcaaatattgtttacaaaaatgcttagccctgcttagatctggtggatagaggttgtcttttgcaataatgcctagctcaggggttatcctgaggacggatggcttctaccagcaagaatattttcattgggagcatggtgggatcttactacaaagttccctataatgctcttttcatcctaaggaacacaaaacaatcctaaggatggaagtacttaaatcgagacttgggctaggaacaggtgatgctcctcccaggttaattaaggattggatgcgtatgtaggcctgtatgatcaaggactatcttaactggccacatgccctggatatgggacagggtaagcttgaacccctctattccatacatgaaaagacaatcgcgcactgggagtggagagatggcgagagtgacacatacgctcctggcaaaggaccgcctaaaaggggtggtgtgctctcgggtggcgcgcacctgttcatgcagtggaggatccgtgggaattgtagacatatgcaagagttacgagaaacatatgtcgtgtggttagagatcctcagctgagtaaatcgattcggatcgtcgttatatccccggaaagtggagacttgatctctgtccttcaacctaagtcaggatgtaaacattatgaataaaaatgatgttgtattgatgagatgctgaaataagactagatgtaaccagagtctattaatatttaatctggcgttaaaatattgaaagtaaggactcactttagtaagctatttctgcaaacgtatctaagttgattcttgctaaagccttttccttgattcctatttaaccagcatatccttaagagtcatttttccttagtcgggtaagacttgcgaaagtgcacgccgtacttagggtt

SEQ ID NO: 210672 - DNA, 2541 bp, Zea Mays
caagagatcaacagagagatgaaggaacatgcaatgagcttgcaaaggacattgggggctataagcatgtgacggtcatacatgatattaaagttgtagatgaaggaacggcacaggctctgcaaaaccttccattaggatctgcccctggtgattttctggattctattgttgttggcttggatatggtgattaggaaatttggtattaccaaagggaagcggcggctctgtctaatcactggtgcacaagaactgttaagagatccgcctgaggggaccaaagaagatcaggtggacaccattgcaaacatgttgaaaaaacacaatatcaagatggagtgcattattttcagagaaccgggagtgcatcataatgatgtaatggaagaaaatgaccgactattgcatcagttcagaaatagatcagtagcaaaggtagttcaggttgacaacccaacatcactgttgggtgctctcaagacaagaaatgtgctcccagttaccgttttcaggggagatctggaagtgaactccaattttaaaataaaggtgtgggtttataagaaaacagctgaggaaaaattccccactttgaagaagtattcggacaaagctcctccaaatgataaatttgcttctcatgaagtcaaagttgattatgagtacaagagtgttgttgagccagacaaagttgttccaccagaccaaaggattaaggggtatctctatggtcctcaagttattcctgtatcaaatgctgaatgggaggcagtcaagttcaagccagagaaaggtgtgaagcttctaggatttacagatagatccagcgtaccacggcaccaatttatgaaagatgtatgcctgtttatacctgagccaggtaacatgaaagcaagtcttgcagtttctgcgatagcaagagcaatgcatcaaatgaacaaggttgctatagtgcgatgtgtgtggaggcaaggtcaagggaatgttgctattggtgtattgacgccaaacatttcatcagtgaacaatatccaagattcattttacttcaatgtgctcccatttgctgaggacatcagagagtttcagtttcggtccttcagcagcctgccatcatcatctcagcccactgaagaacaacaagaagctgcagataacctagtgaagatgttagacctagcaccacctggaagagaggtcctcaagcctgagtttacgccaaatcccatcttggagagattttacagttaccttgatctcaagtcaaagcagccagatgcaaatgtcccaccgcttgaaagatctctaaggaggataaccgaacctgatcctgatgtggttggccaacaaacacaattaatccagaatttaagcaaagcttttgtgctgaaggataaccccaagaaaaagaaagcacgaacacaggacatgttggcatatactggtgcaggtgatcaagctaaatctgtagaggacagagttctggaaaatacacatccttcaacagagaatgttgtggcaatcagagattcaaatccagttcaagattttgaggccatgctggctaagagatctagctcaacatggactcagaaggctattggagatatgcagaattacatagcagctttgttacagaactccagtgatgggggcaactatcaaaaagcacttgaatgttttgcttctctgcggaaggcctgtattattgaacaggaaccacaggaattcaaccagttcctaacgaagatttacgagagattgaaggaaggtgatgctgccaagttctttcaacttctctcctcaaaaaacatttcacttatcaacaaagaggaagcgcctgacagtgatgtgactgaagagatggcaagaagtttctacctgaaacgagaaaaggcgtctcagtaggagctggaagaagccggtaactcgaagcgccttgggtttggagggtatctgcatgttttgaaactgggtatctgggtggaactggaactaatactcaaactctctgggttgagtcactgttttgctgcacaatctgctgcctactacgtttcgactagattcagctttgggtactactgtatgttgtttgactggagtagcatgtccatagatcacatacttctgcagtgttcattggagtgaatgcatgcatgcggtgaaatgcagcatggataggtctaggaagaaacattaccatcatttcctaatgttggagcgctgcctagaaaaggatctttttctgtaagtggtctggtgcgtcaaaccctccaaagtccaaaataatcctttctacataacaagtccgatgtgtcattggactgtacgatgagccaggttcggtacaccatggtacaacagactaattctaaacttgggcttcttttctttgtctttacttgactctactcttgggcacttttatgacttagacaaatatttcttgagtgttccaatcattctaagttatcccattggtctcaaataatccttcaacttattttccatcttttcttcaaccttttgccttaat

SEQ ID NO: 210673 - DNA, 2312 bp, Zea Mays
ctttaaccgcaaacccgatattcagccaagggtgtgtgtgtaaaaacccacacgcgtatgtcgtcttgccttcctcgtcgaatcgcgcgcatctccgctccacaaccttcttaattttctgaagcttgggcgggatctcggctcgcctccgtccatctctatggcgccacggggccaccacctggcggaggtggccctcctcgcctctgcttcggcggacctcgcagccgcaggcgccggcgagagggaggggtggttggacgaccccgccatcctcccctcgctcgggccccgcgcgcgatctctcgccgtggccagcgcggcgcactccgtgctcgtgatcgtcgcggtggcgggaggtggaggcggcggggtcacggtggagcctgcgctggggcccgacgagggccgaatctccgccgttgagtgggtcccgttcgccggggaggacgatgcagagggggaggagggggtgtccgtggtgatcggcacggacgctgggtggctactgttctactcgctcgcaggcgatctattgcacaagcagagtatatatcctgcaaagatactgaaactcaactttcgtgagaggaaggagaacgcttgggaagattcaggctcagatgaactttctgtagtgtttcctggtgttatcgcgcgctttgatggtgctgaccttcagaacgttcttaaaaaagcatttcaagatgtaaaatcacgcctgtggaaagataagtttgaagagcaagatgctgaggatgaggaaacttttggacgaataccctttcagatttggaatgtaaacaagttcagttcatgcgctgatgctgcaattgttggtctgatgccacctcccttgttagaacttcagctgcttttatattgctgggcagtcaagtcagcgccactactgtgccatcacagttggagaggatgctgtagtttcagcatataggttatcagaagatagaaccaggtcaattgttggagcaattttgtcaagaggtgtagctgcaacattttcgacaatatcatctttgtccaaaatactatggcggagtgagccgtcaccacctaaaaagtcacggccaaagccccaatcctttgcaaaaacatcacccctcacctgcttgaaagactccccaaggaaaggagaacggcttacactctctccgagtggtacgctggctgctataactgattcacttgggcggatactactgctggacacccatgcgcttgtggctgtacggttatggaagggctatcgtgatgcttcatgtctatttgtggaaatgcttctgaacaaagacaaggcttcgtcagggtcgatgcacatagagtatacgaagagtgactattgtttgtgtttagcaatccatgccccgcgaaaaggcataatagaggtttggaagatgcgcaccgggtcacgcctcctaaccatcccatgccccaaaggaagcaggatcttacaaccctcagcgaggctctctacgtcgtcgttctcaccttcgtattccccgctggaggtttacctgttcaatggagactctgggcaattgtcagttttgaataggcacatcggatgaatcatttgttcctttgttgtgttattaaattgttactgccaagtgttgtagagaattacttgtttcagtgtttacagttttgttaatcaagaaaaaaaagtgcgtgggtcaggattgaacaaacagagatgaaattgggcggatggataaaccagaagcagacatgaatgcgggaggggagtggcaaaaaaaaaaaaggagagtaatcttggcaatagatacaggtttccttttacctctcttatttccagcccgtggaaactaccaaaatataccctaccccttatggcctcatctctttattaccatgaatgggaacacaactgaagacctaccagagtctggagactttctcacgttcgtctctccctcgcttggccttgagcatcgccgggggaagatgtaggcgaccggaacaggggaatccctcctgggtaaggttgctgtcagcagtccctgatccttctctttagaatgtgttttgtacagctgtgagttttgaaacaaagctgatgtgatctgtctgctatgaaaaagttgttgagtgttgtaaaagagctaaaaattatttggttcaaacggctgagtgaattgtctataaataaattgtatatcgtttatatacaattttgttcaactatctcttaattaatgtatcgaataaaaaccaaattcacatttgtattcatgatatttctacaaataaactagactccacttgct

SEQ ID NO: 210674 - DNA, 1771 bp, Zea Mays
accaacagtgtggacccctaatctgatgaggaggaaagttttattctcagggatcgactcctccccctcattatttgcctactgaggacggacaaacttcctgctgttctcagaatttaccgggatacacttataactgttatgaaagcttcaatcaaaaccacagtaggagagttactcccagttttaactgccagaccaatagattctgactcagtaactggagacagagctaccgatgctgatgctggaggccagtccttagcaaataagttgcggagtctttcatctgaaggatttgttcaacttttatctgccattttcaggatagtacaggtacatttacagcaagcagctgaagtgaaaagaatagttgagtgggtcatgggaaaccttgatggaacgttaggtgttgatgctagtaatcctacgttacaacatggtggtacagttattcctgatacccaagaaaatgactcttcaagaggctctaatactcttacacggagtacttccaagatcccatttgtccaaggaaaaacaaatgatttttccattataaattcgttaaagaatgttcgggctgatgtcttgagagagaacactgaagcagttttcgcggcttgtgatgctgcccatggacggtgggctaagctgctaggtgttcgttctgctttacatcccaggttaaggcttcaagaattcttgatcatctacaacataacagaagaatttatagctgctacagaaaagattggaggcaggttgggttacaacattcgtggaatcctacatcaacaatcgaagcaattcgttgattatcagcataatgttcggatgacaaaaatcaaggcagttctagatcaagagacgtgggttgctgtggatgttcctgaagagtttcaagcaatcgttctttcactttcatccacttattcttctgttaatggcatggagatgcctagcactgatgataactcaaagtttagtgatcatcggtctacaagtcaagaaccgacatattcagctaaaaatattgctgataatggcaaagtaacatccgggactggtgaaaacaaggttgaattcacttcacagactgaaaataatgttgccgggaatctaaagtccaccttgcaaacgattgtacatggaggtgttggctatcatatggtaaactgtggtttaatactgttgaagatgttatccgaatacgttgacatcagtaaatgtttaccatcactatctttggaggtggtccaacgtgttgtggaaatattaaagcttttcaacactaggacttgccaacttgttctcggtgcaggagccatgcaggtgtctggacttaaatcaattacgtccaaacatttagctttggcgagtcaaatcattagttttatgcattctttaattccagatatcaggcgagtacttttcctgaaaatacctgaagcgcgcaaacatctgttaatgtctgagctggatagagtagctcaggactacaagatccatcgagatgaaattcacaacaaacttgtccagataatgagagagaggttgcttgcaaatcttagaaaattaccccaaattgtggaaggctggaatggcccagaggataatgacgtgcagccgagtcaatttgctaaagctgttacaaaggcaagtggttcaaatattccattcacatattacagaagcattttcaaaattggaagtcaatactccctctggcaaagaataggtatgctgcttatttgtgcatcttttagca

SEQ ID NO: 210675 - DNA, 1843 bp, Zea Mays
ttaccaacagtgtggacccctaatctgggtaatgtagatgaggaggaaagttttattctcagggatcgactcctccccctcattatttgcctactgaggacggacaaacttcctgctgttctcagaatttaccgggatacacttataactgttatgaaagcttcaatcaaaaccacagtaggagagttactcccagttttaactgccagaccaatagattctgactcagtaactggagacagagctaccgatgctgatgctggaggccagtccttagcaaataagttgcggagtctttcatctgaaggatttgttcaacttttatctgccattttcaggatagtacaggtacatttacagcaagcagctgaagtgaaaagaatagttgagtgggtcatgggaaaccttgatggaacgttaggtgttgatgctagtaatcctacgttacaacatggtggtacagttattcctgatacccaagaaaatgactcttcaagaggctctaatactcttacacggagtacttccaagatcccatttgtccaaggaaaaacaaatgatttttccattataaattcgttaaagaatgttcgggctgatgtcttgagagagaacactgaagcagttttcgcggcttgtgatgctgcccatggacggtgggctaagctgctaggtgttcgttctgctttacatcccaggttaaggcttcaagaattcttgatcatctacaacataacagaagaatttatagctgctacagaaaagattggaggcaggttgggttacaacattcgtggaatcctacatcaacaatcgaagcaattcgttgattatcagcataatgttcggatgacaaaaatcaaggcagttctagatcaagagacgtgggttgctgtggatgttcctgaagagtttcaagcaatcgttctttcactttcatccacttattcttctgttaatggcatggagatgcctagcactgatgataactcaaagtttagtgatcatcggtctacaagtcaagaaccgacatattcagctaaaaatattgctgataatggcaaagtaacatccgggactggtgaaaacaaggttgaattcacttcacagactgaaaataatgttgccgggaatctaaagtccaccttgcaaacgattgtacatggaggtgttggctatcatatgtggtttaatactgttgaagatgttatccgaatacgttgacatcagtaaatgtttaccatcactatctttggaggtggtccaacgtgttgtggaaatattaaagcttttcaacactaggacttgccaacttgttctcggtgcaggagccatgcaggtgtctggacttaaatcaattacgtccaaacatttagctttggcgagtcaaatcattagttttatgcattctttaattccagatatcaggcgagtacttttcctgaaaatacctgaagcgcgcaaacatctgttaatgtctgagctggatagagtagctcaggactacaagatccatcgagatgaaattcacaacaaacttgtccagataatgagagagaggttgcttgcaaatcttagaaaattaccccaaattgtggaaggctggaatggcccagaggataatgacgtgcagccgagtcaatttgctaaagctgttacaaaggaagttacctatttgcatcgcattctttcccaaacattgcttgaggttgaggtgcaaacaatattcaggcaagtggttcaaatattccattcacatattacagaagcattttcaaaattggaagtcaatactccctctggcaaagaataggtatgctgcttatttgtgcatcttttagca

SEQ ID NO: 210676 - DNA, 3015 bp, Zea Mays
caggagaaaaaaaaaacattcacctgctccctctcttctccccttcgtccaggggctagatctgacacccctcccacccaaccttgcttcgctcccgcgcctcccagatccgatcttcccatgcctcacttccgctgatcccactgccgccgcggaccgccgcgatggcgtcgcgcccgcctctccgcaccacctccgtcgcctccgtctcatcctccaccgagtcccccacctccaccggcccccccggcggcgtcccgcagtccatcaccgcgctcctcaacaacccgctcccctccgccgccgcctcctcgtactcctggttgtcctggccgcctcccaccatcacgctacccgatgcggctccaccaccgccgtcgcatccctgcgaggtcactcgcgccgacttcgcgccctaccttgccgctgtctccgaccccttcgcgcgcttcgccgacatccgcctccacgccagcgccgagctcgccgccgcctctgacgccgagggcgccccagcggtctcctctggcctcgccgcctgcctccgcgaggtgcccgcgctcttcttcaaggaggacttcgcgctcgaggacgggcccaccttccaggtcgcctgcccgctcgatgatgaagcgctgcaggagcgcctcggacagcaccttgacgtcgttgaagcccaccttgtgcgggagatagcgctccggtccgagtccttctacgaagcgcagggccggctgcgcgggcttgatggggagatagtcacgactgtagggaggatccgcgagctcagagaggtggtccgggttctcacgggggacctcgtcggggcagcgaggcaggtgcaagagctcaatgctacccgaggcaaccttgtgacgctgcagcagaagctaactgtcatcctgtatgtcagccaggcgcttaccgcgctcaagctgcttgtcgcagcagcagattgtgctggtgccctcgatgtcattgataacttgcaaaatctgctagatactgatgaacttgctgggctttattgcttttggcatattcgagatcagctgggaacatcactagattcagtgaacagcattctttcagcagaatttgtgcatgctgctgttcctgatggaaaagctgtagatgttatgattttatcaactgtgaaaagaaaggcttccagcccattgaatgggacggaccatgagggtaatgtagatgaggaggaaagttttattctcagggatcgactcctccccctcattatttgcctactgaggacggacaaacttcctgctgttctcagaatttaccgggatacacttataactgttatgaaagcttcaatcaaaaccacagtaggagagttactcccagttttaactgccagaccaatagattctgactcagtaactggagacagagctaccgatgctgatgctggaggccagtccttagcaaataagttgcggagtctttcatctgaaggatttgttcaacttttatctgccattttcaggatagtacaggtacatttacagcaagcagctgaagtgaaaagaatagttgagtgggtcatgggaaaccttgatggaacgttaggtgttgatgctagtaatcctacgttacaacatggtggtacagttattcctgatacccaagaaaatgactcttcaagaggctctaatactcttacacggagtacttccaagatcccatttgtccaaggaaaaacaaatgatttttccattataaattcgttaaagaatgttcgggctgatgtcttgagagagaacactgaagcagttttcgcggcttgtgatgctgcccatggacggtgggctaagctgctaggtgttcgttctgctttacatcccaggttaaggcttcaagaattcttgatcatctacaacataacagaagaatttatagctgctacagaaaagattggaggcaggttgggttacaacattcgtggaatcctacatcaacaatcgaagcaattcgttgattatcagcataatgttcggatgacaaaaatcaaggcagttctagatcaagagacgtgggttgctgtggatgttcctgaagagtttcaagcaatcgttctttcactttcatccacttattcttctgttaatggcatggagatgcctagcactgatgataactcaaagtttagtgatcatcggtctacaagtcaagaaccgacatattcagctaaaaatattgctgataatggcaaagtaacatccgggactggtgaaaacaaggttgaattcacttcacagactgaaaataatgttgccgggaatctaaagtccaccttgcaaacgattgtacatggaggtgttggctatcatatgtggtttaatactgttgaagatgttatccgaatacgttgacatcagtaaatgtttaccatcactatctttggaggtggtccaacgtgttgtggaaatattaaagcttttcaacactaggacttgccaacttgttctcggtgcaggagccatgcaggtgtctggacttaaatcaattacgtccaaacatttagctttggcgagtcaaatcattagttttatgcattctttaattccagatatcaggcgagtacttttcctgaaaatacctgaagcgcgcaaacatctgttaatgtctgagctggatagagtagctcaggactacaagatccatcgagatgaaattcacaacaaacttgtccagataatgagagagaggttgcttgcaaatcttagaaaattaccccaaattgtggaaggctggaatggcccagaggataatgacgtgcagccgagtcaatttgctaaagctgttacaaaggaagttacctatttgcatcgcattctttcccaaacattgcttgaggttgaggtgcaaacaatattcaggcaagtggttcaaatattccattcacatattacagaagcattttcaaaattggaagtcaatactccctctggcaaagaataggtatgctgcttatttgtgcatcttttagca

SEQ ID NO: 210677 - DNA, 1145 bp, Zea Mays
ctgttactggattttcggaaatctgctaagcatcccggttattaatgcctttgatcagggcacaagagataggggcctgacttccacagctgtgaagaaaggaggtctttattctcttgatgtcagttcagtttacaagtacaagaataccaccgttgatgttaaactggacacagaatcaaatatctctactacattgactgtgttggacgctttgccatccacaaagcttgtcacttctgtgaagctgcctgactacaattctggaaaggtggagctgcaatacttccatgagaatgcaacttttgctactgttgttggcacgaagccgactcctgtgattgatctttctgggacagtaggtgctcaaggagttgcatttggtgcagaagctgggtatgacactgctacaggaaaatttaccaagtacactgctgcaattggtgtaaccaagccagactaccatgctgcattcattctggcggacaaaggtgacaccattaaagtgtcaggtgtttatcaccttgatgagaaacagaaggcctcagctgtggctgagctaacccggaggctctcaacaaatcagaacacactcacagtcggtggactgtacacagttgatccccagacagctgtgaaggcaagactcaataacactggaacgcttgccgcgcttcttcagcatgagcttaaacccaagtcgctcttgacaatctctggtgaattcgacacaaaggccctggacagatccccaaagtttgggttggcgcttgcactgaagccctgatcagatcatcccatgttgattggtggtgaatcttgaattcattttttttttttgcaaagctgtagccaataattcgttccacgaaccttttctgttaatccggcaaatgtttggagcactgtgggtaggatccggatgggtcgcctacatgaaattttacctgtctgcccttattgttgaaagcatctggccgttggtaaatgtacattgtgcttgtttctttagcacctaggcctctctgccactgctactgagggcttgaggagccgctacagtaaccttttccatgtagaaattgcatgctgatcgtttgatttactgctcacctaaggtttaccacttgtttggagctcattta

SEQ ID NO: 210678 - DNA, 1140 bp, Zea Mays
gtcctttgactgaactagatgagatcaacctaacacttgttaactgtgtaactgaacgatgtaaaatgggcctgacttccacagctgtgaagaaaggaggtctttattctcttgatgtcagttcagtttacaagtacaagaataccaccgttgatgttaaactggacacagaatcaaatatctctactacattgactgtgttggacgctttgccatccacaaagcttgtcacttctgtgaagctgcctgactacaattctggaaaggtggagctgcaatacttccatgagaatgcaacttttgctactgttgttggcacgaagccgactcctgtgattgatctttctgggacagtaggtgctcaaggagttgcatttggtgcagaagctgggtatgacactgctacaggaaaatttaccaagtacactgctgcaattggtgtaaccaagccagactaccatgctgcattcattctggcggacaaaggtgacaccattaaagtgtcaggtgtttatcaccttgatgagaaacagaaggcctcagctgtggctgagctaacccggaggctctcaacaaatcagaacacactcacagtcggtggactgtacacagttgatccccagacagctgtgaaggcaagactcaataacactggaacgcttgccgcgcttcttcagcatgagcttaaacccaagtcgctcttgacaatctctggtgaattcgacacaaaggccctggacagatccccaaagtttgggttggcgcttgcactgaagccctgatcagatcatcccatgttgattggtggtgaatcttgaattcattttttttttttgcaaagctgtagccaataattcgttccacgaaccttttctgttaatccggcaaatgtttggagcactgtgggtaggatccggatgggtcgcctacatgaaattttacctgtctgcccttattgttgaaagcatctggccgttggtaaatgtacattgtgcttgtttctttagcacctaggcctctctgccactgctactgagggcttgaggagccgctacagtaaccttttccatgtagaaattgcatgctgatcgtttgatttactgctcacctaaggtttaccacttgtttggagctcattta

SEQ ID NO: 210679 - DNA, 758 bp, Zea Mays
cacctgctgagctgtccacgttaagcaatgggtcagcggcggcgtgggaaatccggggaagaagccagtggccgagagacaacagaccgcgtgaggcagcgacagtacgaggcacgccacctagcctgcagagagttcgcttcttctacgtactgtggcacagtggccaaccagagtcaaggttgtgcaccaccagattgcgttgtctcaatgtccttggctccgaaaaggtccagattaccagctccgggtgatgctgatgagctatctgtcattgaagaccaaattgcatggattgttcacataattacatccattgtcaagaagagcccgcagagaggtcgaggagcagcactagttgtttctctaacgttgatcaaggcaagcacatcaaggggtctcgggcacctccctctcattggtgttgtcgttgaactagttatggaagctaaaattgaaaagatgaaatatgagcatctgacgagggaggctgctttggcagagaaggagcttcttgaagaggagtacaagaaaaagtttgatgaggcaaagaaggaactatctctggagaatgatctagcaggcatgtgggttcttgttgctaagttgaaaagaggggctttagacatatctgatttgaatgttgatgattgaactaaagtgtaagggcgtaccgatcaccacattgttgtctcataattggtgttaatgaaaataacatggtgctacacggaatctctactttctcttgtaagaag

SEQ ID NO: 210680 - DNA, 265 bp, Zea Mays
atggccatcacaagcctcctggtcctggacccctacttccgagggaagaagccgaggggagactacgggacggcgagcgtagaaggcaggctagacgacggggaagaagccagtggccgagagacaacagaccgcgtgaggcagcgacagtacgaggcacgccacctagcctgcagagagggtcatctgcacaccaacagggtttgcgacaatgtctagaccttcattctaacagatgcaaccttaaagagtgctgagattcaag

SEQ ID NO: 210681 - DNA, 3582 bp, Zea Mays
gactagagagtcacacacgctcgctgctgcctctccttcctctcctcggcaagtgagagaggtgtgaaccgacgaggaagagcacccatccccactgcgcatcctcgattcgattccgtccccttgcctcttgcctcttgggcgtctccgcggctagatggcgtctccccctcccttcgacctctgcggcgatctcgacgacgacgacatcgatgaacccgtcaccgccgtccccaaggatcgccatctccctgccgccgcccctacgccgaacggcctcaacgaccacctcctccgcttcacccgcagcctccagcgccccacccaaaaccctaaccctagccccaatccgccaccgcctccgcccccagccgccgccgaagaacaagtcgagaaggtcaagctcgccggccgccgccgcctatgcaagcttgccaccaccaccaccgccactcagcgagtggatgaagaggaggcggagtgggacaaccaggacgacggtgaaagcatactcgacatcctagacgacctcaccacacgatttgactctctatccgtccagaagcccagcaccgccgcgaggtccaggacacaacagctcacccctttgccgtgcgccatcaccgtggacgacgacctagatgaccatagcccagatgatgtggatgctcacgccggtgcctcctcaccccttcaaatttctagctctgatgaagctagggctcccaccagacgctccgaggtcaagatcgaaactgatttagtctcctcagcctgtacccattatgcctgtgatgacgtccgtggcaaggggaagaacaaagggaccaccaaggatgttgggaggctaaatagggtatcaaaggcctcatcctttgttgattcttattccgattctgattatgacgactgcgaggaggaccaaggaacaagaacagattatgctgttaagcagctaagaagcaagggattcacaaggagaccacccaacaccccaacattcaggaaccatggtgtcagcgacgatgagctgggtcaggagaaggagaaccttggagctgtggagaacaatgctgaggatgttggatgggagaagacagaggacttcaagatggatccaactggaactgctgcaacatccaagccatacaagctcccaggaaagatattcaagatgcttttcgcccaccagcgcgagggcctccgatggctctgggttctgcactgcaggggaacaggaggaatcctaggggatgacatgggtcttggcaagacgatgcaggttgctgcatttttggctggactgtttcattctcgtctagtcaagagggtgctcattgttgctccaaagacacttctggcccattggacaaaggagctttcaattgttggccttaaagaaaagatcagagactactctggccccagcacaaatattcgcaattatgaactccaatatgccttcaaggagggtggtatcctcataaccacctatgacattgtcaggaacaactacaagctcataagaggcaactcctacaacaacagcaatgatgatgatgatgaggaaggaactttgtggaattacgtaattcttgatgagggacatctaataaaaaataataagacacaaagggcccaaagtttgtacgaaataccttgtgcccatcgcattgtgatcagtggaacacctattcaaaataacttgaaggaaatgtggactctgttcaatttctgttgcccagatgtcttgggtgataaacagcagttcaaaataaggtatgaaacggctatccttcgaggaaatgacaaaaatgctaccgctcgagagaagcacgtaggctcaaatgtagcaaaggaactaagagagcgaatcaagccatactttttgcggcgcctgaaaagtgaagttgtctttgatactggtgcatcagaagaaaaaacattagccaagaagaatgagctaattgtctggctgaagttaacaccatgccagaggaaactatatgaagcttttctaaatagtgagctggttcatttagcattgcagccaaaggcatcaccgttggctgcaatcacaatattgaagaaaatatgtgatcatccactgctattaactaagaaaggtgctgagggtgtgttggaaggaatgggtgaaatgttgaatgatcaagacattggaatggtggaaaaaatggccatgaaccttgcagatatggctcatgatgataatgcactggaagttggtcaggatgtctcatgcaagctatcattcatcatgtccttgttgcggaaccttgttggagaggggcatcatgttttaatattttcacagactcgtaaaatgctaaaccttattcaggaagctataatattagagggctatgcgtttttgcgcattgatggcaccaccaaggtttctgaccgggaaaggattgtgaaggacttccaagagggttgtggagctccagtttttctgctaaccacacaagttggtgggcttggacttacactcaccaaggcaactcgtgtcattgtagttgatcctgcatggaaccctagtacagacaatcaaagtgttgatcgtgcttaccgaattggacagactaaaaatgtgattgtataccgcttgatgacatctgcgaccattgaagaaaagatatacaaattgcaggttttgaagggcgctctgttcaggacagctacggagcaaaaagagcaaacacgttacttcagcaagagtgagattcaagagctatttagtttgccacaacaaggatttgatgtttccctcacacataagcagttgcaagaagagcatggtcaacaagttgttctggatgagtccttgaggaagcatatacagtttctggagcaacaaggaatagccggtgtgagtcatcacagcctcctattctctaaaactgcaaccctgcccactctgagtgagaatgatgcactggacagcaaacctcggggcatgcccatgatgccccagcaatattacaagggatcctcatctgactatgtcgccaacggggcatcttttgcgctgaagccaaaggatgaaagtttcactgttcgaaactacattccaagtaacagaagcgcagagagtcctgaagagataaaggtgctgttgtcgaagctaccagatggtggtgagaagataaggaggcagataaatgagctggacgagaagctgacttctgctgagaaggggctgaaggaggggggcactgaagtgatttccttggatgactgatccaagacatggagagtctgtgctcggcaaaagtaaagtgttttgaatagctttagtcactgggttgtgactagcatcaatcaagtctgctctttttgctgcatctctgggctgggtctatcgtttatgcaatacaatgctttttctgatgatgattatatgaataatataatccccagacaaagcagcaaccattacagtcagacagagatgcagaatgcttggtgggtttgcttgatcactctatagtccgtccgttcattgtataggcggctgaatcaaaatcagaggagaagggcgagcagggcgttaaagat

SEQ ID NO: 210682 - DNA, 1070 bp, Zea Mays
tccaaactccgagttccgaccccgacggggaaaaaatcagactcctcgtttccctccctatcctctctcgtcacgccgttgtcgtcccgttgctcgattcgaaggcgcgacccttcgccatcgctcttgcctcgccttgccggcggcgccaatacccgtgctcgcgtcggagcgcccaacttccccacggtggccgttccgccgcggcgcacgcaggtgggcgatgcggtcggatgagtgggcggcggcggcggcggcggcagtgtttcgtggaaaggaggaggaggggggccttgtgctttcccgcggcgttgctgtctccgccgcatacgcccctcggagccggtgatggccccgaccgcggagtcgtcttccccgccgccgcaacggcgcccccgcacgggcccacccccggggctgaagaacctcagcaatacctgctacctcaactgcgtcctacagtgcctcgcgtccacgccgcccctcgccacgttctgccttgcctctggccactccgacatttgcaagaaggtgtccccgaatagggacaaggagtgcgcgttctgcgtgcttgagcggcagatcgcccggctgcttcgggcagatgctggggcgctcgattccccagcaaaggtaatccgctgcatgcccctattcgctgagcacttcaggtgggggcgccaggaggatgcgcacgagttcctccgctatgtggtagatgcctgtcacactgctggcctccgcacgcgcaagctgctactcgctaaaggtgccaatggtaactgtggtgaggatggcagggggcagggggcatgtctggttatgagggagacatttggtggggcattgctgagtcaagtgaaatgccttgtgtgcaacagagagtctaacaagactgatgaaataatggacatcagtctcgatctgcctgggagcagttctgttgctgatgcccttgcccgcttctttaagccggagatattggaaggtgcaaacaaatatagttgtgaaagtcattttcaccaaggcaatgatagctctggtaatctctccagtttatgtctgcttat

SEQ ID NO: 210683 - DNA, 1790 bp, Zea Mays
gccacccgcacgccacgtaacccccgtccccctcctcgagcctcccgtcgcgtgtcctgcgttgcgcttgctatttatcacccccgtcctcctccgtcccaaggcagtcgcagttcacaactgcgactaaaaaccatctttggggcccttcgccgcgatttgcttcgcttctcggactaggttaagttgccttttcgattctcagaaaaagactggctctgcactcggataattttaaaatggatagtgcacagcagcccactggggaattgaacaattcgttcgatactcttatggtttctggaggtgaccagagtcgacagcctcaggatgctggcaatgaaacgagcttcacgaattggaaagacctccccatggagctgctcctgcgtatcatttcactagttggagatgacaggatagtcattgtggcctccggtgtatgcacaggatggcgtgacaccttggggtggggggttgcaaatctttcactatcatggtgccaggaccgcatgaatgacttggtgatatcactggctcacaaattcacgaagctgcaagttctatctctacgccagatcaggcctcagctagaagacagcggcgtggaggccgtggcaaaccactgccacgacctgcgcgagctggatctcagcagaagcttcaggctgagcgaccggtccttgtacgccctggcgcacgggtgccctcagcttaccaggctcaacatcagcgggtgctccagtttcagcgacgtggcgctcgtgttcctctccagccagtgcgggaacctgagatgcctgaacctgtgcgggtgtgtgagggcggcctctgacagagcgctacaggccatcgcctgttactgtggccagctgcagtcgttgaacctgggctggtgtgatggcatcactgacaagggggtgaccagcctggcttcgggatgccctgaactcagggccgtcgacctgtgcggctgtgttcttataacagatgagagcgtggttgcgctggcgaacggctgccttcacctgcgctccctgggtctctactactgccagaacatcacggaccgcgccatgtactccctggccgccaacagccgcgtgaggagtcggggccggggctgggacgcgacagcgaagagcggcggcggtggcaaggaccgggagcgggacggactggcgagcctgaacatcagccagtgcacggcgctgaccccgcccgcggtgcaggcggtgtgcgactcgttcccggcgctgcacacgtgcccggagcggcactcgctcaacatcagcgggtgcctcagcctaacctccgtgcactgcgcctgtgcgctgcaccctcaccgggccgggcgagtcatcctctccaaccacgcctactgaacgcaatgcgtgaataggcggcgatgctcagatgtgtggataggccgttcaaccgtgagcgacggtgtccgctgtttatgtgaggtgcttgttttgtgtttatcgtctgtaaaaacatggactgtatctgactatctgttgtcatgtcttttgagatctttagcctggactctggagcagcgcggcgacggcgatagccactcctttggtgggggctctcagactatctccaaaccctatcatactcttatttctatcctgttcgtttagtttaatccatatcggtttctactatagaggaacaaacagtcaaacgaacgagaacaaacagtctgtaaaagcagtctaaacagtcagctttagaaacgaacagtgttacagtttatttatagtgtaaaacagcct

SEQ ID NO: 210684 - DNA, 1694 bp, Zea Mays
ccgtccccctcctcgagcctcccgtcgcgtgtcctgcgttgcgcttgctatttatcacccccgtcctcctccgtcccaaggcagtcgcagttcacaactgcgactaaaaaccatctttggggcccttcgccgcgatttgcttcgcttctcggactaggttaagttgccttttcgattctcagaaaaagactggctctgcactcggataattttaaaatggatagtgcacagcagcccactggggaattgaacaattcgttcgatactcttatggtttctggaggtgaccagagtcgacagcctcaggatgctggcaatgaaacgagcttcacgaattggaaagacctccccatggagctgctcctgcgtatcatttcactagttggagatgacaggatagtcattgtggcctccggtgtatgcacaggatggcgtgacaccttggggtggggggttgcaaatctttcactatcatggtgccaggaccgcatgaatgacttggtgatatcactggctcacaaattcacgaagctgcaagttctatctctacgccagatcaggcctcagctagaagacagcggcgtggaggccgtggcaaaccactgccacgacctgcgcgagctggatctcagcagaagcttcaggctgagcgaccggtccttgtacgccctggcgcacgggtgccctcagcttaccaggctcaacatcagcgggtgctccagtttcagcgacgtggcgctcgtgttcctctccagccagtgcgggaacctgagatgcctgaacctgtgcgggtgtgtgagggcggcctctgacagagcgctacagatgagagcgtggttgcgctggcgaacggctgccttcacctgcgctccctgggtctctactactgccagaacatcacggaccgcgccatgtactccctggccgccaacagccgcgtgaggagtcggggccggggctgggacgcgacagcgaagagcggcggcggtggcaaggaccgggagcgggacggactggcgagcctgaacatcagccagtgcacggcgctgaccccgcccgcggtgcaggcggtgtgcgactcgttcccggcgctgcacacgtgcccggagcggcactcgctcaacatcagcgggtgcctcagcctaacctccgtgcactgcgcctgtgcgctgcaccctcaccgggccgggcgagtcatcctctccaaccacgcctactgaacgcaatgcgtgaataggcggcgatgctcagatgtgtggataggccgttcaaccgtgagcgacggtgtccgctgtttatgtgaggtgcttgttttgtgtttaggcgtcaaggcgtgtacttggggtctctactctctagggaaccgtgtagaagcaaccgagttgagttcatcgtctgtaaaaacatggactgtatctgactatctgttgtcatgtcttttgagatctttagcctggactctggagcagcgcggcgacggcgatagccactcctttggtgggggctctcagactatctccaaaccctatcatactcttatttctatcctgttcgtttagtttaatccatatcggtttctactatagaggaacaaacagtcaaacgaacgagaacaaacagtctgtaaaagcagtctaaacagtcagctttagaaacgaacagtgttacagtttatttatagtgtaaaacagcct

SEQ ID NO: 210685 - DNA, 3022 bp, Zea Mays
cgtcgccgtttcggtctccggaaaggaaagcaaaagagaaggagggggcgagagaagaaactgatttttggcgaggccaagccgggggtgggattaccgggagcacgctgactgggatcacggcggatggcggcggcggataggcagttggtagttgccgtcgaggggaccgcggcgctggggccctactggtccaccattgtggcggagtacgtcgagaagatcgtgaggagcttttgtgcaagtgaactgccaggccagaagcttgtgggtactccgcctgaacttgcattagttgtttttcatacccatggaccttacagtgcttttgatgtgcagcgaagtggatggacaaaagatgtcgatgctttcctatcatggttatctggaatattgttcagtggtggaggattcagtgaagcttctacttgtgaaggtcttgctgaagcattgaagatacttcaaggcaatcctaatacaacccaaggtcatcaaaaccatgaagcacaaaagcattgcatacttgtcgctgcaagtaatccttatcctctgccaacacctgtatactgtcttcctactcaaagtactgatcacaaagagaacattgagacatcaaaagaaccttcaattgctgatgctgagaccgttgcaaagtcatttgctcagtgctctgtctcattgtcagtgatatctccaaaacagcttccaacattaaaggcaatatacaatgcgggcaagcgaaatcttcgggctgctgatccatcagtcgaccatgcgaaaaatccacacttccttgttttgctctctgagaatttcatggaggcacggactgctcttagtcgccctttacatggaaacttggctccaaatcaaaccataacgaagatggacacggcacctgcagtgactatgccaggaccaacatcaaatggcaactcctcagtgaatgcaatggcaggccgtcaaccaattgttggaggtatttctaccacatctgttaaagtggagccaacaaccatgccaccgatagtttctgcacctgctttctcgcatgtaacgcctatttcaaatgtggcttcacaaggaatatcagcactgcaaacctcatcaccttctcttatttcacaagaagcaaatatgggaaatgataatgtacaagaacacaagcctataataaacccagttcaacaaccgattcggcctggtggtcatggcagcctcctcaacaatctgtcacaggttcggttgatgaactcaacttctttaggaggaggagctacctcgatgggactgcctaacatgggagcaacaccaatacaagtccacatgtcaaacatgatatcaagcggcatgacatcaacaccctctgtcatctcctctatgtctggacctggacaacctattagtactcaacagatggtacagagcacagctcttggttcgtttggctcaaacactcctactgttacaggcaattcaactattgctgtatcatcctctttgactaacaaccaaagcagcatgggcatgggtcaatctgtgcaatctgtggcacagggaggcttggtgtctggttcacaattaggacaaggtggaattgttgcaaaccaaaatgtgatgagcacccttggacctacagctatctcttcaacgcctgcgatgatgccgacacctgggatggtcccacagacaggagtcaattccttaggtgtgaataacaattctgctatgaatatgcctattacgcagcagcatgccaatgcccaacagccgccaccaaagtacgtcaaaatttgggagggaactttatctggccaaaggcaaggacagcctgtaataatttgtaaactcgaaggttataggagtggaacagcgtctgaaacacttgcagcggactggccagaaacaatgcagattgttcgcctcatagcccaggagcatatgaacaacaaacaatatgttggcaaggcagactttctagtttttcggactttaaatcaccatgggtttcttgtacaactacaagagaagaagctgtgtgctgtgatacagttaccatcgcaaactctgttgctgtcgatggctgacaaagcaggtcgtttgattggcatgctcttccctggggacatggtggtgttcaaaccgcaggcctcaactcagcagacaccaatgcagcaacagcagctacagcaatttcaacagcagcagcagcagctgcaacaacacatgcatatgcagccgcaaggcctcccacttcagcaatcacagatgcaactccagcaacagcagccgcagatgcaaccgatgcagcagcagcaaccttcgcagatgcagcagcagatgcaatcgatgcagcagcagatgcagccaatgcagcagcaaatgcagcatcaacagcaacagatgcagcagatgcagcctcaacagcaacagatgcagcaaatgcagcagcagcagcaacagatgcagcctcaacagcaacagatgcagcaaatgcagcagcagcagcaacagatgcagcctcaacagcagcagcaaccccagatggtgggtacaggaatggggcagcagttcatgcaggggcacaatcgggcagtgcagatgatgcaagggaagattacgccacaggggccgggcagcatgcctgggggaggcttcctaccttaagcaccttttatcagcaggcatcagatgaattgagggtttacactgacccaagtgttgagatgtcaacttcatttgacagggttagggaatagtcactcggggagtgttgctaaaacttaatctgaaaacttaagcatccctgtcaccgataggtaaatgccagatgtccatgcataggtgcatactttatgatatggtggtgtactcgtaatcttgagtgactttatggcattgttgtactagccgtaaactattaggtataacagaattattatttaaactacagtaaaataagtgacctgtgttgtttagggtttaaatggtacgttaaataggtagttgaatcatttaagca

SEQ ID NO: 210686 - DNA, 3220 bp, Zea Mays
cgtcgccgtttcggtctccggaaaggaaagcaaaagagaaggagggggcgagagaagaaactgatttttggcgaggccaagccgggggtgggattaccgggagcacgctgactgggatcacggcggatggcggcggcggataggcagttggtagttgccgtcgaggggaccgcggcgctggggccctactggtccaccattgtggcggagtacgtcgagaagatcgtgaggagcttttgtgcaagtgaactgccaggccagaagcttgtgggtactccgcctgaacttgcattagttgtttttcatacccatggaccttacagtgcttttgatgtgcagcgaagtggatggacaaaagatgtcgatgctttcctatcatggttatctggaatattgttcagtggtggaggattcagtgaagcttctacttgtgaaggtcttgctgaagcattgaagatacttcaaggcaatcctaatacaacccaaggtcatcaaaaccatgaagcacaaaagcattgcatacttgtcgctgcaagtaatccttatcctctgccaacacctgtatactgtcttcctactcaaagtactgatcacaaagagaacattgagacatcaaaagaaccttcaattgctgatgctgagaccgttgcaaagtcatttgctcagtgctctgtctcattgtcagtgatatctccaaaacagcttccaacattaaaggcaatatacaatgcgggcaagcgaaatcttcgggctgctgatccatcagtcgaccatgcgaaaaatccacacttccttgttttgctctctgagaatttcatggaggcacggactgctcttagtcgccctttacatggaaacttggctccaaatcaaaccataacgaagatggacacggcacctgcagtgactatgccaggaccaacatcaaatggcaactcctcagtgaatgcaatggcaggccgtcaaccaattgttggaggtatttctaccacatctgttaaagtggagccaacaaccatgccaccgatagtttctgcacctgctttctcgcatgtaacgcctatttcaaatgtggcttcacaaggaatatcagcactgcaaacctcatcaccttctcttatttcacaagaagcaaatatgggaaatgataatgtacaagaacacaagcctataataaacccagttcaacaaccgattcggcctggtggtcatggcagcctcctcaacaatctgtcacaggttcggttgatgaactcaacttctttaggaggaggagctacctcgatgggactgcctaacatgggagcaacaccaatacaagtccacatgtcaaacatgatatcaagcggcatgacatcaacaccctctgtcatctcctctatgtctggacctggacaacctattagtactcaacagatggtacagagcacagctcttggttcgtttggctcaaacactcctactgttacaggcaattcaactattgctgtatcatcctctttgactaacaaccaaagcagcatgggcatgggtcaatctgtgcaatctgtggcacagggaggcttggtgtctggttcacaattaggacaaggtggaattgttgcaaaccaaaatgtgatgagcacccttggacctacagctatctcttcaacgcctgcgatgatgccgacacctgggatggtcccacagacaggagtcaattccttaggtgtgaataacaattctgctatgaatatgcctattacgcagcagcatgccaatgcccaacagccgccaccaaagtacgtcaaaatttgggagggaactttatctggccaaaggcaaggacagcctgtaataatttgtaaactcgaaggttataggagtggaacagcgtctgaaacacttgcagcggactggccagaaacaatgcagattgttcgcctcatagcccaggagcatatgaacaacaaacaatatgttggcaaggcagactttctagtttttcggactttaaatcaccatgggtttcttgtacaactacaagagaagaagctgagtaattttgttattttgctgcggttcatctactgtcgtttcatacacttagttttctgtcagttactttatacagttctaatatccaattggtcctggtttcagtgtgctgtgatacagttaccatcgcaaactctgttgctgtcgatggctgacaaagcaggtcgtttgattggcatgctcttccctggggcctcaactcagcagacaccaatgcagcaacagcagctacagcaatttcaacagcagcagcagcagctgcaacaacacatgcatatgcagccgcaaggcctcccacttcagcaatcacagatgcaactccagcaacagcagccgcagatgcaaccgatgcagcagcagcaaccttcgcagatgcagcagcagatgcaatcgatgcagcagcagatgcagccaatgcagcagcaaatgcagcatcaacagcaacagatgcagcatcaacagcaacagatgcagcaaatgcagcagcagcagcagcaacaacaacaacaacaacaacagatacagcctcagcagcaacagatgcagcaaatgcagcagcagcagcagcaacagatgcagcctcaacagcaacagatgcagcaaatgcagcagcagcagcaacagatgcagcctcaacagcaacagatgcagcaaatgcagcagcagcagcaacagatgcagcctcaacagcagcagcaaccccagatggtgggtacaggaatggggcagcagttcatgcaggggcacaatcgggcagtgcagatgatgcaagggaagattacgccacaggggccgggcagcatgcctgggggaggcttcctaccttaagcaccttttatcagcaggcatcagatgaattgagggtttacactgacccaagtgttgagatgtcaacttcatttgacagggttagggaatagtcactcggggagtgttgctaaaacttaatctgaaaacttaagcatccctgtcaccgataggtaaatgccagatgtccatgcataggtgcatactttatgatatggtggtgtactcgtaatcttgagtgactttatggcattgttgtactagccgtaaactattaggtataacagaattattatttaaactacagtaaaataagtgacctgtgttgtttagggtttaaatggtacgttaaataggtagttgaatcatttaagca

SEQ ID NO: 210687 - DNA, 4806 bp, Zea Mays
gtggaatcctcaacctcaacaaaccaaaccccggccccacaccttcaccatgctacctctccccttttttttcccgattcgccctgtcttcccaagccctgctttgccgctagcgacaaaaccctaaccctaaccgcggggatggcgacgcagtcgcactcctcctccgctgccgcgatagacatgtatgagacggcctctcagccggacgcctccgttgccggcgacgcctacaccttccttgagttcaacactcagggtgacgaattcgactaccccgactttccggagctttctcaaccgccgccccgatcgacgccgctgacgtcttccatccccggcgctggcgcgtcgtcctcgtcgtggcctgccccgccgccgccgccctccgacgcggcctccgctgaacccgatctcacgtctctggacgtccccaccccgccggcctcctcctcctcgccgtcgccgcggtctgcctccaaggcgcgctcgttggctgcggcagatgggctcgcctccggggtagccgcactcagcttcgaggatcctgttggagccggcgccggagaggacgggtacgactacggcaagggagacttcgtggaacacgcctgccggtactgtgggatccacaatcctgcatgcgtggcgaggtgcaacgtgccctcctgccgcaagtggttctgtaactcgcgggggaacacctctggctcccacattgtcaaccacctggttagggcaaagcataaggaagtgtgccttcacaaggatagccctttgggagaaacaatccttgaatgctacaactgtggctgtcggaatgtatttcttcttgggtttatctcagcaaaattggagaatgttgtcgttcttttatgcagagagccgtgtttaagtgttaatgcactgaaggatatgaattgggatctcagccagtggtgccctcttattgatgacaggtgtttcttgtcatggcttgtaaaggtaccttcagagcaggagcagctaagagctcggcaaattagtgcacagcaaattaacaaagtggaagagctttggaagacaaatcctgatgcatctcttgaagatcttgaaaagcctggcgtagatgatgaacctcagccagttgttttgaagtatgaagatgcttaccagtaccaaaatgtttttgcgccactgataaaacttgaggctgattatgacaagatgacgaaagagtcacagagcaaggataatgtaactgtccggtgggatattgggttgaacaagaagcgtgtagcttactttgtctttccaaaggaagacaatgagttgaggcttgtgcctggagatgagctacgcttgagatatcctggtgatagctcacatcccacatggcaatctgtgggacatgtgattaagctcactgcacaagaggaggtggcacttgagcttcgtgcaagtcagggggtgcctactgagctaaacgttggattcagtgttgatttcgtttggaagagtaccagttttgataggatgcaaggagcaatgaaaacttttgctgtggacgagacaagtgtcagtggatacatataccaccaccttttgggacatgaagttgagcatcaaataatacgtaacaccctaccaagacgctttggtgcacctggacttccagaactaaatgcttcccaggttttagcagttaaaagtgtcctgcagaagccagttagtttgattcaaggtccacctggcactggaaaaactgtcacatctggtgcaattgtgtatcacatggccaaacaaggtcaaggacaggttcttgtatgtgccccaagtaatgttgctgttgatcagctggcagagaagataagctcaaccggtctcaaggttgttaggctgtgtgcaaaatctagagaagctgtttcgtctcctgttgagcatctcacacttcattatcaggttaggcaccttgatacctctgaaaagagtgaatttcacaagttacagcaactgaaagatgaacaaggtgaattgtccagcagtgatgagaagaagtacaaggcactaaagcgtgccactgaaagagagatactgcagagtgctgatgtcatttgttgcacctgtgtcggtgctggagatcctcgtctttcaaacttccgtttccgacaagttcttattgatgagtccacacaggcaacagagcctgaatgtcttattcctttggtgcttggtgtcaagcaggttgtccttgtcggagatcattgccaattgggtcctgtcatcatgtgcaaaaaagcagcccgtgcaggattagcacaatctctctttgaacgccttgttatccttggagtgaagccattcaggctacaggtccagtatagaatgcatccatgcctctcagagtttccatccaactgcttttatgaaggcacactgcaaaatggagtgactgttaatgagaggcattcgtctggaattgattttccttggcctgttccaaatcgcccaatgttcttctatgtgcagatgggacaagaagaaatcagtgctagtgggacatcgtatctcaatagaactgaagctgcaaatgttgaaaaaattgtaacaacttttttaagaagtggtgttgtaccaagccagatcggagttatcacaccttatgaagggcaaagggcatacattgtaaattacatgtcaaggaatggctctcttcgccaacaactttacaaggaaatcgaggtcgctagtgtagactcatttcagggtagagagaaagactacattattctatcttgtgttagaagcaatgagcaccagggaattgggtttctcaatgacccgcgcaggttaaacgttgcgttaactcgtgcacgttatggcatagttattcttggtaatccaaaagtactaagcaagcagccactttggaatagcttgttgacacattacaaggagcatgagtgcttggtagaaggacctctgaacaacttaaagcagagcatggtgcagtttcagaagcccaaaaagatatataatgatcggagattgttactgggcggtgctcaaggcatgcatggagctaacttcggggctggggcctcaagccaagcagcagataagagaagtggcagggggaaagggcaatcatttgtttcttatggccctccaaatggggtgcacaagcctggtgtgcacccagcaggttatgctgtacctcgtatgccttttcctccatttcctggggctccacattctcaaccatatgcaattccgactcggggtttgcatgggcccattggagctgttccaccggtgcatcaacctggaagtagaagttttggggcacctcgttcaaatactggtgggcctattggtggccaccttgctcatcaacagaattcccagcaagctatgggtggcattgggtcaaattttaactacgctggcatggagaattcgagtagtcagccttctggtgtagcccaaatgtcccaatcgggattaatgacacaggacttcattgtagatgattttaagagccaaggatcacatgtgccatacaacattgcagaattttctacccaggcttctcaaggtggttatggtgttgagtttactcaagcgccccaatctggatactctgggaattatatgaaccaaaacacacatcctggatactcccatattggtacaacaaatgacattgtatctcaggatcacatggcccatggatctcacggaatgtttacgcaagtggggtataatgatccgtcgcaagatgagtcatctcagattcattatggaatggctgctgctggtcccctacattcgcagagcatgatgaaccccttatactctcaatcctatgctcactacaacacccagccacattctcttcaacctcctccccagtgataattaaggcttgtgatatggtgaagccacattttggaagtttggcttgtacaagatggctatggctactgaccaacagccagcgccgaggagcacaaggattgcaatgtatcatgttcttgatcgttgtggttcactacccgtttagaccacaagaggggtcatattgtgcatcggaagaggttggcggcactatcctcatccctcacctgtatataaaggcaatctgggcctatagtggtacaatgtgaacatattccaggatttgctgccactcaagtcaagttgcagcaattgcatgcctccatggtgtagagtggctttgtataaaggtgctataggttgggtggccacaacccttttggatatcacacatgacaagatatttacctttacattttgtatgcatctgatatggttttgatatttatgccagagatgatttaggtgatggtaaaattagttagtgacgactggaaatttgggagtgttctgtgaaagtaaatttgaccctgaatcctgcgaggaatggctgatcatgaagtttattgtataatttggatagtccgttcagagatattcatgcataggtgcatcacatatttgttctttatctttctgcaagtggcacttttctgagtggtcaattctgcaatgaaatgtgcgtgtctgaagtttctgttgccatcgtgccagatcggataaacaagtttatcgaggccacagtttttttaggctacaggggattctgatatctgataagcttgctaatcgcatcgcagttgagcttgtatttcgcggcttgtgcgatcatacgggattatttttagatctgtgacattgataggaaattctagggctcgtttgtttcctttgaattgaattctattataataataataactggga

SEQ ID NO: 210688 - DNA, 4866 bp, Zea Mays
ggaatcctcaacctcaacaaaccaaaccccggccccacaccttcaccatgctacctctccccttttttttcccgattcgccctgtcttcccaagccctgctttgccgctagcgacaaaaccctaaccctaaccgcggggatggcgacgcagtcgcactcctcctccgctgccgcgatagacatgtatgagacggcctctcagccggacgcctccgttgccggcgacgcctacaccttccttgagttcaacactcagggtgacgaattcgactaccccgactttccggagctttctcaaccgccgccccgatcgacgccgctgacgtcttccatccccggcgctggcgcgtcgtcctcgtcgtggcctgccccgccgccgccgccctccgacgcggcctccgctgaacccgatctcacgtctctggacgtccccaccccgccggcctcctcctcctcgccgtcgccgcggtctgcctccaaggcgcgctcgttggctgcggcagatgggctcgcctccggggtagccgcactcagcttcgaggatcctgttggagccggcgccggagaggacgggtacgactacggcaagggagacttcgtggaacacgcctgccggtactgtgggatccacaatcctgcatgcgtggcgaggtgcaacgtgccctcctgccgcaagtggttctgtaactcgcgggggaacacctctggctcccacattgtcaaccacctggttagggcaaagcataaggaagtgtgccttcacaaggatagccctttgggagaaacaatccttgaatgctacaactgtggctgtcggaatgtatttcttcttgggtttatctcagcaaaattggagaatgttgtcgttcttttatgcagagagccgtgtttaagtgttaatgcactgaaggatatgaattgggatctcagccagtggtgccctcttattgatgacaggtgtttcttgtcatggcttgtaaaggtaccttcagagcaggagcagctaagagctcggcaaattagtgcacagcaaattaacaaagtggaagagctttggaagacaaatcctgatgcatctcttgaagatcttgaaaagcctggcgtagatgatgaacctcagccagttgttttgaagtatgaagatgcttaccagtaccaaaatgtttttgcgccactgataaaacttgaggctgattatgacaagatgacgaaagagtcacagagcaaggataatgtaactgtccggtgggatattgggttgaacaagaagcgtgtagcttactttgtctttccaaaggaagacaatgagttgaggcttgtgcctggagatgagctacgcttgagatatcctggtgatagctcacatcccacatggcaatctgtgggacatgtgattaagctcactgcacaagaggaggtggcacttgagcttcgtgcaagtcagggggtgcctactgagctaaacgttggattcagtgttgatttcgtttggaagagtaccagttttgataggatgcaaggagcaatgaaaacttttgctgtggacgagacaagtgtcagtggatacatataccaccaccttttgggacatgaagttgagcatcaaataatacgtaacaccctaccaagacgctttggtgcacctggacttccagaactaaatgcttcccaggttttagcagttaaaagtgtcctgcagaagccagttagtttgattcaaggtccacctggcactggaaaaactgtcacatctggtgcaattgtgtatcacatggccaaacaaggtcaaggacaggttcttgtatgtgccccaagtaatgttgctgttgatcagctggcagagaagataagctcaaccggtctcaaggttgttaggctgtgtgcaaaatctagagaagctgtttcgtctcctgttgagcatctcacacttcattatcaggttaggcaccttgatacctctgaaaagagtgaatttcacaagttacagcaactgaaagatgaacaaggtgaattgtccagcagtgatgagaagaagtacaaggcactaaagcgtgccactgaaagagagatactgcagagtgctgatgtcatttgttgcacctgtgtcggtgctggagatcctcgtctttcaaacttccgtttccgacaagttgtccttgtcggagatcattgccaattgggtcctgtcatcatgtgcaaaaaagcagcccgtgcaggattagcacaatctctctttgaacgccttgttatccttggagtgaagccattcaggctacaggtccagtatagaatgcatccatgcctctcagagtttccatccaactgcttttatgaaggcacactgcaaaatggagtgactgttaatgagaggcattcgtctggaattgattttccttggcctgttccaaatcgcccaatgttcttctatgtgcagatgggacaagaagaaatcagtgctagtgggacatcgtatctcaatagaactgaagctgcaaatgttgaaaaaattgtaacaacttttttaagaagtggtgttgtaccaagccagatcggagttatcacaccttatgaagggcaaagggcatacattgtaaattacatgtcaaggaatggctctcttcgccaacaactttacaaggaaatcgaggtcgctagtgtagactcatttcagggtagagagaaagactacattattctatcttgtgttagaagcaatgagcaccagggaattgggtttctcaatgacccgcgcaggttaaacgttgcgttaactcgtgcacgttatggcatagttattcttggtaatccaaaagtactaagcaagcagccactttggaatagcttgttgacacattacaaggagcatgagtgcttggtagaaggacctctgaacaacttaaagcagagcatggtgcagtttcagaagcccaaaaagatatataatgatcggagattgttactgggcggtgctcaaggcatgcatggagctaacttcggggctggggcctcaagccaagcagcagataagagaagtggcagggggaaagcagggcaatcatttgtttcttatggccctccaaatggggtgcacaagcctggtgtgcacccagcaggttatgctgtacctcgtatgccttttcctccatttcctggggctccacattctcaaccatatgcaattccgactcggggtttgcatgggcccattggagctgttccaccggtgcatcaacctggaagtagaagttttggggcacctcgttcaaatactggtgggcctattggtggccaccttgctcatcaacagaattcccagcaagctatgggtggcattgggtcaaattttaactacgctggcatggagaattcgagtagtcagccttctggtgtagcccaaatgtcccaatcgggattaatgacacaggacttcattgtagatgattttaagagccaaggatcacatgtgccatacaacattgcagaattttctacccaggcttctcaaggtggttatggtgttgagtttactcaagcgccccaatctggatactctgggaattatatgaaccaaaacacacatcctggatactcccatattggtacaacaaatgacattgtatctcaggatcacatggcccatggatctcacggaatgtttacgcaagtggggtataatgatccgtcgcaagatgagtcatctcagattcattatggaatggctgctgctggtcccctacattcgcagagcatgatgaaccccttatactctcaatcctatgctcactacaacacccagccacattctcttcaacctcctccccagtgataattaaggcttgtgatatggtgaagccacattttggaagtttggtgggttgcatcttttggcccacatgttgtgcccttctctgctatttcagaatcgatggtgcatagacatcagatgcaagcaatgtgaacaagcatatgacacactttgtattggatgtttatcggggcaggcttgtacaagatggctatggctactgaccaacagccagcgccgaggagcacaaggattgcaatgtatcatgttcttgatcgttgtggttcactacccgtttagaccacaagaggggtcatattgtgcatcggaagaggttggcggcactatcctcatccctcacctgtatataaaggcaatctgggcctatagtggtacaatgtgaacatattccaggatttgctgccactcaagtcaagttgcagcaattgcatgcctccatggtgtagagtggctttgtataaaggtgctataggttgggtggccacaacccttttggatatcacacatgacaagatatttacctttacattttgtatgcatctgatatggttttgatatttatgccagagatgatttaggtgatggtaaaattagttagtgacgactggaaatttgggagtgttctgtgaaagtaaatttgaccctgaatcctgcgaggaatggctgatcatgaagtttattgtataatttggatagtccgttcagagatattcatgcataggtgcatcacatatttgttctttatctttctgcaagtggcacttttctgagtggtcaattctgcaatgaaatgtgcgtgtctgaagtttctgttgccatcgtgccagatcggataaacaagtttatcgaggccacagtttttttaggctacaggggattctgatatctgataagcttgctaatcgcatcgcagttgagcttgtatttcgcggcttgtgcgatcatacgggattatttttagatctgtgacattgataggaaattctagggctcgtttgtttcctttgaattgaattctattataataataataactggga

SEQ ID NO: 210689 - DNA, 4976 bp, Zea Mays
gaatcctcaacctcaacaaaccaaaccccggccccacaccttcaccatgctacctctccccttttttttcccgattcgccctgtcttcccaagccctgctttgccgctagcgacaaaaccctaaccctaaccgcggggatggcgacgcagtcgcactcctcctccgctgccgcgatagacatgtatgagacggcctctcagccggacgcctccgttgccggcgacgcctacaccttccttgagttcaacactcagggtgacgaattcgactaccccgactttccggagctttctcaaccgccgccccgatcgacgccgctgacgtcttccatccccggcgctggcgcgtcgtcctcgtcgtggcctgccccgccgccgccgccctccgacgcggcctccgctgaacccgatctcacgtctctggacgtccccaccccgccggcctcctcctcctcgccgtcgccgcggtctgcctccaaggcgcgctcgttggctgcggcagatgggctcgcctccggggtagccgcactcagcttcgaggatcctgttggagccggcgccggagaggacgggtacgactacggcaagggagacttcgtggaacacgcctgccggtactgtgggatccacaatcctgcatgcgtggcgaggtgcaacgtgccctcctgccgcaagtggttctgtaactcgcgggggaacacctctggctcccacattgtcaaccacctggttagggcaaagcataaggaagtgtgccttcacaaggatagccctttgggagaaacaatccttgaatgctacaactgtggctgtcggaatgtatttcttcttgggtttatctcagcaaaattggagaatgttgtcgttcttttatgcagagagccgtgtttaagtgttaatgcactgaaggatatgaattgggatctcagccagtggtgccctcttattgatgacaggtgtttcttgtcatggcttgtaaaggtaccttcagagcaggagcagctaagagctcggcaaattagtgcacagcaaattaacaaagtggaagagctttggaagacaaatcctgatgcatctcttgaagatcttgaaaagcctggcgtagatgatgaacctcagccagttgttttgaagtatgaagatgcttaccagtaccaaaatgtttttgcgccactgataaaacttgaggctgattatgacaagatgacgaaagagtcacagagcaaggataatgtaactgtccggtgggatattgggttgaacaagaagcgtgtagcttactttgtctttccaaaggaagacaatgagttgaggcttgtgcctggagatgagctacgcttgagatatcctggtgatagctcacatcccacatggcaatctgtgggacatgtgattaagctcactgcacaagaggaggtggcacttgagcttcgtgcaagtcagggggtgcctactgagctaaacgttggattcagtgttgatttcgtttggaagagtaccagttttgataggatgcaaggagcaatgaaaacttttgctgtggacgagacaagtgtcagtggatacatataccaccaccttttgggacatgaagttgagcatcaaataatacgtaacaccctaccaagacgctttggtgcacctggacttccagaactaaatgcttcccaggttttagcagttaaaagtgtcctgcagaagccagttagtttgattcaaggtccacctggcactggaaaaactgtcacatctggtgcaattgtgtatcacatggccaaacaaggtcaaggacaggttcttgtatgtgccccaagtaatgttgctgttgatcagctggcagagaagataagctcaaccggtctcaaggttgttaggctgtgtgcaaaatctagagaagctgtttcgtctcctgttgagcatctcacacttcattatcaggttaggcaccttgatacctctgaaaagagtgaatttcacaagttacagcaactgaaagatgaacaaggtgaattgtccagcagtgatgagaagaagtacaaggcactaaagcgtgccactgaaagagagatactgcagagtgctgatgtcatttgttgcacctgtgtcggtgctggagatcctcgtctttcaaacttccgtttccgacaagcaacagagcctgaatgtcttattcctttggtgcttggtgtcaagcaggttgtccttgtcggagatcattgccaattgggtcctgtcatcatgtgcaaaaaagcagcccgtgcaggattagcacaatctctctttgaacgccttgttatccttggagtgaagccattcaggctacaggtccagtatagaatgcatccatgcctctcagagtttccatccaactgcttttatgaaggcacactgcaaaatggagtgactgttaatgagaggcattcgtctggaattgattttccttggcctgttccaaatcgcccaatgttcttctatgtgcagatgggacaagaagaaatcagtgctagtgggacatcgtatctcaatagaactgaagctgcaaatgttgaaaaaattgtaacaacttttttaagaagtggtgttgtaccaagccagatcggagttatcacaccttatgaagggcaaagggcatacattgtaaattacatgtcaaggaatggctctcttcgccaacaactttacaaggaaatcgaggtcgctagtgtagactcatttcagggtagagagaaagactacattattctatcttgtgttagaagcaatgagcaccagggaattgggtttctcaatgacccgcgcaggttaaacgttgcgttaactcgtgcacgttatggcatagttattcttggtaatccaaaagtactaagcaagcagccactttggaatagcttgttgacacattacaaggagcatgagtgcttggtagaaggacctctgaacaacttaaagcagagcatggtgcagtttcagaagcccaaaaagatatataatgatcggagattgttactgggcggtgctcaaggcatgcatggagctaacttcggggctggggcctcaagccaagcagcagataagagaagtggcagggggaaagcagggcaatcatttgtttcttatggccctccaaatggggtgcacaagcctggtgtgcacccagcaggttatgctgtacctcgtatgccttttcctccatttcctggggctccacattctcaaccatatgcaattccgactcggggtttgcatgggcccattggagctgttccaccggtgcatcaacctggaagtagaagttttggggcacctcgttcaaatactggtgggcctattggtggccaccttgctcatcaacagaattcccagcaagctatgggtggcattgggtcaaattttaactacgctggcatggagaattcgagtagtcagccttctggtgtagcccaaatgtcccaatcgggattaatgacacagatgcctgttcaaggactaagtcaaacattccgtgatggtttttccattggtgggatgtctcaggacttcattgtagatgattttaagagccaaggatcacatgtgccatacaacattgcagaattttctacccaggcttctcaaggtggttatggtgttgagtttactcaagcgccccaatctggatactctgggaattatatgaaccaaaacacacatcctggatactcccatattggtacaacaaatgacattgtatctcaggatcacatggcccatggatctcacggaatgtttacgcaagtggggtataatgatccgtcgcaagatgagtcatctcagattcattatggaatggctgctgctggtcccctacattcgcagagcatgatgaaccccttatactctcaatcctatgctcactacaacacccagccacattctcttcaacctcctccccagtgataattaaggcttgtgatatggtgaagccacattttggaagtttggtgggttgcatcttttggcccacatgttgtgcccttctctgctatttcagaatcgatggtgcatagacatcagatgcaagcaatgtgaacaagcatatgacacactttgtattggatgtttatcggggcaggcttgtacaagatggctatggctactgaccaacagccagcgccgaggagcacaaggattgcaatgtatcatgttcttgatcgttgtggttcactacccgtttagaccacaagaggggtcatattgtgcatcggaagaggttggcggcactatcctcatccctcacctgtatataaaggcaatctgggcctatagtggtacaatgtgaacatattccaggatttgctgccactcaagtcaagttgcagcaattgcatgcctccatggtgtagagtggctttgtataaaggtgctataggttgggtggccacaacccttttggatatcacacatgacaagatatttacctttacattttgtatgcatctgatatggttttgatatttatgccagagatgatttaggtgatggtaaaattagttagtgacgactggaaatttgggagtgttctgtgaaagtaaatttgaccctgaatcctgcgaggaatggctgatcatgaagtttattgtataatttggatagtccgttcagagatattcatgcataggtgcatcacatatttgttctttatctttctgcaagtggcacttttctgagtggtcaattctgcaatgaaatgtgcgtgtctgaagtttctgttgccatcgtgccagatcggataaacaagtttatcgaggccacagtttttttaggctacaggggattctgatatctgataagcttgctaatcgcatcgcagttgagcttgtatttcgcggcttgtgcgatcatacgggattatttttagatctgtgacattgataggaaattctagggctcgtttgtttcctttgaattgaattctattataataataataactggga

SEQ ID NO: 210690 - DNA, 4982 bp, Zea Mays
ctcaacctcaacaaaccaaaccccggccccacaccttcaccatgctacctctccccttttttttcccgattcgccctgtcttcccaagccctgctttgccgctagcgacaaaaccctaaccctaaccgcggggatggcgacgcagtcgcactcctcctccgctgccgcgatagacatgtatgagacggcctctcagccggacgcctccgttgccggcgacgcctacaccttccttgagttcaacactcagggtgacgaattcgactaccccgactttccggagctttctcaaccgccgccccgatcgacgccgctgacgtcttccatccccggcgctggcgcgtcgtcctcgtcgtggcctgccccgccgccgccgccctccgacgcggcctccgctgaacccgatctcacgtctctggacgtccccaccccgccggcctcctcctcctcgccgtcgccgcggtctgcctccaaggcgcgctcgttggctgcggcagatgggctcgcctccggggtagccgcactcagcttcgaggatcctgttggagccggcgccggagaggacgggtacgactacggcaagggagacttcgtggaacacgcctgccggtactgtgggatccacaatcctgcatgcgtggcgaggtgcaacgtgccctcctgccgcaagtggttctgtaactcgcgggggaacacctctggctcccacattgtcaaccacctggttagggcaaagcataaggaagtgtgccttcacaaggatagccctttgggagaaacaatccttgaatgctacaactgtggctgtcggaatgtatttcttcttgggtttatctcagcaaaattggagaatgttgtcgttcttttatgcagagagccgtgtttaagtgttaatgcactgaaggatatgaattgggatctcagccagtggtgccctcttattgatgacaggtgtttcttgtcatggcttgtaaaggtaccttcagagcaggagcagctaagagctcggcaaattagtgcacagcaaattaacaaagtggaagagctttggaagacaaatcctgatgcatctcttgaagatcttgaaaagcctggcgtagatgatgaacctcagccagttgttttgaagtatgaagatgcttaccagtaccaaaatgtttttgcgccactgataaaacttgaggctgattatgacaagatgacgaaagagtcacagagcaaggataatgtaactgtccggtgggatattgggttgaacaagaagcgtgtagcttactttgtctttccaaaggaagacaatgagttgaggcttgtgcctggagatgagctacgcttgagatatcctggtgatagctcacatcccacatggcaatctgtgggacatgtgattaagctcactgcacaagaggaggtggcacttgagcttcgtgcaagtcagggggtgcctactgagctaaacgttggattcagtgttgatttcgtttggaagagtaccagttttgataggatgcaaggagcaatgaaaacttttgctgtggacgagacaagtgtcagtggatacatataccaccaccttttgggacatgaagttgagcatcaaataatacgtaacaccctaccaagacgctttggtgcacctggacttccagaactaaatgcttcccaggttttagcagttaaaagtgtcctgcagaagccagttagtttgattcaaggtccacctggcactggaaaaactgtcacatctggtgcaattgtgtatcacatggccaaacaaggtcaaggacaggttcttgtatgtgccccaagtaatgttgctgttgatcagctggcagagaagataagctcaaccggtctcaaggttgttaggctgtgtgcaaaatctagagaagctgtttcgtctcctgttgagcatctcacacttcattatcaggttaggcaccttgatacctctgaaaagagtgaatttcacaagttacagcaactgaaagatgaacaaggtgaattgtccagcagtgatgagaagaagtacaaggcactaaagcgtgccactgaaagagagatactgcagagtgctgatgtcatttgttgcacctgtgtcggtgctggagatcctcgtctttcaaacttccgtttccgacaagttcttattgatgagtccacacaggcaacagagcctgaatgtcttattcctttggtgcttggtgtcaagcaggttgtccttgtcggagatcattgccaattgggtcctgtcatcatgtgcaaaaaagcagcccgtgcaggattagcacaatctctctttgaacgccttgttatccttggagtgaagccattcaggctacaggtccagtatagaatgcatccatgcctctcagagtttccatccaactgcttttatgaaggcacactgcaaaatggagtgactgttaatgagaggcattcgtctggaattgattttccttggcctgttccaaatcgcccaatgttcttctatgtgcagatgggacaagaagaaatcagtgctagtgggacatcgtatctcaatagaactgaagctgcaaatgttgaaaaaattgtaacaacttttttaagaagtggtgttgtaccaagccagatcggagttatcacaccttatgaagggcaaagggcatacattgtaaattacatgtcaaggaatggctctcttcgccaacaactttacaaggaaatcgaggtcgctagtgtagactcatttcagggtagagagaaagactacattattctatcttgtgttagaagcaatgagcaccagggaattgggtttctcaatgacccgcgcaggttaaacgttgcgttaactcgtgcacgttatggcatagttattcttggtaatccaaaagtactaagcaagcagccactttggaatagcttgttgacacattacaaggagcatgagtgcttggtagaaggacctctgaacaacttaaagcagagcatggtgcagtttcagaagcccaaaaagatatataatgatcggagattgttactgggcggtgctcaaggcatgcatggagctaacttcggggctggggcctcaagccaagcagcagataagagaagtggcagggggaaagcagggcaatcatttgtttcttatggccctccaaatggggtgcacaagcctggtgtgcacccagcaggttatgctgtacctcgtatgccttttcctccatttcctggggctccacattctcaaccatatgcaattccgactcggggtttgcatgggcccattggagctgttccaccggtgcatcaacctggaagtagaagttttggggcacctcgttcaaatactggtgggcctattggtggccaccttgctcatcaacagaattcccagcaagctatgggtggcattgggtcaaattttaactacgctggcatggagaattcgagtagtcagccttctggtgtagcccaaatgtcccaatcgggattaatgacacagatgcctgttcaaggactaagtcaaacattccgtgatggtttttccattggtgggatgtctcagatgattttaagagccaaggatcacatgtgccatacaacattgcagaattttctacccaggcttctcaaggtggttatggtgttgagtttactcaagcgccccaatctggatactctgggaattatatgaaccaaaacacacatcctggatactcccatattggtacaacaaatgacattgtatctcaggatcacatggcccatggatctcacggaatgtttacgcaagtggggtataatgatccgtcgcaagatgagtcatctcagattcattatggaatggctgctgctggtcccctacattcgcagagcatgatgaaccccttatactctcaatcctatgctcactacaacacccagccacattctcttcaacctcctccccagtgataattaaggcttgtgatatggtgaagccacattttggaagtttggtgggttgcatcttttggcccacatgttgtgcccttctctgctatttcagaatcgatggtgcatagacatcagatgcaagcaatgtgaacaagcatatgacacactttgtattggatgtttatcggggcaggcttgtacaagatggctatggctactgaccaacagccagcgccgaggagcacaaggattgcaatgtatcatgttcttgatcgttgtggttcactacccgtttagaccacaagaggggtcatattgtgcatcggaagaggttggcggcactatcctcatccctcacctgtatataaaggcaatctgggcctatagtggtacaatgtgaacatattccaggatttgctgccactcaagtcaagttgcagcaattgcatgcctccatggtgtagagtggctttgtataaaggtgctataggttgggtggccacaacccttttggatatcacacatgacaagatatttacctttacattttgtatgcatctgatatggttttgatatttatgccagagatgatttaggtgatggtaaaattagttagtgacgactggaaatttgggagtgttctgtgaaagtaaatttgaccctgaatcctgcgaggaatggctgatcatgaagtttattgtataatttggatagtccgttcagagatattcatgcataggtgcatcacatatttgttctttatctttctgcaagtggcacttttctgagtggtcaattctgcaatgaaatgtgcgtgtctgaagtttctgttgccatcgtgccagatcggataaacaagtttatcgaggccacagtttttttaggctacaggggattctgatatctgataagcttgctaatcgcatcgcagttgagcttgtatttcgcggcttgtgcgatcatacgggattatttttagatctgtgacattgataggaaattctagggctcgtttgtttcctttgaattgaattctattataataataataactggga

SEQ ID NO: 210691 - DNA, 4934 bp, Zea Mays
ctcaacctcaacaaaccaaaccccggccccacaccttcaccatgctacctctccccttttttttcccgattcgccctgtcttcccaagccctgctttgccgctagcgacaaaaccctaaccctaaccgcggggatggcgacgcagtcgcactcctcctccgctgccgcgatagacatgtatgagacggcctctcagccggacgcctccgttgccggcgacgcctacaccttccttgagttcaacactcagggtgacgaattcgactaccccgactttccggagctttctcaaccgccgccccgatcgacgccgctgacgtcttccatccccggcgctggcgcgtcgtcctcgtcgtggcctgccccgccgccgccgccctccgacgcggcctccgctgaacccgatctcacgtctctggacgtccccaccccgccggcctcctcctcctcgccgtcgccgcggtctgcctccaaggcgcgctcgttggctgcggcagatgggctcgcctccggggtagccgcactcagcttcgaggatcctgttggagccggcgccggagaggacgggtacgactacggcaagggagacttcgtggaacacgcctgccggtactgtgggatccacaatcctgcatgcgtggcgaggtgcaacgtgccctcctgccgcaagtggttctgtaactcgcgggggaacacctctggctcccacattgtcaaccacctggttagggcaaagcataaggaagtgtgccttcacaaggatagccctttgggagaaacaatccttgaatgctacaactgtggctgtcggaatgtatttcttcttgggtttatctcagcaaaattggagaatgttgtcgttcttttatgcagagagccgtgtttaagtgttaatgcactgaaggatatgaattgggatctcagccagtggtgccctcttattgatgacaggtgtttcttgtcatggcttgtaaaggtaccttcagagcaggagcagctaagagctcggcaaattagtgcacagcaaattaacaaagtggaagagctttggaagacaaatcctgatgcatctcttgaagatcttgaaaagcctggcgtagatgatgaacctcagccagttgttttgaagtatgaagatgcttaccagtaccaaaatgtttttgcgccactgataaaacttgaggctgattatgacaagatgacgaaagagtcacagagcaaggataatgtaactgtccggtgggatattgggttgaacaagaagcgtgtagcttactttgtctttccaaaggaagacaatgagttgaggcttgtgcctggagatgagctacgcttgagatatcctggtgatagctcacatcccacatggcaatctgtgggacatgtgattaagctcactgcacaagaggaggtggcacttgagcttcgtgcaagtcagggggtgcctactgagctaaacgttggattcagtgttgatttcgtttggaagagtaccagttttgataggatgcaaggagcaatgaaaacttttgctgtggacgagacaagtgtcagtggatacatataccaccaccttttgggacatgaagttgagcatcaaataatacgtaacaccctaccaagacgctttggtgcacctggacttccagaactaaatgcttcccaggttttagcagttaaaagtgtcctgcagaagccagttagtttgattcaaggtccacctggcactggaaaaactgtcacatctggtgcaattgtgtatcacatggccaaacaaggtcaaggacaggttcttgtatgtgccccaagtaatgttgctgttgatcagctggcagagaagataagctcaaccggtctcaaggttgttaggctgtgtgcaaaatctagagaagctgtttcgtctcctgttgagcatctcacacttcattatcaggttaggcaccttgatacctctgaaaagagtgaatttcacaagttacagcaactgaaagatgaacaaggtgaattgtccagcagtgatgagaagaagtacaaggcactaaagcgtgccactgaaagagagatactgcagagtgctgatgtcatttgttgcacctgtgtcggtgctggagatcctcgtctttcaaacttccgtttccgacaagttcttattgatgagtccacacaggcaacagagcctgaatgtcttattcctttggtgcttggtgtcaagcaggttgtccttgtcggagatcattgccaattgggtcctgtcatcatgtgcaaaaaagcagcccgtgcaggattagcacaatctctctttgaacgccttgttatccttggagtgaagccattcaggctacaggcacactgcaaaatggagtgactgttaatgagaggcattcgtctggaattgattttccttggcctgttccaaatcgcccaatgttcttctatgtgcagatgggacaagaagaaatcagtgctagtgggacatcgtatctcaatagaactgaagctgcaaatgttgaaaaaattgtaacaacttttttaagaagtggtgttgtaccaagccagatcggagttatcacaccttatgaagggcaaagggcatacattgtaaattacatgtcaaggaatggctctcttcgccaacaactttacaaggaaatcgaggtcgctagtgtagactcatttcagggtagagagaaagactacattattctatcttgtgttagaagcaatgagcaccagggaattgggtttctcaatgacccgcgcaggttaaacgttgcgttaactcgtgcacgttatggcatagttattcttggtaatccaaaagtactaagcaagcagccactttggaatagcttgttgacacattacaaggagcatgagtgcttggtagaaggacctctgaacaacttaaagcagagcatggtgcagtttcagaagcccaaaaagatatataatgatcggagattgttactgggcggtgctcaaggcatgcatggagctaacttcggggctggggcctcaagccaagcagcagataagagaagtggcagggggaaagggcaatcatttgtttcttatggccctccaaatggggtgcacaagcctggtgtgcacccagcaggttatgctgtacctcgtatgccttttcctccatttcctggggctccacattctcaaccatatgcaattccgactcggggtttgcatgggcccattggagctgttccaccggtgcatcaacctggaagtagaagttttggggcacctcgttcaaatactggtgggcctattggtggccaccttgctcatcaacagaattcccagcaagctatgggtggcattgggtcaaattttaactacgctggcatggagaattcgagtagtcagccttctggtgtagcccaaatgtcccaatcgggattaatgacacagatgcctgttcaaggactaagtcaaacattccgtgatggtttttccattggtgggatgtctcaggacttcattgtagatgattttaagagccaaggatcacatgtgccatacaacattgcagaattttctacccaggcttctcaaggtggttatggtgttgagtttactcaagcgccccaatctggatactctgggaattatatgaaccaaaacacacatcctggatactcccatattggtacaacaaatgacattgtatctcaggatcacatggcccatggatctcacggaatgtttacgcaagtggggtataatgatccgtcgcaagatgagtcatctcagattcattatggaatggctgctgctggtcccctacattcgcagagcatgatgaaccccttatactctcaatcctatgctcactacaacacccagccacattctcttcaacctcctccccagtgataattaaggcttgtgatatggtgaagccacattttggaagtttggtgggttgcatcttttggcccacatgttgtgcccttctctgctatttcagaatcgatggtgcatagacatcagatgcaagcaatgtgaacaagcatatgacacactttgtattggatgtttatcggggcaggcttgtacaagatggctatggctactgaccaacagccagcgccgaggagcacaaggattgcaatgtatcatgttcttgatcgttgtggttcactacccgtttagaccacaagaggggtcatattgtgcatcggaagaggttggcggcactatcctcatccctcacctgtatataaaggcaatctgggcctatagtggtacaatgtgaacatattccaggatttgctgccactcaagtcaagttgcagcaattgcatgcctccatggtgtagagtggctttgtataaaggtgctataggttgggtggccacaacccttttggatatcacacatgacaagatatttacctttacattttgtatgcatctgatatggttttgatatttatgccagagatgatttaggtgatggtaaaattagttagtgacgactggaaatttgggagtgttctgtgaaagtaaatttgaccctgaatcctgcgaggaatggctgatcatgaagtttattgtataatttggatagtccgttcagagatattcatgcataggtgcatcacatatttgttctttatctttctgcaagtggcacttttctgagtggtcaattctgcaatgaaatgtgcgtgtctgaagtttctgttgccatcgtgccagatcggataaacaagtttatcgaggccacagtttttttaggctacaggggattctgatatctgataagcttgctaatcgcatcgcagttgagcttgtatttcgcggcttgtgcgatcatacgggattatttttagatctgtgacattgataggaaattctagggctcgtttgtttcctttgaattgaattctattataataataataactggga

SEQ ID NO: 210692 - DNA, 4848 bp, Zea Mays
caaaccccggccccacaccttcaccatgctacctctccccttttttttcccgattcgccctgtcttcccaagccctgctttgccgctagcgacaaaaccctaaccctaaccgcggggatggcgacgcagtcgcactcctcctccgctgccgcgatagacatgtatgagacggcctctcagccggacgcctccgttgccggcgacgcctacaccttccttgagttcaacactcagggtgacgaattcgactaccccgactttccggagctttctcaaccgccgccccgatcgacgccgctgacgtcttccatccccggcgctggcgcgtcgtcctcgtcgtggcctgccccgccgccgccgccctccgacgcggcctccgctgaacccgatctcacgtctctggacgtccccaccccgccggcctcctcctcctcgccgtcgccgcggtctgcctccaaggcgcgctcgttggctgcggcagatgggctcgcctccggggtagccgcactcagcttcgaggatcctgttggagccggcgccggagaggacgggtacgactacggcaagggagacttcgtggaacacgcctgccggtactgtgggatccacaatcctgcatgcgtggcgaggtgcaacgtgccctcctgccgcaagtggttctgtaactcgcgggggaacacctctggctcccacattgtcaaccacctggttagggcaaagcataaggaagtgtgccttcacaaggatagccctttgggagaaacaatccttgaatgctacaactgtggctgtcggaatgtatttcttcttgggtttatctcagcaaaattggagaatgttgtcgttcttttatgcagagagccgtgtttaagtgttaatgcactgaaggatatgaattgggatctcagccagtggtgccctcttattgatgacaggtaccttcagagcaggagcagctaagagctcggcaaattagtgcacagcaaattaacaaagtggaagagctttggaagacaaatcctgatgcatctcttgaagatcttgaaaagcctggcgtagatgatgaacctcagccagttgttttgaagtatgaagatgcttaccagtaccaaaatgtttttgcgccactgataaaacttgaggctgattatgacaagatgacgaaagagtcacagagcaaggataatgtaactgtccggtgggatattgggttgaacaagaagcgtgtagcttactttgtctttccaaaggaagacaatgagttgaggcttgtgcctggagatgagctacgcttgagatatcctggtgatagctcacatcccacatggcaatctgtgggacatgtgattaagctcactgcacaagaggaggtggcacttgagcttcgtgcaagtcagggggtgcctactgagctaaacgttggattcagtgttgatttcgtttggaagagtaccagttttgataggatgcaaggagcaatgaaaacttttgctgtggacgagacaagtgtcagtggatacatataccaccaccttttgggacatgaagttgagcatcaaataatacgtaacaccctaccaagacgctttggtgcacctggacttccagaactaaatgcttcccaggttttagcagttaaaagtgtcctgcagaagccagttagtttgattcaaggtccacctggcactggaaaaactgtcacatctggtgcaattgtgtatcacatggccaaacaaggtcaaggacaggttcttgtatgtgccccaagtaatgttgctgttgatcagctggcagagaagataagctcaaccggtctcaaggttgttaggctgtgtgcaaaatctagagaagctgtttcgtctcctgttgagcatctcacacttcattatcaggttaggcaccttgatacctctgaaaagagtgaatttcacaagttacagcaactgaaagatgaacaaggtgaattgtccagcagtgatgagaagaagtacaaggcactaaagcgtgccactgaaagagagatactgcagagtgctgatgtcatttgttgcacctgtgtcggtgctggagatcctcgtctttcaaacttccgtttccgacaagttcttattgatgagtccacacaggcaacagagcctgaatgtcttattcctttggtgcttggtgtcaagcaggttgtccttgtcggagatcattgccaattgggtcctgtcatcatgtgcaaaaaagcagcccgtgcaggattagcacaatctctctttgaacgccttgttatccttggagtgaagccattcaggctacaggtccagtatagaatgcatccatgcctctcagagtttccatccaactgcttttatgaaggcacactgcaaaatggagtgactgttaatgagaggcattcgtctggaattgattttccttggcctgttccaaatcgcccaatgttcttctatgtgcagatgggacaagaagaaatcagtgctagtgggacatcgtatctcaatagaactgaagctgcaaatgttgaaaaaattgtaacaacttttttaagaagtggtgttgtaccaagccagatcggagttatcacaccttatgaagggcaaagggcatacattgtaaattacatgtcaaggaatggctctcttcgccaacaactttacaaggaaatcgaggtcgctagtgtagactcatttcagggtagagagaaagactacattattctatcttgtgttagaagcaatgagcaccagggaattgggtttctcaatgacccgcgcaggttaaacgttgcgttaactcgtgcacgttatggcatagttattcttggtaatccaaaagtactaagcaagcagccactttggaatagcttgttgacacattacaaggagcatgagtgcttggtagaaggacctctgaacaacttaaagcagagcatggtgcagtttcagaagcccaaaaaggcatgcatggagctaacttcggggctggggcctcaagccaagcagcagataagagaagtggcagggggaaagggcaatcatttgtttcttatggccctccaaatggggtgcacaagcctggtgtgcacccagcaggttatgctgtacctcgtatgccttttcctccatttcctggggctccacattctcaaccatatgcaattccgactcggggtttgcatgggcccattggagctgttccaccggtgcatcaacctggaagtagaagttttggggcacctcgttcaaatactggtgggcctattggtggccaccttgctcatcaacagaattcccagcaagctatgggtggcattgggtcaaattttaactacgctggcatggagaattcgagtagtcagccttctggtgtagcccaaatgtcccaatcgggattaatgacacaggacttcattgtagatgattttaagagccaaggatcacatgtgccatacaacattgcagaattttctacccaggcttctcaaggtggttatggtgttgagtttactcaagcgccccaatctggatactctgggaattatatgaaccaaaacacacatcctggatactcccatattggtacaacaaatgacattgtatctcaggatcacatggcccatggatctcacggaatgtttacgcaagtggggtataatgatccgtcgcaagatgagtcatctcagattcattatggaatggctgctgctggtcccctacattcgcagagcatgatgaaccccttatactctcaatcctatgctcactacaacacccagccacattctcttcaacctcctccccagtgataattaaggcttgtgatatggtgaagccacattttggaagtttggtgggttgcatcttttggcccacatgttgtgcccttctctgctatttcagaatcgatggtgcatagacatcagatgcaagcaatgtgaacaagcatatgacacactttgtattggatgtttatcggggcaggcttgtacaagatggctatggctactgaccaacagccagcgccgaggagcacaaggattgcaatgtatcatgttcttgatcgttgtggttcactacccgtttagaccacaagaggggtcatattgtgcatcggaagaggttggcggcactatcctcatccctcacctgtatataaaggcaatctgggcctatagtggtacaatgtgaacatattccaggatttgctgccactcaagtcaagttgcagcaattgcatgcctccatggtgtagagtggctttgtataaaggtgctataggttgggtggccacaacccttttggatatcacacatgacaagatatttacctttacattttgtatgcatctgatatggttttgatatttatgccagagatgatttaggtgatggtaaaattagttagtgacgactggaaatttgggagtgttctgtgaaagtaaatttgaccctgaatcctgcgaggaatggctgatcatgaagtttattgtataatttggatagtccgttcagagatattcatgcataggtgcatcacatatttgttctttatctttctgcaagtggcacttttctgagtggtcaattctgcaatgaaatgtgcgtgtctgaagtttctgttgccatcgtgccagatcggataaacaagtttatcgaggccacagtttttttaggctacaggggattctgatatctgataagcttgctaatcgcatcgcagttgagcttgtatttcgcggcttgtgcgatcatacgggattatttttagatctgtgacattgataggaaattctagggctcgtttgtttcctttgaattgaattctattataataataataactggga

SEQ ID NO: 210693 - DNA, 4842 bp, Zea Mays
cacaccttcaccatgctacctctccccttttttttcccgattcgccctgtcttcccaagccctgctttgccgctagcgacaaaaccctaaccctaaccgcggggatggcgacgcagtcgcactcctcctccgctgccgcgatagacatgtatgagacggcctctcagccggacgcctccgttgccggcgacgcctacaccttccttgagttcaacactcagggtgacgaattcgactaccccgactttccggagctttctcaaccgccgccccgatcgacgccgctgacgtcttccatccccggcgctggcgcgtcgtcctcgtcgtggcctgccccgccgccgccgccctccgacgcggcctccgctgaacccgatctcacgtctctggacgtccccaccccgccggcctcctcctcctcgccgtcgccgcggtctgcctccaaggcgcgctcgttggctgcggcagatgggctcgcctccggggtagccgcactcagcttcgaggatcctgttggagccggcgccggagaggacgggtacgactacggcaagggagacttcgtggaacacgcctgccggtactgtgggatccacaatcctgcatgcgtggcgaggtgcaacgtgccctcctgccgcaagtggttctgtaactcgcgggggaacacctctggctcccacattgtcaaccacctggttagggcaaagcataaggaagtgtgccttcacaaggatagccctttgggagaaacaatccttgaatgctacaactgtggctgtcggaatgtatttcttcttgggtttatctcagcaaaattggagaatgttgtcgttcttttatgcagagagccgtgtttaagtgttaatgcactgaaggatatgaattgggatctcagccagtggtgccctcttattgatgacaggtgtttcttgtcatggcttgtaaaggtaccttcagagcaggagcagctaagagctcggcaaattagtgcacagcaaattaacaaagtggaagagctttggaagacaaatcctgatgcatctcttgaagatcttgaaaagcctggcgtagatgatgaacctcagccagttgttttgaagtatgaagatgcttaccagtaccaaaatgtttttgcgccactgataaaacttgaggctgattatgacaagatgacgaaagagtcacagagcaaggataatgtaactgtccggtgggatattgggttgaacaagaagcgtgtagcttactttgtctttccaaaggaagacaatgagttgaggcttgtgcctggagatgagctacgcttgagatatcctggtgatagctcacatcccacatggcaatctgtgggacatgtgattaagctcactgcacaagaggaggtggcacttgagcttcgtgcaagtcagggggtgcctactgagctaaacgttggattcagtgttgatttcgtttggaagagtaccagttttgataggatgcaaggagcaatgaaaacttttgctgtggacgagacaagtgtcagtggatacatataccaccaccttttgggacatgaagttgagcatcaaataatacgtaacaccctaccaagacgctttggtgcacctggacttccagaactaaatgcttcccaggttttagcagttaaaagtgtcctgcagaagccagttagtttgattcaaggtccacctggcactggaaaaactgtcacatctggtgcaattgtgtatcacatggccaaacaaggtcaaggacaggttcttgtatgtgccccaagtaatgttgctgttgatcagctggcagagaagataagctcaaccggtctcaaggttgttaggctgtgtgcaaaatctagagaagctgtttcgtctcctgttgagcatctcacacttcattatcaggttaggcaccttgatacctctgaaaagagtgaatttcacaagttacagcaactgaaagatgaacaaggtgaattgtccagcagtgatgagaagaagtacaaggcactaaagcgtgccactgaaagagagatactgcagagtgctgatgtcatttgttgcacctgtgtcggtgctggagatcctcgtctttcaaacttccgtttccgacaagttcttattgatgagtccacacaggcaacagagcctgaatgtcttattcctttggtgcttggtgtcaagcaggttgtccttgtcggagatcattgccaattgggtcctgtcatcatgtgcaaaaaagcagcccgtgcaggattagcacaatctctctttgaacgccttgttatccttggagtgaagccattcaggctacaggcacactgcaaaatggagtgactgttaatgagaggcattcgtctggaattgattttccttggcctgttccaaatcgcccaatgttcttctatgtgcagatgggacaagaagaaatcagtgctagtgggacatcgtatctcaatagaactgaagctgcaaatgttgaaaaaattgtaacaacttttttaagaagtggtgttgtaccaagccagatcggagttatcacaccttatgaagggcaaagggcatacattgtaaattacatgtcaaggaatggctctcttcgccaacaactttacaaggaaatcgaggtcgctagtgtagactcatttcagggtagagagaaagactacattattctatcttgtgttagaagcaatgagcaccagggaattgggtttctcaatgacccgcgcaggttaaacgttgcgttaactcgtgcacgttatggcatagttattcttggtaatccaaaagtactaagcaagcagccactttggaatagcttgttgacacattacaaggagcatgagtgcttggtagaaggacctctgaacaacttaaagcagagcatggtgcagtttcagaagcccaaaaagatatataatgatcggagattgttactgggcggtgctcaaggcatgcatggagctaacttcggggctggggcctcaagccaagcagcagataagagaagtggcagggggaaagggcaatcatttgtttcttatggccctccaaatggggtgcacaagcctggtgtgcacccagcaggttatgctgtacctcgtatgccttttcctccatttcctggggctccacattctcaaccatatgcaattccgactcggggtttgcatgggcccattggagctgttccaccggtgcatcaacctggaagtagaagttttggggcacctcgttcaaatactggtgggcctattggtggccaccttgctcatcaacagaattcccagcaagctatgggtggcattgggtcaaattttaactacgctggcatggagaattcgagtagtcagccttctggtgtagcccaaatgtcccaatcgggattaatgacacaggacttcattgtagatgattttaagagccaaggatcacatgtgccatacaacattgcagaattttctacccaggcttctcaaggtggttatggtgttgagtttactcaagcgccccaatctggatactctgggaattatatgaaccaaaacacacatcctggatactcccatattggtacaacaaatgacattgtatctcaggatcacatggcccatggatctcacggaatgtttacgcaagtggggtataatgatccgtcgcaagatgagtcatctcagattcattatggaatggctgctgctggtcccctacattcgcagagcatgatgaaccccttatactctcaatcctatgctcactacaacacccagccacattctcttcaacctcctccccagtgataattaaggcttgtgatatggtgaagccacattttggaagtttggtgggttgcatcttttggcccacatgttgtgcccttctctgctatttcagaatcgatggtgcatagacatcagatgcaagcaatgtgaacaagcatatgacacactttgtattggatgtttatcggggcaggcttgtacaagatggctatggctactgaccaacagccagcgccgaggagcacaaggattgcaatgtatcatgttcttgatcgttgtggttcactacccgtttagaccacaagaggggtcatattgtgcatcggaagaggttggcggcactatcctcatccctcacctgtatataaaggcaatctgggcctatagtggtacaatgtgaacatattccaggatttgctgccactcaagtcaagttgcagcaattgcatgcctccatggtgtagagtggctttgtataaaggtgctataggttgggtggccacaacccttttggatatcacacatgacaagatatttacctttacattttgtatgcatctgatatggttttgatatttatgccagagatgatttaggtgatggtaaaattagttagtgacgactggaaatttgggagtgttctgtgaaagtaaatttgaccctgaatcctgcgaggaatggctgatcatgaagtttattgtataatttggatagtccgttcagagatattcatgcataggtgcatcacatatttgttctttatctttctgcaagtggcacttttctgagtggtcaattctgcaatgaaatgtgcgtgtctgaagtttctgttgccatcgtgccagatcggataaacaagtttatcgaggccacagtttttttaggctacaggggattctgatatctgataagcttgctaatcgcatcgcagttgagcttgtatttcgcggcttgtgcgatcatacgggattatttttagatctgtgacattgataggaaattctagggctcgtttgtttcctttgaattgaattctattataataataataactggga

SEQ ID NO: 210694 - DNA, 1360 bp, Zea Mays
cggagtgtggccacgggccacacggcttctgaccgagaggccgaggcgagggataagagcgtgtcccaccggccggccacccgcagcatctttaaaattcggcccggcgcgcgtcgggtgacgaaaacggaaccctggctggtggagcgcggcgcggggcatgcgtgcaagtgcaaccaatcgcctcgtcgtgtgcgctcgcctttgcttccctcgttaacgtcatggcgattgttgcggacgtcatgcttgtctatcttcctgctccaactattggtttacagccgccactggcaagaaacgctggagctattgccaactttttctataactgccctgataatactttccaaattgctatggctggaaggtcattctcacttctgcagaggattggagcttttgtgaggaatggtataaagcttttggcagtgggaactactgcttctttgattggcactagtgtcacgaatgcagcgctcaaagcaaagagggctgttgataaggaccttgaggacgaagtcatggaaattccagtcgtctcaactagtgttgcctatggtgtatacatgtccatttctagtaacctcaggtatcagcttctggctggtgtgatcgagcagaggatgctggagccgttgctgcataaccagaagctactgctgagtgcaatgtgcttcatcgttcgtacgggcaacacattccttggctctttgctgtgggttgactatgccagatggataggcgtccagaagtctcacgaagaggcctaaagttctagcagcttgcctgcatgttccgctgtcactgcctcactaggcacgttcacaataccatcgatggcttgcctgcctctatagaatgctgatctactcttcactggaggcccccttatatataggacaaaaatcccaattttgtttggaaaaccacaagtagggatatatctgtcgaattctcgtatgcaacggcaacgccgttctacccctcaacttttttttttcctttttctactttgcaacatgcaacaagggctgtcattgatcgaaattcaaatatatgttacattgggaattccatgcgactgcctaaactctaggaagtttcacttgtcctgtttcatatgtatgtatgcattgtagccttgttgtatttcctcaatgtcttggttgctttcatcggttagagttcttgacgactgttgcagagattctgtcggagtatattcagggtcgcctattaccagacatgctgcccggacaacatgttgattcgttcattggcagcgcaacatgcaattagaaattaacagctactctagaacaagcaaataacagctgtcgctaaaattcaatattcc

SEQ ID NO: 210695 - DNA, 3405 bp, Zea Mays
cttcgtccgactccgagaaagaaccaccgcagggcaccggccgcccgcaaggaatggcggcagcgatcatcatgcctccacatacagacccaccacggccagccacagcgagtaatcccaccgctcccgcttcccatccccaacgccagcgagacgccccgacaccgtccctacgcgcgctcttcctccgcgccgtggacccttcccgcccctcgtcatggtccacggccgtcgctgatcttctctcctccggtgaccccgtcgccgcgctggccgtgttcgctgccgccctccgagccaaccccgctgcgctccggccggccctgcccccagcccttcgcgccgccgccgccgccacctccctctccgccggtcgccagctccacctcctcgcgctccgctcgggcctcttcccctccgacgcctactgcgcctccgccctcctccacatgtaccaccattgcttccgtcccctcgatgcccgcagggcgttcgacgaaatccccacccccaaccccgtcattgtcactgccatggcgtccggttgcatgcgcaacaacctcgtatataccacgctctctatcttccgctccatggtggcctctggttctgcgggagtggtcgacgaggcggctgcactggtagcgctctctgcatctgctcgtgtccctgaccgtggcattaccggtggtattcatgcacttgtctccaagattggcttggacgggcagacaggggtagcaaacacgataatagacgcgtatgcaaagggcggtggtcatgacctgggggctgcgaggaagctctttgatatgatggatagggatgtggtgtcctggaacacgatgattgcattatacgcgcagaatggactgtcaactgaggcacttgggttgtatagcaagatgctgattgtgggaggtgatgttagatgcaatgcggtaaccttgtcagccgtgctattggcctgtgcgcatgcaggggcaatacaaactggaaagcgcatccataatcaggtggtaagaatggggttggaggacaatgtctatgttgggacttctgtagttgatatgtacagcaagtgtggaaaagttgaaatggcatggaaagcctttcaaaaaattaagggaaagaatatcctttcatggtctgccatgattgctggctatggcatgcatggatatggccaagaagcccttcatgttttcactgacatgaggaagtcagggctaaagccaaactacataacctttatcacagttttagctgcttgcagtcatgctggtcttttgagtgagggccgttattggtacaataccatgaaaactgagttcggaattgaacctggtgtcgagcactatggatgcatggtcgatcttcttggccgtgctggttgtcttgatgaagcttatggccttattaaagaaatgaaagtcaaacctgatgctgctttgtggggagctcttcttagtgcatgccgaatatacaaaaatgttgagttggcaaaaatttgtgcagaaagattgtttgagttggatgcaactaactctgggtattatgttctcttgtcaaatatatatgcagaagctggaatgtggaaagaagtggaaagaatgagagttctggttaaaaccagaggaatagaaaaacctccagggtatagctcggttgagttgaaaggtaaaacccatttgttttatgttggggacaagagtcatccacagtacaaggaaatctatgcttatttggagaaattgcttgagagaattcatgatgcaggctatgtaccaaacacaggttctgttcttcatgatttggatgtagaagagagagaatccatgttgcgcatccatagtgaaaagcttgctgttgcctttgccctgatgaactctgtacaagggtcagtaatccatgtcataaagaatctccgggtctgcactgattgccatgcagcaataaagattattacaaagcttactggacgagagataattattagagacctaaagcgctttcatcatttcaaggatggattatgctcatgtggggattattggtgacattatgcaaagaagcttagtttgtgatgccatattggtagtatcagaatatcacaaattgagataactgtttacgatactctcagtgcatctgtccatccaggacacaaaggccaatacatcagtgagatagtttataacttctcaacctgattaggataaaatggtctgaactacatagctagctgacgcagttggtcaacttatctgtggtgaagatgaaggacattagggctttcaatagtcctgcacaatacacttgcactttcatgtgcaagacatggatttttatcatgatatgaagggcttgtaacataatggctcagccttgaccatttgtagaagcagcacaaagtcattttgaagtacatggatttctgtgaggattaatttttttaatatttacttgtgttgagaaatagaagggagtggtgagagctatctcgttgaaacaccaggttacgtgttagaagcagcatctccgcatttgcagtgggaggcttgcctcggtttatcccttcccctatcctactcatgtaggagcctccgacagcaggtctgtcccctttttacatgtgatgacaaacactgcacacttcagaagcatggatttgtcaatcccagaaatgtgccccagagagtaaaattgggacatgaccatttctcaatatcaactctgttccataacatcatagaagccacaatcccattgcttagcccatgccctgtcaaacatggcatgcctggaggcgacagggatgtgcatacgaggtgaacagatctgctggatggtgcatcacatggaaggcatgatttcgacgtggtctcccatttaccaaatcagctgtcgacagttggcaccactgttcctcctcttcctcaaattatctgaccgaagtaatccaacaaagaagacaaggggtgtagcagaaacggagggagcacagagtacacgcttgtgttcaagtgtttgtctcggtgattttggttaggagaaatgaagaataggggtgaagggtttgattttgtgttgtagggttttattttttttcggttgcaaggatccaagttgaattgttagaatttgtaccgagtttcctatatctgttgaattaataggtgtatgtggtattcaattaggtcccgtttgttcctttcattttgaggaattgaaatcttactaatagaataagctatttttttagaatgtgacattccaccacttttgaaagttatcatataagcatatctcaaattcatgaggtgagatggaaattgattctatagatttacatgttatttttccgatgtataacttataacacacttttctacttgcttcgat

SEQ ID NO: 210696 - DNA, 1002 bp, Zea Mays
tatggtagtcttgttggcagttcttattcaggctgcatcattgttcaaaggacctgttcctccggttgttgcatttgccctgggatcactgggcttcatgacgcctttcccaagcgagcaataccgtgagttgttggacaatgtgctgaatgggccatttagcatcacgctgagaaaccgcatacagtgtcatgtaatacgtgacgaggcaaaggatgaaatcgtgtctgaggagccattcttagtgttgaacgaagttacaatcgaccgaggaatatcatcctaccttaccaacctggaagtctactgtgacagctcttttgttacttgcgtacaaggggatggactaatcatatcaactacatctggaagtacagcatattcattagcagctggagggtccatggttcatcctcaggtcccagggatccttttcaccccaatctgcccgcactctctgtcattcagacctttgattctgcctgaatacgtgaccctccgcgttcaagtgccgttcaacagcaggggcaatgcctgggcatccttcgacggcaaagaccgacagcagctgtcgcccggtgacgccctgatctgcagcatttctccctggcccgtgcccacagcctgcctggtggactcgacgaccgatttcctccgcagcatccatgagggtctccactggaacttgaggaaatcccagtcatttgacggcccgcgtgattgatgcaacagctgttcagttatatttcagcccggtgccagaattcaagctgggaattctcaacaggaataactgtagctactccagggtgctctcacctttaccgttccatacttgcctatatacaaaggttgcgtgcgttagatgtgaggtatagatagatgtatagaatatggatggatgataacgactggacatgttgaataatacaacgccaacgtatgcacgtatacatgtgatgtgcccccgtgatctgaaagaaataatccgcgagccataca

SEQ ID NO: 210697 - DNA, 1311 bp, Zea Mays
ccggattccagtctttaggccggctcgaggtgccgcgcatttcaacgggtctcgcatggggaggaatagtagtgggtcggtctggttggccggtgctggtgcgttaatggcggttgacctcttcatcgatgcctcccggcgcctttaaatcgggcgggacgaagcgtctcctagcctctcgtcgcctcagctccctcttctccccgtgaccgaaccaaacactgagcggaagaagcttcgaaccccttctggccatctctcgtcctcctttcaattcttgagctttgtgcttccatctcctctcctctgttctcttctttgtctctgcgtgcctgttcttgtcgtctcgctcgatcgtaagtgcaacggaataagaatggcgtcgccgtcagcgtcaggagagaagaagactacgatcctggtggcgaggaagggccggctgcggcagcgctacgacggcgagtaccgcctggtggccgggtgcgtgccgtaccgcgtggacgcggacggccagacgcagctgctcatggtgtccacgcccaacagggacgacctcgtcttccccaagggcgggtgggaggacgacgaggacgtgcacgaggcggcgtgccgcgaagcgctggaggaggccggcgtcaggggcgccatcaaccgaagtgcgctcgggatgtgggtgttcaggagcaagagcagtccggtgagcagcgacagcccccggggcgcctgcaagggctacatcttcgcgctggaggtggcggaggagctggagcagtggccggagcaggacacccacggcaggcagtgggtctccccggcggacgcgtaccgcctctgccgctacgactggatgcgcgaggcgctgtcggcactgctcgaccgcctcacggaggagcccgagccccccaagtcccccgccgcggacggcctcggcgagcacgcaggcgtgtgcatgatggtcaaggcgaccacagccgctgcggatcgagcggtggcgctctgctagtggcatcattctgaacatgtgcaaatcctcatcatctgggtcgtcaggctcggctgttcgttcgaacttggtgtggttggtcggtgaatgcagtgtatggaaacttgtctcgtcaatccagggcttgtaaatgatgtcggttacgccacgtgttaaatcaaatggctacaactgtccgtagtgcgtagctgagagtttccttgtcaaatctattgaggtttccactgtttgatcctcgcttcgtgtgctaaccttctcgacttctttcaactgtccccccctatatacaatatcttagttttgttttt

SEQ ID NO: 210698 - DNA, 1400 bp, Zea Mays
ccagtacaacctgcacagtaccggccgtaccagctatagttgatatccgtgacaaagatggattggaaaaggtttttgcttcaacaagatttgatgctgttattcattttgctggactgaaagctgttggagaaagtgtacaaaagcctttgctttattatgaccataatgttgttggcacaataaatcttctggaagtaatggcagctcatggatgtaagaagttagtgttctcatcatcagctgcagtttatgggtcacctaagaactcaccctgcactgaagattttcctctcactccacataacccatatggcagaaccaaacttatggcagaggagatatgccgtgatatctaccattcagatcctgaatggaatatcattttgcttaggtactttaatccagttggggctcaccccagtggataccttggtgaagacccatgtggaactcctaacaaccttatgcccttcgttcagcaaattgcagttggcaggaggccatcgctaacaatatttggaaataactacgcaacaaaggatgggacaggggttcgtgattatattcatgtggttgaccttgctgaaggacatcttttcgcattaaagaagctttttgaaagctcatctaacataggatgtgaagcatacaaccttggaaccggaaaaggaacatcagtgttggagatagtcaatgcatttgagaaggcttctggaaagaaaatccctttgatcatgggccaacggcgtcctggtgatgctgagattctcttttcatcgccggcaaaagcagagagagagctccactggaaagcgaaatatggcatcacagaaatgtgcggagacctgtggaactgggctagcaagagcccttatggatacgcggcatctgagtctccgaagctgaatggtagttcacgctgagcaacgccgattggcccgtgtggactcacttgtacatgagactgtagtgccagccaaccaggataaatgtagatctagtcggtcggtcatacagagagaagttctataggcctaggaaagaaatgttatcctgttcctcagcataagctcccatagtggttcttccatatgcgtatagtctatgaaatttgttctaggaccattgctatagtcaaccagctaattcaattctatttcttgagttgcgttgcctaaaatagagcatgatatagatatcagcatcacaaaaagttgcagttcatacaaattttcttttgtaattgtattgtttctttgagacaatttctgtattattagtatttcttttgaaataaatatgtaatattggttagtgagaccacagtaatacttccatttcaacttcattggtgtgataaatcacacttcactgggggtgtcaaaaaaattgtttac

SEQ ID NO: 210699 - DNA, 3594 bp, Zea Mays
agcagagtcaatatgtcgctcgatgttactcaagtactcttaagcgcgcaatctgctgatggcgcagtaaggaagcatgctgaagaaagcctcaagcagttccaggagcagaacctccctggattcttgctctctctctcaagtgagttggccaatgaagagaaacctgaggagagccgcaggttagctggcttgattcttaagaatgcactggatgcaaaggagcagcacaggaagaatgagcttttccagagatggctggcactggatgctggtgccaaagcacaaattaaaggattgctgctgcaaactctcacatctcctgttgcaagtgccagatccactgcttcccaagttattgccaaggttgccggtattgagattccgcagaagcaatggccagaacttataggatcattgcttgcaaacatacatcaggtccagccaaatgtcaagcaagcgacgcttgagacacttggctatttatgtgaggaagtttctccagatgctgttgaccaagaccaagtcaataaaatacttacagctgttgttcagggtatgaatgcttctgaggcaaactctgatgtcaggcttgcagctacacgggcattgtataatgctttgggctttgctcaggttaatttctcgaatgacatggagcgtgactatatcatgagagtagtttgtgaagcgacacagtctccagatgtgaagataaggcaggctgcttttgagtgtttggtggctatctcgtctacttattatgataagctggcaacatacatgcgggatatatttaatataactgcaaaagctgtgaagagagataaggagtcagttgcgctccaggctattgaattctggagttccatatgtgatgaggaaatcgacattctggatgagtacagcagtgaatttacagctgattctgatgttccttgctactactttatcaagcaggctcttcctgccttagtgccgatgttgttagaaactctcctcaagcaagaggaagaccaagacttggatgaaggtgcttggaatcttgcaatggctgggggaacttgtctgggcctggtggcaaggaccgttggtgatgacattgttcctctcgtaatgccttttgtggaggagaacataaccaagtctgagtggagacaaagagaggctgcaacatatgcctttggctctatcttggagggcccatcagctgataaactggctcctcttgttaatgttgcattgggcttcatgctgtccgcgctgatgaaggatccaagtaaccatgtgaaggacacaactgcttggacccttgggagaatctttgagtttcttcatggttcagcgcttgaaactcctcctatcattacggccgagaattgtcagcaaatacttactgtgttgcttcacagcatgaaggatgtcccaaatgtggctgaaaaggcctgtggagccctctattttcttgcacaaggctatgttgattctgggtctgcatcgccactatcccctttctttcaagatattgttcagaaccttcttatggtcactcacagggaggatgctggggaatctcggctacaaacagcagcatatgagaccctaaatgaagttgtcaggtgctccactgaggagacggctgctattgttatgcagttagtacctgtgatcatggtggaactccatcagacacttgaagctgaaaagttgtcaactgatgagagggagaagaggagcgaactgcagggcctcctttgtggttgcttgcaggtcattattcaaaagttgggagggatggagtcaactaagtactctttcttgcagtatgctgatcagatgatggaactgtttttgagagttttcgcatgtcgaaatgccacagtgcatgaggaggctatgcttgctattggtgcattggcatatgcagctggtccaaactttgcaaaatacatggcacagttttatcagtatttggagatgggtcttcagaactttgaggagtatcaggtgtgtgccattaccgtgggcgttgttggtgacctctgtagagcactggaagacaaaattttgcccttctgtgatggcatcatgactcaactcctgaaggacctgtccagtaaccagttgcacagatcagtgaaaccaccaatattttcgtgctttggtgatattgcactggcaattggggaaaactttgagaagtatttgatctatgcgatgcctatgctccaaagtgctgctgatttgtctgcccataccactgcaactgatgatgagatgctcgactacaccaatcagctaaggagtggaatcttggaagcctactctggtatcctgcaaggatttaagagttcacctaagacacaactactgatgtcatatgctccacatattattcagttccttgatgctctgtacaatggaaaggatatggatgatgctgtgatgaagactgcaataggtgtcttgggagatctggcagacacattgggtgtccatgctggccctttgatcaatcaatccacctcaacccaggcatttttagaggaatgcttggcatcagatgatcctttggtgaaagaatctgccgattgggcgaggatagcaatcagccgtgcagtttcgggttgatgccagagtcttgagtctgcacttgcattcatctacatatcatcatgcctgggtctttgattgcatcatgtccagacatgctcttgggagaaatccaacatttttacagcagagtctgagggtcctcactaactcatgcatcactacatgtgtcaacccgcccttcttgcttctgcgagaaaagagggttcaagctggccgtctgctaactttttctaaaggcatctgcaaccttcatttcttattggaggtgagatgtgagcttctattgtcgcatgacatgctgaccagtttccttggcatgtcaagcgtatgatctgtggcctatcatttccccttgcattcatctcatgcattgaacattggtcggatggtcacttgggacaacaggtccagttgcttgctgctgctccagtaagcaagagcgggctcaaacgcattgtcacaggattatttttgtatcgatcagggtggccaagtccatgctgatagtaggatgttaatttcctagcattcttttcctttcatccacttgcattgtctttgcatttcattcttggtcggattgttttgtaagagttattttagggcaaaactttgtcctgtctggtctgctaccgcacgctatttgtaagtcaagttcatgcgtgcattggtttatttacgggtgctattggagcagcgggtgtttgtgcttttttccatcttgtttttggtaatatacatacatgctgctccatttcggattatcaggagctgggcgggtgaagagacagttttataggtctttggagttgtttttgccggggcagaggcagttgagttggctgtgatatcttttgtgatttatgaagaaacaaagtgaattgagaataatatggtgaaatgtaaatggtcttcatttcacgcttggaactaacctccgtgcagactgcagatcccacccacttattataattggct

SEQ ID NO: 210700 - DNA, 4151 bp, Zea Mays
ccactcacacatgccatcccacctctacctttctctgctctttcccctccaccctgctgctcccagtcccccccacctcgagactccactgctgactgctgtgcatcccaaccaaagcttccccgccgaattccccaacctcccgccggattcgccaagctcgtggattacggagcccgattcgtccgcggagctgcggcctgggccgcctattcgctcggttcattgcctcgctgattcgctccggcaccctctttctgcatgagctcggattggaggtggcgtttctgattccctctggcaggaggcgcgaggggcatgtgggtttcgctggtgtgggtccggggctgcgtgggcgtcacattcgtcgatttccagaccgggagggaagcccactagatctctcggctcctgcgctcctcgggagagtcggggaggctagctagctgtgatcggagaaggctggtgtagggttttgggaggggaggggacatggaggccgccaggtttggcacccagagcagccacttgtacggcggtgggcttgacctcaacaggcgcgagaagagggtgtttggctgggacctcaacgactggagctgggacagtcagcgctttgttgcgacgccggtgcagcagcaggcggcgaatggctctggactgaacagctcaccatcgtcgtccgaggaagccgtggaagaggtggctaggaatggtggcttcagaggtgacactgacaagaggaaaagggtcatcgatgatgacgaaaccgaggatcagtgcacggtcttgcatggtggcaggtcgctcagcttgaaaattgggggtgctgctggtggtgttggagcgatggagaacagcgatgtaaacgaggataatgagagaaatggaaagaaggtcagggtacaaggaggcagctcaagtgggccggcgtgccaggttgaggactgcggagcggatctggctgcagaaaaggattaccaccgccgacacaaggtttgcgagaagcatgctaaggccagcaccgccgtggtcgggaacactgtccagaggttctgccagcaatgtagtaggtttcaccttcttcatgaattcgatgaagggaggcgaagttgccggcgacgcttagcaggccacaatagacgcaggaggaaaacccggcctgatactgcaattggtgggactgcttcaattgaggacaaagtcagcaattatttattgttgagtcttatcggaatctgtgctaatatgaactctgacaatgctcagaatgcaaacggccaggagttgctatccactcttttgaagaacctaggatctgttgccaaatcactggagccaaaagaactatgtaaattcctggaggcataccaaagcctgcaaaatggattgaatgctggaacctctggaatagctaatggtgcagaagaggctgcaggaccatctaactctaagttgccttctgtgaatgatagtcattatggacaggcatcatcatctgttgtgccagtacaatcgaaggctaccacggtggtaactccagagcctgcatcatgcaagcttaaagattttgatctgaatgacacttgcattgatatggaaggctttgaggatgggcaagaaggttcacctacacctgcctttaagacagctgactctcctaattgtgcatcatggatgcagcaagattctactcaaagcccaccacagactagtggcaactcagattcaacatcaacacaatcattgtcaagctcaaatggagacactcagtgccgaactgataagattgtcttcaagcttttcgataaagttcccagtgacttacctccagttttgcggtcgcagattcttggttggttgtcgagtagcccatctgatatagaaagccatattagtcctggctgtattattctaactgtatatgttcggttagttgagtctgcatggcaagagctttctgagaatatgagcctgctcctgggtaagcttttgaatagctccactgacgacttttgggcatctggcttggtatttgtgatggttcggcaccacttagcttttatgctcaatggtcaaattatgttggacaggcctctggcacccagttctcatcattactgcaagattttatgtgtcagacctgttgctgcaccttattctgcaacaataaatttcagggtagaaggttttaacctactcagtacttcctcaaggacactgcatattccatgaagacacggattctggagcagagaatgttgagtacaaggatagggacatcgaatgcctcagtttttgttgttctgttcctggtccaagaggaagaggatttatagaggtcgaagatagtggttttagcaatggcttcttccccttcataattgctgagaaggatgtatgcgctgaggtttctgagctggagagcatatttgagtcatccagtaatgaacatgcaaatgccagggaccaagctctggagtttctaaatgagctgggttggcttcttcatagagcgaacagaatgtctaaagaggatgaaactgacacatctctagctccctttaacatgtggagattcagaaatctcggtgtatttgccatggagcgggagtggtgtgccgtgatcaaaatgctgttagatttcttatttattggccttgttgatgtgggatctcggtctgcagaagagatggtgctttcagaaaatctgttgcatgctgctgtacggaggaagtctgttaacatggttagatttctgctgagatacaaaccaaataaaaactcgaagggaactgcacaggcatacttatttagacctgatgctctgggcccttcaaagattacccccctccatatagcagctgccactagtgatgcagaggatgtgttggacgcgcttacccatgatcctggactgattggaattagtgcttggagcaatgcacgggacgaaacaggttttaccccagaagactatgctcggcagagaggcaatggcgcttacctgaatctggtccaaaagaagattgataagcatcttggcgaaggccacgttgtcctcggtgttccgagcagtatatgccctgtaataaccgatggcgttaagcctggcgatgttagcctcgagatatgcagggcaatgtctgcatcagtgccaggttgcctcctctgcagccgtcaggcacggatgcatccaagttctacggcaaggaccttcctttataggccagcaatgttaactgtgatgggagtcgctgtggtttgtgtctgcgtgggcatactcctccacacctttcccagggtttatgccgcgcccacattcagatgggagctgctggagcgtggacccatgtaaattttaggatgaaataaacctagcagttttgtaacttgagagctctagcgcaaaggaacataattaccgtgtgaagaagttcctttgcatttgcagcaagatccggttgctgttgtaagcttatatatcgtcaatatcaactatatttacagcctaacatgcttcgattccattcatcatttttattgtagaatttgtttcttccttgcggagattttgtgagccgtcagaataaaacatgtccttgtttatgtaatcgttgagacataacatatcttggaatgacactgaaaaactcaagattttattagttgaaagtatcttatacaatccaagctcctgcaaatttgcagggctgaaatgcgtgcacttgcttttcagcctataatcaagatgtacattttgcgataagcagacggttttctggtgaaatgctggatggaacatagcttacaagatcagcaaccagacccttctgcccaagccatagtagcctccccgtatcaatgatatctttacacatggatcccagagtggccctctcccctgctggtatacttcggattactctctcaattccgacggcctcctgatcaagcttctctggtcctctagtccatcacaaaatggcataaaacaaatatcaagctttcagtggcatgacacaataaaattggaagtccagaaagtgagttgtgagagttctttgaaccacaaacatcgaaaaataaataacctagagatgacaagcatgatgcacagatgacactagagagcagagattcgaacagag

SEQ ID NO: 210701 - DNA, 1304 bp, Zea Mays
cattttatttttaccccttccattgtttgcacctttacttcgaataattggttcatgtttgaacatatgttctttcacatatgtctgtctgctgcctggatttctaggcaacatggacaaaagattctttgttgttgtgtgttgtgggggagttcctcacagcagtcaataaaggcaaagatttacaggatctgatttacacatctgcgcctgcccacttttgggagttgtattccgagtctctgtacaattgaaataaaaaaatgactttgacaggtggtaagcaacccagagaagactccacttcatactttcttctgcaactatgacttgagtgacatgcctcctggaaccaagactttcgtgcggcaaaaggtcactctctccccctctgccttgccttctaatccagtggaagaaggaagcaagacttgtgatgttaattctggtcacaaatcttctcagtcagtttcatgtggaaatgaacctagcgaacggggagctcgttctgaatgctgcaacggtggacagaactgcaactcaaatgatgaatcagaaaaaggagatctgaaaacaagatgtcgatcattggatagtgattctaatgaatcaaataagtctagttctccaggaaataagaaagaccagtctgattctgatggttgctgctgtcaaatggataagtttggcatgggagaaaagaaatcatgctgctcaccttctaagatcaatgatagttcaggtggagctgtgcttcgttatgctttgcacctgcgatttctgtgcccctccaagaaaaaatcctcgaaatcaatgcttcgttgcaaatctgatctatcaacggcaccatatagcagcaatacgctacctgaggaagaacggaggttctatctctacaatgatcttagagttgtatttcctcaaaggcactcagatgcagatgaaggcgaggagtgtagcccttctcgttgcaggagaatgaaggggatgactcaagatgccaccgaacaaaaggtgttagagcagcagatggtggccgatccttaccagcgtctcattgctctagcaccttcgttcagtggcactgagtcacccctcatcctcttgcaaagagaagctacctcgttcggcgttgacttgattaaatctttagggtttgatgcttgttaatctctattatgcattgtaccatttatttagttttatttgtactatttactttcattttgtaggacactggtgtgctacaagtttgctaaaaatggaatttggttgttatatatattctgtttgtttaggttgag

SEQ ID NO: 210702 - DNA, 2036 bp, Zea Mays
gccagatcagacctttcctgtcgcccgacagccagcgcatatcctctgcggactgcggcctgcgcacgggggcgatgggcgatggcgagcagccgagcactacccgccagcatcgccgaagcgataaaaaaactccaactcaaattcctaatgcagccagcccaatcgatctgctccgtccatcgcctcaggcgacggccctcctcacgccacctggcgggctcccccgtcgactccactccacctcctcctttcccccaatccaccctagtgatcttattttattcacgcgcaaaaacctaaaaaagatttagaaacggaagaacaaacagcaagcgaagcatcgccagattggtatatcgatcgattgatcggtggcggaggaaggggaggacggggggcagatggcggcgtgccggggcttcttcgagtgcctgctcaggctgctcaacttcatcctcaccgtcgccggcctcgctatggttggttacgggatctacctgctcgtcgagtggatgaagatatccgaggacggcatcggcggggcttcgacggcggaggtgctcgtctctggccggccgttgttgggggctgtcattctcggtgacagcttcctcgacaatctacccaaagcatggtgagatggtttccttgcctgtggacttttttttctgatgtatcaatactggtttcgtccatgtgatgtcgccattgattatgattttggattgagaggaactgcaaggtttgcttagtaggggtggcaatcacaactgtgaatgtgtgaaatatgcaattgatagccaaaacacgcagttccaaattgcagtctgacgaagcatttgttactcgcctttagattattggtgagcatgttgggtagggggtaaattatgtgtggatttgaatgttccaagtatcattgactctttagtttggcaactgtgggttttctctgtttgtttttactgccaaggtgattgtgtttcatatttaatagcctctgttccctgcaggtttatttatttgtttatttgtgttggcaccatcgtcatcttggtgtctctgtttggctgcattggagcagggacaagaaacacctgctgtttgtgtttctatgctttcttggtcatattgttgatccttgctgaagctgcagctgctgcattcattttctttgaccatggctggaaagatgtaattccagtggacaaaacacataactttgatgttatgtatgactttctgaaggaaaactgggagattgcaagatgggtcgctctgggcgttgttgtttttgaggcagtgctcttgctgttagctctggctgtcagggcaatgaacaaacctgctgagtatgacagtgatgacgaaattatagcaattggccgaagccctaccatccggcagccactgatccatacccaaaatgttcctgccactggtgttcctgtcccaacacttgatcaacgtgcaagtagaaatgatgcctggagccaaaggatgcgagagaagtatggtctggacacgagccagttcacatacaacccttcagacccaagcaggtaccagcaaaatggcacgccacgggctgaagaaaggagtcgatgcactataatgtgaagaattcttcatgaggtcctacgagataatagactttcttgaaggggctactgtagtttggtgttaccagtgttgttcagactttacacagcggtgtgtggaatagaagaatcccgaccatattttttgtcacgctcgatatgacttctcagcaaatgctctatgcacctaattttactgtgaatgaggaactgctagccgttgacatcatctattttgaatttttttggggtttgtttcttgttggcaatccgcccccctttcatccttctacgtaagttccagattgtcgctccgtttaatttagatgccaaatgtgtgtaagatttggttgtgccgtgaagtgagatgggaatgggagaatctattttgctttcaataagaatcaagatgtccaaaagagtaaattgagc

SEQ ID NO: 210703 - DNA, 1884 bp, Zea Mays
aatccactccgccattaattaacctctctccttcctcgccccttcccctccacgactccactaccaccaccttcaccttgtctcccacaaccgccgcgcgcaagccctagcccgatctcgccggcgacagacaccagatctcgccgcccgttgcgcgccgatacgcgccccgccggattcaccgctcctcgcgctgcagcacgcccgggcctgggttactgcgtgacatgtagtattgtataattggaggttgtcaccatcaccacaaagcatatgttgtgatttgtcgatggcgaggagatgaaacaggtgtaggggcggagcagcaaggacatgacagccatgccgcatccgcgccaccgaggcgctgctaagaagcccatgtggatcatagtgctattgtctttggtttgtgttgcacttatgggggcctatgtctacccaccacggcgctactccgcatgctacttctttgcttcgagtgtctgtactccgttcaaggattggctacctgctgttgctcgtgagcgaactgatgaagagatagtttcatcggtggttattagggatcttctttcaatgcctatggctatgtcaaagaacccaaagattgcctttatgttcttgacaccgggttcattgccttttgagaagttgtgggagaaatttttacagggtcatgatggccgatattctatctatatccatgcatctcgtgaaaaacctgtacattctagctctctttttgttgggcgtgaaattcacagtgaaaaggtagtatgggggaggatttcaatggttgatgcagagaagaggctgttaggaaatgcattggaagatgttgataatcaatttttcgtcttgctttctgacagctgtgttccactacatacatttgattacatatataattatctgatgggaaccaatgtcagtttcattgattgcttcttcgatcctggcccacatggaactggaaggtatacgatggaaatgcttcctgaaatagaacagagggacttcaggaagggtgcccagtggtttgctataacacgaaggcatgctttattgattctggcagacaacctttactacaataagttcaagctgtactgcaagccagcagaaggacgcaactgtattgctgatgagcattatttgccaaccctcttcaattgactcatgttgattggtccgagggaaaatggcatccaaggtcatatagagctgcagatgttacatatcaactcttaaagaacataacgtctgtcaatgagaatgttcacattacaagtgatgataaaaaagttgtgacacagaccccatgtatgtggaatggaacaaaaagaccctgctatctttttgctagaaagttttacccagaatctttgaacaacctgctgaagctattctccagttacacatcggcttgagttctacatgattcttttggcattttgcctaggagattcctctaggatttatctttttgtgcttcatgtaaattgtggaattgatacttagaggcttaacagagttacagatccagggccttgatgtaattctgagtcccttggtagggctgaggtgatgtttgtttattattgacgctgccctccctgtcattcgtggtgctctctgtatgactatgtttcttttagcccttcacttttttctcttctcttttattcttagattcctagctcccatattctgagtaacaggggttttgtcagttcttactgttattataagattatttttttgtagacacgaagatattatgaaatcagttacactaatagtttaacctggtcttgtgagttacagtgacagttttactcttgtgatgagtatgacagcatggttacattatagtacacc

SEQ ID NO: 210704 - DNA, 2096 bp, Zea Mays
cccggtcgcgtactctgtcttctcgtggttctcccgtgcccctcgcgtgcgctctctgtctctcggggcgacgactaggcggctgctcgccggccgccgacgccgacgcccgccgccagattcccaggtatctatcttcgggacctcgaccggcgacgagcacccaacagtttggttagactgcaatgtaaggggctttgattctttgctacgattggggacaaactctctcctagcagtactttggtgcagcacgctgtcaacttttgcaatgattgggataaaaaagatgctcatattcatggcgattgcagcttctgcgtttgccttcataggtctaggttttgctatcctgcttatatcagtgcttgcagtggtaatcttatggttttatggaagtttttggacgaccacttgtgtaatgattcttggaggtgttctctttttcttgaaacgcgaaagaataactcttcttgttgcctgtttatattcgatgtattgcgcgagatgctatgttggatggctcggattgcttttgggcctcaacttatctttcttttctagtgatattctagtgcagttcctaagggacaatgcagacaataaaaaattcaatggttcttcaaggtactcagagcgaagctctggtagacaaggcaatatctttgaagaatttcagccatcagcaaatagcacctaccaagccagatatgctcgagcttcagatcgagatcctggtgatccttcaacaagtggacctgagaaagagcttacctctgaagatgaagtggctcgtttactgaactgcactgaccactattcagcattaggtttccgtcgatatgagaacatagatgtatcatctcttaagagagaatacaagaaaaaggctatgttagtccatcctgataagaatatgggcaatgataaagctgctgatgcatttaaaaagcttcaaaatgcatatgagattcttcttgattcactgaaacgcaagacatatgatgatgagttgaggagggaagacctcttgaactacttcaggcagagtgtttctcaaaagaatggaagaaacagtactttccaacatgggttcagcccttcagaaggtgttgatgaaggtccttatggtctttccagaagaatagcttgtaaaaagtgcagcgactttcatctttggatttatactggaagagctaaatcacaagctagatggtgtcaggactgcaaggagttccatcaagctaaagatggcgatggatgggttgaacagtcctttcaacctgttctatttggcatgctgcagaagcctgatttacctcatgcatatgtttgcgcagaaagctacatatttgatgtcactgagtggttcaactgtcagggaatgagatgcccggcgaacactcacaaggcaaccttccatgtcaatgccaacatggcaaagcagagcagtggcaaggcgagtacctcaacgcagagggctggtaaggccccaagtggtgtaaacatggatggaggaggactcaacgaggaagagttcttcgagtggttccagaatgcagtcaactctggaatgtttgaaactacattcggggcacaaggcgacccgacttctcctggtaacggaagcaatgccaagagtagcggtagcagcagcagcaacaacaatagtaggaaaaagaagaaaggaaagaaacagtggtaatcaaagcaaagcaggctggggtctggtgatcacttctcggggcagagaaaaaaagaaacaaacagaataagcgttttgggtatgtaaatacaactcggaaaaatcggtccctggcttaaatggttcctaacgagaggccactgtaaatccttgttcatcatggggtgctgacggctgttaaatggccattataaatcctggttcattatgttgtcggatcttaatatatcgtcctggccctcggtaacttgctagcaaaaaaaatgttataaagcaagttactacgaaacaagaatttgcaagattaaagatagttttttttgactgtcatggggaatccctacctggatttcattgattctagcatggctaagccacgcctcaacgacct

SEQ ID NO: 210705 - DNA, 2719 bp, Zea Mays
cccggtcgcgtactctgtcttctcgtggttctcccgtgcccctcgcgtgcgctctctgtctctcggggcgacgactaggcggctgctcgccggccgccgacgccgacgcccgccgccagattcccaggtatctatcttcgggacctcgaccggcgacgagcacccaacaggtactgattttgctgaagcaacagaataatgtattagccctcatgcgttaacacctacataaactttgagtatcctagtttcaagtgaaatcatggcacgaaaaggaaatcaaagtaagagtggccccaatcatgcttcacctaagtggaaaaatacaactgatggtgatgcactaagtacaccagaaagaggtgctgcagatagtgaaaatccgagttcacatgttcaaggcagatcaaagggtcctgaaggaagcagtgagaagaaaggaagaggcagcaaaaggaacagcacaaacaacggcatatcatcctctggaaaaaaacaacaaatggacaccggttgtgatataaacagttcagaagaaaaggagattccggaaatgttttggagaagaccaggtgcattgcttgcatggctgcatccattattagagcttccatgatatatctagttgaagaaggcaaaagatttatcgaaaaaagaatgccaacaatcaacacttatatggcttttgtcaacaaagggcatgcatatgtcttaagcaaaattgcatatgtttatcccatagttcgagcttggatgcttaatgctggaagggtgatgctgctcttgtttacagtttggttagactgcaatgtaaggggctttgattctttgctacgattggggacaaactctctcctagcagtactttggtgcagcacgctgtcaacttttgcaatgattgggataaaaaagatgctcatattcatggcgattgcagcttctgcgtttgccttcataggtctaggttttgctatcctgcttatatcagtgcttgcagtggtaatcttatggttttatggaagtttttggacgaccacttgtgtaatgattcttggaggtgttctctttttcttgaaacgcgaaagaataactcttcttgttgcctgtttatattcgatgtattgcgcgagatgctatgttggatggctcggattgcttttgggcctcaacttatctttcttttctagtgatattctagtgcagttcctaagggacaatgcagacaataaaaaattcaatggttcttcaaggtactcagagcgaagctctggtagacaaggcaatatctttgaagaatttcagccatcagcaaatagcacctaccaagccagatatgctcgagcttcagatcgagatcctggtgatccttcaacaagtggacctgagaaagagcttacctctgaagatgaagtggctcgtttactgaactgcactgaccactattcagcattaggtttccgtcgatatgagaacatagatgtatcatctcttaagagagaatacaagaaaaaggctatgttagtccatcctgataagaatatgggcaatgataaagctgctgatgcatttaaaaagcttcaaaatgcatatgagattcttcttgattcactgaaacgcaagacatatgatgatgagttgaggagggaagacctcttgaactacttcaggcagagtgtttctcaaaagaatggaagaaacagtactttccaacatgggttcagcccttcagaaggtgttgatgaaggtccttatggtctttccagaagaatagcttgtaaaaagtgcagcgactttcatctttggatttatactggaagagctaaatcacaagctagatggtgtcaggactgcaaggagttccatcaagctaaagatggcgatggatgggttgaacagtcctttcaacctgttctatttggcatgctgcagaagcctgatttacctcatgcatatgtttgcgcagaaagctacatatttgatgtcactgagtggttcaactgtcagggaatgagatgcccggcgaacactcacaaggcaaccttccatgtcaatgccaacatggcaaagcagagcagtggcaaggcgagtacctcaacgcagagggctggtaaggccccaagtggtgtaaacatggatggaggaggactcaacgaggaagagttcttcgagtggttccagaatgcagtcaactctggaatgtttgaaactacattcggggcacaaggcgacccgacttctcctggtaacggaagcaatgccaagagtagcggtagcagcagcagcaacaacaatagtaggaaaaagaagaaaggaaagaaacagtggtaatcaaagcaaagcaggctggggtctggtgatcacttctcggggcagagaaaaaaagaaacaaacagaataagcgttttgggtatgtaaatacaactcggaaaaatcggtccctggcttaaatggttcctaacgagaggccactgtaaatccttgttcatcatggggtgctgacggctgttaaatggccattataaatcctggttcattatgttgtcggatcttaatatatcgtcctggccctcggtaacttgctagcaaaaaaaatgttataaagcaagttactacgaaacaagaatttgcaagattaaagatagttttttttgactgtcatggggaatccctacctggatttcattgattctagcatggctaagccacgcctcaacgacct

SEQ ID NO: 210706 - DNA, 625 bp, Zea Mays
ccgaaccggtatgcgtgggatgtgggagggaggaggacgaagacagacgcgctccgccgtctctgccttgtgggccttacgtgggcctcatggcttaaaatgccatgccccagcaactacacgagtcaacacaggcccggcccggcccggcccggcccaagaacccccatctctcgattcctccaacaaattcccctttcccttactccccatccccacccacccacgccgacgagcaaaccctagcgagcgagagagcccggagccgagagaccagccagccatggcgctgcgtgccctgtacaacgagatccggagcatgaaggtccgcgacgtgccggcttacctgaagccgcgcttgacctgggacaacgtcaagaagagcgccgaccaggccgtcgaccgctacatcgagaagtacatcgacacgagctcgccggaccctctctaccacgtctgcatcggagggatgatcttctcctacttcgtcaatctgccctgggagcgcgcccacctcgcccacctcgaggagatggagaggaccggtgggaagcactagatccgctgccccgtccctcgccggcagcgcgggaggaaactcagatgtgtgactgtcatatcacag

SEQ ID NO: 210707 - DNA, 800 bp, Zea Mays
gacgaagacagacgcgctccgccgtctctgccttgtgggccttacgtgggcctcatggcttaaaatgccatgccccagcaactacacgagtcaacacaggcccggcccggcccggcccggcccaagaacccccatctctcgattcctccaacaaattcccctttcccttactccccatccccacccacccacgccgacgagcaaaccctagcgagcgagagagcccggagccgagagaccagccagccatggcgctgcgtgccctgtacaacgagatccggagcatgaaggtccgcgacgtgccggcttacctgaagccgcgcttgacctgggacaacgtcaagaagagcgccgaccaggccgtcgaccgctacatcgagaagtacatcgacacgagctcgccggaccctctctaccacgtctgcatcggagggatgatcttctcctacttcgtcaatctgccctgggagcgcgcccacctcgcccacctcgaggagatggagaggaccggtgggaagcactagatccgctgccccgtccctcgccggcagcgcgggaggacgggtgactttcatggggtccattcaggctgatggcttctgttttcttctgctgttgagctactggagtcatgttactttggtcgttggttttgtacccagacagcaagaaactgtccagcttattgtcttgttcctcgcgtcttgtcataagtaacttcaaacaaaggagtgcatgcattgtgattaaaaacgttttcagcaattgagtacgaatattctctttttttttgtaaatag

SEQ ID NO: 210708 - DNA, 2045 bp, Zea Mays
gcccaacaaagccggccagctatcgcctattccttccctccctcgcattccggcaggctccgcaaacgtccgtgcgcccccgcgtcgccgcttcctccgtcccttccgttctcggcgaatcgaatccgctagcccccgacatttatggctgccgcgttaactcgcctccgatccgccgtcgagcggctcgggccttcccgcgcccgcgccttctcatcagccgctgctgaggccggggctgcgggaccgtgcagcgactctagggctttcgccgcggcctcggtggccgccggctcaggtctcgggatctggctgctgtcctcgaacccgcagccactcacagagtccggccaggcggaggatgccgccaccgcgggaggtggaggcaacagggccttctccgcagcttttggcggtgtcggagccaccggggagcgggagggcatgtttctgttcggagattcatatcgccgaagggtgttcttcaagtacgagaagaggattaggacgcgcagccctccagagaagatctttgagtacttcgcatccgtccacagcccagaggggaagggagattgaagggggagcgccaccctggcgagctacaatgtgctccatctgagtttttcatgctattcgatacaaatggtgatggtgtcatctccttttctgagtatatcttctttgtaacattacttagtatccctgaatcaagcttccatgtggcttttaagatgtttgaccttgaccacaatggggaaattgacaaagacgagtttaggaaagtgatgacactgatgcgatcctataatagacaaggagctgcccatagggatggtttacgctttggacgcaaggttggtcagccagtggaaaatggtggactggtcgaatacttctttggcaaggatgggaatgaacatctacactatgataagttctctagttttttgaagaaattgcatgatgagattgtccgcttggagtttagtcactacgatgtgaaatcatccaacacaatacctgttaaggactttgcgttatccatggttgcttctgctgatatgatttacatagacaagttactggatagagttgaggatttggacgacaatcttgacctcaaggatctgcgtattacctttgaggagttcaaggcatttgctgatcttcgaagaaggttggaaccatttagaatggctatcttcagctacggcaaagtaaatggtctgttgacgaagcaggatctaaaacgtgccgcatcacatgtttgtggagtggacttgactgataaagtagtagacataattttccatgtgtttgatgctaactgtgatggtaacctgagttcagaggagttcctgaggtcattacaaagaagagaaagtgatattcgccagccagcaacgtcaggtttcctaggggtgatcgcctgttggctgaactgtacaaagtgttctcttcaacagatgctgtcccagtagattcttttttgacgctcatgacagtcttcagttgcccttggttgctctgtgcttattgagctggagaacgtcatcggggagttctgaagtgtgaagaggatttttgttgtaaatattaccctgcggcccctgcttagtagctcctacgttaccacgtagcagctgtaacctgtaaggaattccttccgttctcgttcaagggcttcgatgacatacatcttctcccctgacattaaatctccgtcgacttagctggagccttgctacctatcttgcttttagctcatccctgatgctaatattctgtggattgtggttgaacaatcacacttgtaagactagcttgggaatactatttttctaagagattttcatttttccaaggaaaaataaactaattttctttggaaatttcaaatgaaaatactatgagaaaatgtggttcccaaaccagcctgtaatgattaatcgatgctttttttctgaataagtgaatggtaatgggatccgctggaaacattatattatgtaaaaaacttgtgacataactgatactctatc

SEQ ID NO: 210709 - DNA, 784 bp, Zea Mays
cgactagctagtcgagacacctgagcgaccaggcgactaatcgcgattaatcgacgattaggtcgactaatcgggtcctagtcgacctgggcgtccctactggttctcctgcatatttacagatatatagtgaagaagacagatcaaaaatgccacttgagctatcgagtgcactctctcatgaacgggaagttgttgaggattctgaaattcggcagcaggcattagaggctatttatatgatcgtattgcaggatggtggccgaaggtccttttggtcagttaatggcccacgaattctgcaggttggttatgaagatgaaaaggacccgaaagtgatggaagcatatgaacttattggttccctgcttgttgggaagggtgaagatgtacaagataacaagaaggaacaaggagagaagcctcaatgagccccgccgctgataaaaacggtgctgtatttttgtttgtctagaaaacatccctcgccgtgtgcaatagcaatagtatgatatcccaacttgtcaactgttgcaactgcaagagctctgcagtgttgcttttgtaattgacgaatgtatctggaaaatttgcaggtattggccgtcttttccttggttttgagctctctgacaattcttcgttttttttggaatgcatctcttgacgagtctttcacaccgtcgcttcagaacatggatatgcattaaacgggctaccctgtagctttcgctgaaacctattagtgaagctctgtgccaggcgcttcgtggcaagagctgaa

SEQ ID NO: 210710 - DNA, 1172 bp, Zea Mays
aaatccattcatcccgctgtgtctgtgtattgtagtatcagccaaaaaaaaaagaagaataccccgaacacgaccagaaggcctactaaaccctgccgccgccgccgccgcgccatggccgacgagctcgacgagctgatcggcttcctctccgaccgcaacccccaggttggggatgagaaggtgcaaggcttgtatgttgcaaagcttgtgcgatcattctgtaggtcatccagtgattctgaagaggaagacatttttgagtacgttgcctccacacttgtcaatatatctaaggttgaagctggaaggagaatattgttggagcctaagagaggtcttctgaagcagattattcgacaatttgattcaacaaatcaacttagaaagaaaggggttgctggtacaattcgtaactgttgctttgaggctgatactcagcttctgagtttgctttctttagcagaatatctttggccagctctacttttgcctgtagccggaaagaagatatatagtgaagaagacagatcaaaaatgccacttgagctatcgagtgcactctctcatgaacgggaagttgttgaggattctgaaattcggcagcaggcattagaggctatttatatgatcgtattgcaggatggtggccgaaggtccttttggtcagttaatggcccacgaattctgcaggttggttatgaagatgaaaaggacccgaaagtgatggaagcatatgaacttattggttccctgcttgttgggaagggtgaagatgtacaagataacaagaaggaacaaggagagaagcctcaatgagccccgccgctgataaaaacggtgctgtatttttgtttgtctagaaaacatccctcgccgtgtgcaatagcaatagtatgatatcccaacttgtcaactgttgcaactgcaagagctctgcagtgttgcttttgtaattgacgaatgtatctggaaaatttgcaggtattggccgtcttttccttggttttgagctctctgacaattcttcgttttttttggaatgcatctcttgacgagtctttcacaccgtcgcttcagaacatggatatgcattaaacgggctaccctgtagctttcgctgaaacctattagtgaagctctgtgccaggcgcttcgtggcaagagctgaa

SEQ ID NO: 210711 - DNA, 1364 bp, Zea Mays
aaatccattcatcccgctgtgtctgtgtattgtagtatcagccaaaaaaaaaagaagaataccccgaacacgaccagaaggcctactaaaccctgccgccgccgccgccgcgccatggccgacgagctcgacgagctgatcggcttcctctccgaccgcaacccccaggtgcggggcgcggcggcggacatcgtgcgcgggctgacgggtggggaggacggcctccgggcgctcacggcgcgcgccgatagcgcccttccggcgttgctccgcctgctggcctccgcgggcggaagtggctcgggagaggccgcggcggactcgctcgtcaacctcagccaggacgcggccctcgcagcgcgccttgtcgcgctcggggccgtcgatgccgccatggacgtcgtggccaagcgaggcggggagcagccagctctcgcgcgcagactcgtcatgctgctcgttaacctaacccacgttgagtccggcgtcgccgcgctcctccaggttggggatgagaaggtgcaaggcttgtatgttgcaaagcttgtgcgatcattctgtaggtcatccagtgattctgaagaggaagacatttttgagtacgttgcctccacacttgtcaatatatctaaggttgaagctggaaggagaatattgttggagcctaagagaggtcttctgaagcagattattcgacaatttgattcaacaaatcaacttagaaagaaaggggttgctggtacaattcgtaactgttgctttgaggctgatactcagcttctgagtttgctttctttagcagaatatctttggccagctctacttttgcctgtagccggaaagaagatatatagtgaagaagacagatcaaaaatgccacttgagctatcgagtgcactctctcatgaacgggaagttgttgaggattctgaaattcggcagcaggcattagaggctatttatatgatcgtattgcaggatggtggccgaaggtccttttggtcagttaatggcccacgaattctgcaggttggttatgaagatgaaaaggacccgaaagtgatggaagcatatgaacttattggttccctgcttgttgggaagggtgaagatgtacaagataacaagaaggaacaaggagagaagcctcaatgagccccgccgctgataaaaacggtattggccgtcttttccttggttttgagctctctgacaattcttcgttttttttggaatgcatctcttgacgagtctttcacaccgtcgcttcagaacatggatatgcattaaacgggctaccctgtagctttcgctgaaacctattagtgaagctctgtgccaggcgcttcgtggcaagagctgaa

SEQ ID NO: 210712 - DNA, 748 bp, Zea Mays
gcaagttccacgcggacgattatcccaaatattttaacacaaggagcactagactggtcggagatatgtagcgaccccagcctcacgcggtcacgcctcaccatcttcaccggcagcacaccacgccgccgccgccgccgtcccacgcattgtctgttgctcagcttctcctagcccagctcctgctagctaggctaggcctaggctgctacatactgccatcatccatggagtcgcctcctgatcaggcagcggcggcggcggcggcgcgccaggacaaggagcagcgggactacagactcatcgcaaaagccgtggacgaagcgtaccgggcggtggagtgcgacggcggcgggtaccccttcggcgcggtcgtcgtccacggcggcggcgacgacgaggtggtcagcagcagccacaactcggtccggaaggacgccgacccgtcggcgcacgccgaagtgaccgccatcagacaggcgtgcaagaagctggggaaaaccagcctcgccggctgcgagatctacacgtcctgcgagccgtgcccgatgtgcctggggctcattcgcctggccaagataaaggaggtgttcgagaagaccaagggcaagtttcgcaacaagtaaacgcgctggagatggcgccgggcggatggctgttgcctgttgctagtggaatggttgccgtttccaagctttttgtccgggggacctttgatcagaggtcacatgcccagagaccggaataa

SEQ ID NO: 210713 - DNA, 2874 bp, Zea Mays
atttctctggtcctttttcctaattcttttttaccggaaatggaaaagtttggaaggacccaaccccacccagctagaagctgccctcactcgctccagtctctccctctcatggcctcagcctcagcctcactcgctcgctcgcaccaccagctttgctccagagtcctgactcctcctagccttctcctccctctctcccctaccaccacacaacgggataaaccccagcacgaggccggagctgctgctggaaccgtcaggccgtgaagagcctgcggttcgatctgctgcaagagctcctcgtcgatctcttctctgcgaggtttcggtctgagttaccacattgctggagtggaggtatggcgtattctggacaaaggcatgctggtgttgggagctcctcgaggccagctaatggattcaagggggcagccaactcggtggagttcctgggtagggagatgctgggaatgcgactgagggatgccaagcccgacacagatgatgaaagggagatgtggtcaagttcagatgtgactgatagttctagtaatgaagctggtcatgtaatagcgactactgttcacgggcgcaacggcctgcctaaacagtctgtcacatacatcgctgaacatgtggttggaactggttcttttggggttgtgtatcaggcaaaatgccgagaaacaggggaaattgttgccataaaaaaggtccttcaagataagcgttataagaacagagagctgcaaatcatgcatatgcttgaccatcctaacatcatcggtcttaagcattacttcttttcaacaactgaaagggatgagctttatctcaaccttgttcttgagtttgttccagagacagtaaacaggattgcaaggcagtacaatcgaatgaatcagcggatgcccctcatttatgtcaaactgtacacgtatcagatatgccgagcgcttgcttatatacataactgcattggcatctgccaccgtgatatcaaaccgcagaatgttcttgtgagatatgattttttttcttttctataatgatttttgttgctttacatgtatcattcgcatttgttggatgttttgttgctgggatggtatgataacgccatagaatagcaattggtttttacaagtgggactgaatttttagatcatgtgtagcccgatgtcataattattggtagtttcacccaacatctacggcactagcagtttgaaattggaaatgtcaatccacgtgtgcattatttagtttcatatataggtgctatcccatgtgcatcattttattcctaggctgcacatatcatattttataccctgtgtatgctgtttttcttgtcaatggtatcttactatcttctcttgtggaacatttcgtcatcatctgttcttttataacaaggctggacaaaaaaccatgctcccagttccacagatgtcaattggttctgtacatcccactagtgcgtaaatgctaaactaattcaaaatttatttgagcaaactgtgagcctcggaaaggagcatggaagatcaatgcaactagctagcttgttaacccaccatgactccataaccgcatagattagagattgtttgaagaagcaggagaaactgaaactcaattgtagagtatgtacgaaacgaggtttccataattgccttctttttgtctcctttgaatgctgaggtagctactgtttagctacttgaccttttctttacctcgggaatagcagattacatatttatgatgagtgatgctttttgctaatacttctactgtaggttaacccacatacacaccaactcaaaatttgcgatttcggaagtgctaaagtattggtcagaggagagccaaacatctcctacatatgctcaaggctgtgtcatggcagagctgcttctaggacaggctctgtttcctggagaaagtggagtcgaccaactagttgagatcatcaaggttttgggtactccaacaagggaagagatcaagtgcatgaacccaaactatacggagttcaagttcccacaaattaaagctcatccgtggcacaaggtttttcaaagaaggcttccacctgaagcagtggaccttgttagcaggtttctacaatactcaccaaatctacggtgcactgctttggaggcctgtatgcaccctttcttcgatgagctgagagacccaaacactcgtctacccaatggtcggcctctgccgcctctcttcaacttcagatctcaagagctaaaaggcgttcccccagaagtcatcgatcgccttgtcccagagcactcaagaaggcagagtttgttcatggcgctaaggacctagtttttgccgttctttttgcccccttttttcccaccgtttgccaccttgagggaagcttgtaaagctatagcttctcctttcccctcgtccttactttcctcccctctctttcttccgagctttgtgtggatgagagatccttgagatacactgctagagctgtgagttccaggatgtgaggttcgagtgtgtgtgatgtgcagttgtcgcctttgaggtcggagatttcagttgcagtgttgtgagaggcttgtgaagcttttttgtctacttttcagtgcttctctggcttgaagttttccttcaattcttgtgaactggcttcaagatttggcttcgtgaaccctgtgtgcgtgtaaaagtactggttggatgctgctgcaccaattctggaaaaaaaaagcttacaactaaacacctacttatgttttgtttagccaaattcagtgccttcctgttatgcattgcggttcaagatcagatgaatttatatagggtctgattatttagccaaat

SEQ ID NO: 210714 - DNA, 4127 bp, Zea Mays
ggaaaagtttggaaggacccaaccccacccagctagaagctgccctcactcgctccagtctctccctctcatggcctcagcctcagcctcactcgctcgctcgcaccaccagctttgctccagagtcctgactcctcctagccttctcctccctctctcccctaccaccacacaacgggataaaccccagcacgaggccggagctgctgctggaaccgtcaggccgtgaagagcctgcggttcgatctgctgcaagagctcctcgtcgatctcttctctgcgaggtttcggtctgaggtatggcgtattctggacaaaggcatgctggtgttgggagctcctcgaggccagctaatggattcaagggggcagccaactcggtggagttcctgggtagggagatgctgggaatgcgactgagggatgccaagcccgacacagatgatgaaagggagatgtggtcaagttcagatgtgactgatagttctagtaatgaagctggtcatgtaatagcgactactgttcacgggcgcaacggcctgcctaaacagtctgtcacatacatcgctgaacatgtggttggaactggttcttttggggttgtgtatcaggcaaaatgccgagaaacaggggaaattgttgccataaaaaaggtccttcaagataagcgttataagaacagagagctgcaaatcatgcatatgcttgaccatcctaacatcatcggtcttaagcattacttcttttcaacaactgaaagggatgagctttatctcaaccttgttcttgagtttgttccagagacagtaaacaggattgcaaggcagtacaatcgaatgaatcagcggatgcccctcatttatgtcaaactgtacacgtatcaggtctgccttgactaggtggtttttactaatcattcatgttaaatgctgttttttctttataattttttcgttcagttttaccattggtcttctagctatagcacttctttgcacactattaaaaaaatcttttctctatgcattttttggaatagtacaaaaaagcatcttagaagccctcgcacactattattatcatttaactgattttaaagaagagaaggggacagataccggaaaatgagggtactagtttggtagagttgtctaatggtcatgcgcatgccgcatgccacatgttccgcaatcaaccttacgcatcatggattctgcaggacattattttgtcatgttcattcatttgaaataagcttaaagcaatggagaaaacagagcatgggtccccatgacttcctctggtactgggtcctgccccctttagtcatatagggtcacaaatcaaaataatatacatgtttgacttaggtctattttggaccgtttctgtcttttcttaatatattgaaacgcagctctcctgcattttcgagagaagaaaatgtatgagtgtgtctgttccctgaaaactaaacatgttactactttaatgtatgtgctaccttgtagaactaaaattgtggcgacatcggtagcttcttggcatccatatttatgttttatcctttgaaacagaatatatattcctcatgttcttcaacagtagcactgtactggaagtatggaacttctattggagttgcctatcaatgattcacattgtttgtttccatgcagaatctaagataaatattattgagacataatggtgacagcttgtcaattatcctgcctttggaattattttctactacttgcttcctatatgtttagagtgatctgtttgaatgatcacttgggtttacgacgcgtgtccaccagacatttaaattcctgagtttagttgacgtagtgattttaatccattcttcacggactagtactgtctgtttattgtatgacttacagttagtgcaggcatgaatgtttgcatgactcaaatcttattttgattcagctgtattttgtcttttatgacagtgagaatatctgctattctgttttaatataattttgtttgctccatacaatcgttggagtcaaacaatttctagctgccttaccttttagtgtcatacccaatcgcagatttctgctttgcattaatttatctaatttgtcctgcagatatgccgagcgcttgcttatatacataactgcattggcatctgccaccgtgatatcaaaccgcagaatgttcttgtgagatatgattttttttcttttctataatgatttttgttgctttacatgtatcattcgcatttgttggatgttttgttgctgggatggtatgataacgccatagaatagcaattggtttttacaagtgggactgaatttttagatcatgtgtagcccgatgtcataattattggtagtttcacccaacatctacggcactagcagtttgaaattggaaatgtcaatccacgtgtgcattatttagtttcatatataggtgctatcccatgtgcatcattttattcctaggctgcacatatcatattttataccctgtgtatgctgtttttcttgtcaatggtatcttactatcttctcttgtggaacatttcgtcatcatctgttcttttataacaaggctggacaaaaaaccatgctcccagttccacagatgtcaattggttctgtacatcccactagtgcgtaaatgctaaactaattcaaaatttatttgagcaaactgtgagcctcggaaaggagcatggaagatcaatgcaactagctagcttgttaacccaccatgactccataaccgcatagattagagattgtttgaagaagcaggagaaactgaaactcaattgtagagtatgtacgaaacgaggtttccataattgccttctttttgtctcctttgaatgctgaggtagctactgtttagctacttgaccttttctttacctcgggaatagcagattacatatttatgatgagtgatgctttttgctaatacttctactgtaggttaacccacatacacaccaactcaaaatttgcgatttcggaagtgctaaagtattggtcagaggagagccaaacatctcctacatatgctcaaggtattatcgagcaccagagctcatatttggtgcaacggaatatactactgctattgatttgtggtcaacaggctgtgtcatggcagagctgcttctaggacaggctctgtttcctggagaaagtggagtcgaccaactagttgagatcatcaaggttttgggtactccaacaagggaagagatcaagtgcatgaacccaaactatacggagttcaagttcccacaaattaaagctcatccgtggcacaaggtttttcaaagaaggcttccacctgaagcagtggaccttgttagcaggtttctacaatactcaccaaatctacggtgcactgctttggaggcctgtatgcaccctttcttcgatgagctgagagacccaaacactcgtctacccaatggtcggcctctgccgcctctcttcaacttcagatctcaagagctaaaaggcgttcccccagaagtcatcgatcgccttgtcccagagcactcaagaaggcagagtttgttcatggcgctaaggacctagtttttgccgttctttttgcccccttttttcccaccgtttgccaccttgagggaagcttgtaaagctatagcttctcctttcccctcgtccttactttcctcccctctctttcttccgagctttgtgtggatgagagatccttgagatacactgctagagctgtgagttccaggatgtgaggttcgagtgtgtgtgatgtgcagttgtcgcctttgaggtcggagatttcagttgcagtgttgtgagaggcttgtgaagcttttttgtctacttttcagtgcttctctggcttgaagttttccttcaattcttgtgaactggcttcaagatttggcttcgtgaaccctgtgtgcgtgtaaaagtactggttggatgctgctgcaccaattctggaaaaaaaaagcttacaactaaacacctacttatgttttgtttagccaaattcagtgccttcctgttatgcattgcggttcaagatcagatgaatttatatagggtctgattatttagccaaat

SEQ ID NO: 210715 - DNA, 1951 bp, Zea Mays
accacgtctcccctcacctggctctccacctgccacctcacgcgcgcccctgctctgtctcttttggctccgctgaggccgagcacacacaacaaattctctctctcctctctctctctctctctcacacacacactctgctccctgtgcggaggacgggccggccgcatggggtgggggtggacggcgctggcggcggccgcgatggcgtacgtggcggtgaagctgatggaggtgctgtggtggcggccgcggcggctggagcagcacttcgcgcggcaggggataaggggcccccgctaccgcttcttcgtcggctgcgtccgcgagatggtggcgctcatggtggccgcctccgccaagccaatgccgcgcccctaccgctcccacaacgtcctcccgcgcgtcctcgccttctaccaccactggaagaaaatctacggttcctgccgaccaagaagaacacgacctcgtggaagctggacaaggagatcaggaagaacctggcgacgctgatcggccggcggcaggaagccgcggacgacgagaagctcagcggctgtgccaaggacctccttggtctcctgatcaacgcgggcagcaacggcggcaaggtgagccccatcaccgtgaacgacatagtggaggagtgcaagacgttcttcttcgcgggcaagcagaccacgtcgaacctcctgacatggaccacagtcctgctcgccatgcaccccgagtggcaggagctcgcccggcaggaggtgctccaagtctgcggggcgcgtgacatcccctcccgcgagcagctcaccaagctcaagacagtaagctcctgtcatgtcccccccgcaccggccgcctgacagaatcctctaacaacgggcggtgagctgacgcatgctgctggttcctctctggcagctcgggatgatcctgaacgagacgctgcggctgtacccgccggcggtggcgacggtgcgtcgcgccaaggcggacgtggagctgggcgggtgcctgatcccgcgcggcacggagctgctgatcccgatcatggccgtgcaccacgacgcgcggctgtgggggccggacgccacgcagttcaacccggcgcggttcgccaggggcgcggcgcaggcggccaggcaccccacggcgttcatcccgttcgggctgggcgcgcggatgtgcatcggccagaacctggcgctcctggagtctaagctcacgctggccatcgtcctccagcggttcgacttccggctgtcgcccagctacctccacgcgccgacggtgctgatgctcctccacccgcagtacggggcgcccgtggtcttccggccgcgaccgtctgagccgtccgatcgcgacagtagggatgtgtgaggagatgacggagctcgtactaaccttgtcagtgtcaattgcgcctggcatgatgaccaataaccacctccgcagcatgctgctttgccctcaagagcagagaccaaacgagcagagcagccgccgccaccgccacagcccagcaccaccagaggaacaagtgactagaaggagcaccaccgtaccgtactaagtactaacaaatatatcctgctgaaggtgccagcagcagcagcagcttagactagtagagcagagtagaaggcttgaccagtgcctcccaatttttcagtcatttgggttgatgatttccttccttccatgaggttttgccaggtgtggttggtgtatgaaggattgcaaaaattgtacacacgtcgtgttccgtttgttcttttgatctgcgatgatacgtacatgggaggaaaaggtgagcagggaaaagggggaatgcaggcgtatggtatgggaggtgcatgcatgatgtttgaggatcgtggcgccacagtgcgtctgcttacttccctgtcattgttctctcctccgtggtcctccttgcgatgcagaccag

SEQ ID NO: 210716 - DNA, 2638 bp, Zea Mays
tgcaggtctcaaaactctacatgccctaatcgaaccatccttgtgcttcggcattatccccagctttttctccaagcgtccgttcaggaagctgtccggcaacgagccgctcggcactgggcggtggccgtgcaagagcgatcgggaccgcatcgctcgtctgctcctccaggcctccgcctccctcatcatcactgcagcggcgagaagaacaagggacggtccggcggtggtctccactgacatcgcctaccatggctaccatgctgcgccggtgcatgcgggatctgcgcccgctgcggtctctcgcgagggtccccagaccgatcttcggcgagagtccaacatttcttaaatgtagaagcaactcaacaaaggcatctccaaagagttctacacagaatgctgccccaggtcctcaaggacaaccttctcagtcgggaagtaatgtttcaaagcttgctcttggaactcttgtggtcggtgcagcagctataggtgcacatcaacttggttatatagatcttcaatttaaggacaagacattgccttttagcttaaagaaggaagatgtcggaaaggtggtatatgaagatctgaagattccttctgaacagaaggttgaccagacacaaaacatgtcaggaccaaacactgagattgttcaagagaacaataatgagactcatacttcaaaggactttcgaaatggtggggtgggggcaccagagcttccaatcaatggggatcagcttgttcctgcagaagaaaagaaatcagaaaccctagcccatgagacaaatccagttccagatgaacctggatctgatactgaaatgccatctgaagattctccagctgttgatataaggacagttgccatcgatgctactgaatctagtgaagttcctcatgaacagcaaactgataagatagacggcacagttactcctgtacagtcaaccccaacaacagttagtacttacgatcaccccacagatccagactcaccaaaggatctcacaatagctggtgctgttgagcagaaatctcttgctgagacttatttactgcaagatgaacctggtctttcgaaagacgcaaccattaaagagaaaagaagcgatgaagttgttcgagaaaaaaattctgaagatggtaagattgtacttgatatcattgaggctattcatgctgccgaaaagaagcaggcagatgtagatgcatacatgtattcagaagagagaagaaagttgaaggagaagtatgaaaaggagctgaaagacaccagggccagggaactgatgtatgcagaggaggcagcaattctagataaggagctaaagaaagaaaaactgaagaatgctgctgccataaaggaactgcaagagaaggctgaacaaacgttgcaggatgagctgcagaggaagggtgaagaaacaatccaacagattgagaaggctcaagagatagcaaaagctgaactggctgcagctgttgcaaaagagaaagcatcccagattgaacagattgctgaagcaaatctcaatattgatgctctgtgtatggcattctatgcgcgatctgaagaagctaggcagagccattcagttcataaacttgctctgggcactcttgctttagaacacgctttatccagtggatcaccaatccgatcagaagtggggctattgcgaaaatctgttgaaggcattgacaaagattcactgttagaattggctttttcatcactcccagaagatgttttagattatggatcagataccaggatggggttgaagcaacagtttaactccttgaaggaaactatcagacatctcagccttctaccagcaggtggtggtggaatcctggcacacgctgttgcacgtgttgcttcttcaatcaagattaaaggcgataactctggagatggcattgagtcccttataaacaaagtagaaagcatgattgtcaatggagacttgagtacagcggccgatgccttggagcaagggctacatggaactgaagcagaggagatagctaccgagtgggtgaagcaagccaggaaacgcgctcttgcagagcagacacttgctctccttcgcgcttgtgcttcttcgaccacgttctcgtgattttgacaaccatttccccttccttttcttcgaccgcatttgccggtactccttgcaaccgcatattttttccccagaccatgctgcaaatgtgtggacggtgagcgagaagactagatacaatactgtatgagccactcggtctcaaagtgggcccctgcctagctttcctcctgtaaacagagctaataagttctggcgttctgccctgtatctacttgctgttcttaacattttagtggccagttaaagcaatgtttttggatccaattgctgaaggattctttgtatctgtagtatctgtagtcatgtacagttcaacaaggggtcagtggacactggacatagtgggcgaaaagaaccttatgctccgtttggatgtcgatattgaattgaaatgagatgtaattctaattctattatttggatgtcactgaattggagtttagaattgtgtggtccaatttcacttaatacaaaggagtattgggagaaag

SEQ ID NO: 210717 - DNA, 1568 bp, Zea Mays
caaaactctacatgccctaatcgaaccatccttgtgcttcggcattatccccagctttttctccaagcgtccgttcaggaagctgtccggcaacgagccgctcggcactgggcggtggccgtgcaagagcgatcgggaccgcatcgctcgtctgctcctccaggcctccgcctccctcatcatcactgcagcggcgagaagaacaagggacggtccggcggtggtctccactgacatcgcctaccatggctaccatgctgcgccggtgcatgcgggatctgcgcccgctgcggtctctcgcgagggtccccagaccgatcttcggcgagagtccaacatttcttaaatgtagaagcaactcaacaaaggcatctccaaagagttctacacagaatgctgccccaggtcctcaaggacaaccttctcagtcgggaagtaatgtttcaaagcttgctcttggaactcttgtggtcggtgcagcagctataggtgcacatcaacttggttatatagatcttcaatttaaggacaagacattgccttttagcttaaagaaggaagatgtcggaaaggtggtatatgaagatctgaagattccttctgaacagaaggttgaccagacacaaaacatgtcaggaccaaacactgagattgttcaagagaacaataatgagactcatacttcaaaggactttcgaaatggtggggtgggggcaccagagcttccaatcaatggggatcagcttgttcctgcagaagaaaagaaatcagaaaccctagcccatgagacaaatccagttccagatgaacctggatctgatactgaaatgccatctgaagattctccagctgttgatataaggacagttgccatcgatgctactgaatctagtgaagttcctcatgaacagcaaactgataagatagacggcacagttactcctgtacagtcaaccccaacaacagttagtacttacgatcaccccacagatccagactcaccaaaggatctcacaatagctggtgctgttgagcagaaatctcttgctgagacttatttactgcaagatgaacctggtctttcgaaagacgcaaccattaaagagaaaagaagcgatgaagttgttcgagaaaaaaattctgaagatggtaagattgtacttgatatcattgaggctattcatgctgccgaaaagaagcaggcagatgtagatgcatacatgtattcagaagagagaagaaagttgaaggagaagtatgaaaaggagctgaaagacaccagggccagggaactgatgtatgcagaggaggcagcaattctagataaggagctaaagaaagaaaaactgaagaatgctgctgccataaaggaactgcaagagaaggctgaacaaacgttgcaggatgagctgcagaggaagggtgaagaaacaatccaacagattgagaaggctcaagagatagcaaaagctgaactggctgcagctgttgcaaaagagaaagcatcccagattgaacagattgctgaagcaaatctcaatgatcttcccactcggcgcgagatcttc

SEQ ID NO: 210718 - DNA, 2606 bp, Zea Mays
caaaactctacatgccctaatcgaaccatccttgtgcttcggcattatccccagctttttctccaagcgtccgttcaggaagctgtccggcaacgagccgctcggcactgggcggtggccgtgcaagagcgatcgggaccgcatcgctcgtctgctcctccaggcctccgcctccctcatcatcactgcagcggcgagaagaacaagggacggtccggcggtggtctccactgacatcgcctaccatggctaccatgctgcgccggtgcatgcgggatctgcgcccgctgcggtctctcgcgagggtccccagaccgatcttcggcgagaagcaactcaacaaaggcatctccaaagagttctacacagaatgctgccccaggtcctcaaggacaaccttctcagtcgggaagtaatgtttcaaagcttgctcttggaactcttgtggtcggtgcagcagctataggtgcacatcaacttggttatatagatcttcaatttaaggacaagacattgccttttagcttaaagaaggaagatgtcggaaaggtggtatatgaagatctgaagattccttctgaacagaaggttgaccagacacaaaacatgtcaggaccaaacactgagattgttcaagagaacaataatgagactcatacttcaaaggactttcgaaatggtggggtgggggcaccagagcttccaatcaatggggatcagcttgttcctgcagaagaaaagaaatcagaaaccctagcccatgagacaaatccagttccagatgaacctggatctgatactgaaatgccatctgaagattctccagctgttgatataaggacagttgccatcgatgctactgaatctagtgaagttcctcatgaacagcaaactgataagatagacggcacagttactcctgtacagtcaaccccaacaacagttagtacttacgatcaccccacagatccagactcaccaaaggatctcacaatagctggtgctgttgagcagaaatctcttgctgagacttatttactgcaagatgaacctggtctttcgaaagacgcaaccattaaagagaaaagaagcgatgaagttgttcgagaaaaaaattctgaagatggtaagattgtacttgatatcattgaggctattcatgctgccgaaaagaagcaggcagatgtagatgcatacatgtattcagaagagagaagaaagttgaaggagaagtatgaaaaggagctgaaagacaccagggccagggaactgatgtatgcagaggaggcagcaattctagataaggagctaaagaaagaaaaactgaagaatgctgctgccataaaggaactgcaagagaaggctgaacaaacgttgcaggatgagctgcagaggaagggtgaagaaacaatccaacagattgagaaggctcaagagatagcaaaagctgaactggctgcagctgttgcaaaagagaaagcatcccagattgaacagattgctgaagcaaatctcaatattgatgctctgtgtatggcattctatgcgcgatctgaagaagctaggcagagccattcagttcataaacttgctctgggcactcttgctttagaacacgctttatccagtggatcaccaatccgatcagaagtggggctattgcgaaaatctgttgaaggcattgacaaagattcactgttagaattggctttttcatcactcccagaagatgttttagattatggatcagataccaggatggggttgaagcaacagtttaactccttgaaggaaactatcagacatctcagccttctaccagcaggtggtggtggaatcctggcacacgctgttgcacgtgttgcttcttcaatcaagattaaaggcgataactctggagatggcattgagtcccttataaacaaagtagaaagcatgattgtcaatggagacttgagtacagcggccgatgccttggagcaagggctacatggaactgaagcagaggagatagctaccgagtgggtgaagcaagccaggaaacgcgctcttgcagagcagacacttgctctccttcgcgcttgtgcttcttcgaccacgttctcgtgattttgacaaccatttccccttccttttcttcgaccgcatttgccggtactccttgcaaccgcatattttttccccagaccatgctgcaaatgtgtggacggtgagcgagaagactagatacaatactgtatgagccactcggtctcaaagtgggcccctgcctagctttcctcctgtaaacagagctaataagttctggcgttctgccctgtatctacttgctgttcttaacattttagtggccagttaaagcaatgtttttggatccaattgctgaaggattctttgtatctgtagtatctgtagtcatgtacagttcaacaaggggtcagtggacactggacatagtgggcgaaaagaaccttatgctccgtttggatgtcgatattgaattgaaatgagatgtaattctaattctattatttggatgtcactgaattggagtttagaattgtgtggtccaatttcacttaatacaaaggagtattgggagaaag

SEQ ID NO: 210719 - DNA, 561 bp, Zea Mays
atacgagccccgcagcccccgtccccgtccccgtcctcctcctcttcttcccccttcctagcggcacggcaccaggcccgccctggtggcatctccgtaatttcgcgcctcttcgccgccaaggggtggggccgtgggggtggcaagaggaagaggtatgggcaacgccagcggccgcgaggaggacgctgcagctgttgacggcgacggcgccgacgtggaggacggcggaggggactcgtcggtccgctcgtcggagcgcgcctttccgccgtacggcagcgtaggagccaaccacgtgcggcgcgcgtgctcggtgggtgtcgtaggtggcggtggaggcgccggatcgccacccgggagtcctggccactcgctctcgccgcggatgttcgtgccccagggtccaatgcgacgagtggtcgcgatctggaggtcgctggcaaggtttggtatcgtcctaattcgcttgtgattgatgccaaccgacaagcgtcttttctctatgaaccaattttgctgccgtgcgcgtgcaatttcgtgaagttatttgtaagttgc

SEQ ID NO: 210720 - DNA, 2977 bp, Zea Mays
cacgattcccagctaccctccctcggatctccctcaaatccctagtgcacacacgaacgtatccatgttctagggcgccgtcgttcttccctacagagggtggcatccatctccgcggaagagggtgcgcagaccatcctgctgcaaaaggccaccgttcttcacgtacgctcgttctctgttctgtcagtgccacaagatatgtcagaccatgtgcggtaagccctcctcaacacgatcaccaatttgagtatgcaagctaatgtactatgtgagtagagtagacagtagctattatagttgattgtataatccttttgattctgctacttgtatttatggtctgatgaatgtagaattttctgcaatgattagatatatgtacttgatcattttgttaccctcactgtacttgatcatttggatgtctgcaatgaaaagaacgatgaggcaccttgaggaggatgacgagatagatgacgaactggatcagatcatggctcttatgatgggtcaatacaagaagaggaaaaatggccagcgtaaaaagcgtcgaggttcagtttttggacataaagttcatgaccggagtagacaagaacatgatagaaaattatttcaagattactttgctgaaaatccaacatatcccgagaagttttttcggcgtcgttttcggatgagttcctctcttttcaagcggatagctaaagccgtagagaagcatgatgaatactttgttcaagatagaaatgcagctggtgttctcggtttttcatgtctacagaaggtgacagcagcttttagacagctagcttatggtgttccagcagattatgttgatgagtacttgaggattggtgaaagcactgctattgagagcttacggaaatttgtcaaggctgtctgtgaggtttttggcccacaatacttgagagctccaaatgaagatgacacagctaggttacttagtattgccgaacaacgtggatttcctggaatgcttggtagtattgattgtatgcattggaagtggaagaattgtccaacagcttaccaaggcacatattgtggtcatgtgaaagaaccaactattatactagaggcagttgcgtctcatgatttatggatatggcatgcattctttggtctaccagggtcactcaatgatattaatgttttgcacagatctcatctttttgatagacttgttgaaggcaaagctccagcagtgaactacacaattaatgggcacaagtatgatatgggctactatctagcagatgggatctatccaaattggtcagcctttgtgaaatcaatcaaggctcctgcaaatgagaaggaccaaaattttactgctgcacaagagtcgctgaggaaagatgttgaacgtgcatttggtgtactgcaggctcgatttgccattgttcgaggtccagcaaggttttgggatgtagctacacttcggaacattatgaaagcatgcataataatgcataatatgataatagaagatgaaagagacgcaggtcgtcttgagccgccctatgagaagagcgacgctgagacaaatggttgggtttcacatgttggaacatcaaacttatcagcattcatcgacaagcacaaagatatagcccattctttctttctatggcttcatgacccctgtacctccactgcaaagggctgctgatgtaactccagtgttcaaccagatattgatgaatgatcaagaagaagaatatgatggcccccctcaaaaggaaattccttctttaattgtctggacccttggaggaaagaatgtatatgttgaaggatcatgggataactggaaatcaagccatgcaaaaatctgggaaagatcactctcttttgctggtactcccgtcaggagtttaccgatacagatttgttgtagatggagaaaggagatgccttcctgaccttccctgtgaaactgatgcaatgggcaatgcggttaaccttcttgatgttaatgattttgtcccagaaagtgttgagagcgtggtagaatttgagccaccgctttctccagactctagctacagtttccaggcacctgaggacaaggacttcgccaaggagccacctgctcttccagctcaactccatctcggcgtccttaactcacagaactcggaagaaagctgcgcgcggccgcagcacatagtcctcaatcacctcttcatagagaagggctggggcgcccaccccctggtggctctcggcctaacccacaggttcgagtccaaatatgtaaccctcgtcctgtacaaacccatcgaacgatagcaatagcccgcgcatgaagagcggaagttcaatgcttgacaactcactgcgggagcagcgatgaacagcgccgaggttgtacatgcttgtgaaagtggttgaggttcaggagtattttttttccgtgccctgcttgcagaacctctggtagtctggttgttagctgtacatgctgcgctatcatgatgttggccttctggtttgtttacagagagacaaggcgtccttacaatttttacatgtccgcttgtcgtcgtcgttcctctcccatcccatggcagattggcaggaatgaaatgtgttgaaatccacatgaatgttaggtgccggagatagatcaagggattcctagatttttatttgttttttgactggtcaagaagatgttgttgttatgtactaaactcaagaaatttttacaaatgagatactagtgttctcaggcccggagccatttttttttacaatgcccttatgcaacgcattcatggagtgagatttgccaaattctgcagaactctgcactattttttcttgaaagcgtctagacatttaggtagtagagtttctgtgattaatgacatcataaaattattatgattattgtgttttacaaaaaaaaaatataaactagatcatggcaatagaaaataaa

SEQ ID NO: 210721 - DNA, 2612 bp, Zea Mays
aaggccaccgttcttcacgtacgctcgttctctgttctgtcagtgccacaagatatgtcagaccatgtgcgaacgatgaggcaccttgaggaggatgacgagatagatgacgaactggatcagatcatggctcttatgatgggtcaatacaagaagaggaaaaatggccagcgtaaaaagcgtcgaggttcagtttttggacataaagttcatgaccggagtagacaagaacatgatagaaaattatttcaagattactttgctgaaaatccaacatatcccgagaagttttttcggcgtcgttttcggatgagttcctctcttttcaagcggatagctaaagccgtagagaagcatgatgaatactttgttcaagatagaaatgcagctggtgttctcggtttttcatgtctacagaaggtgacagcagcttttagacagctagcttatggtgttccagcagattatgttgatgagtacttgaggattggtgaaagcactgctattgagagcttacggaaatttgtcaaggctgtctgtgaggtttttggcccacaatacttgagagctccaaatgaagatgacacagctaggttacttagtattgccgaacaacgtggatttcctggaatgcttggtagtattgattgtatgcattggaagtggaagaattgtccaacagcttaccaaggcacatattgtggtcatgtgaaagaaccaactattatactagaggcagttgcgtctcatgatttatggatatggcatgcattctttggtctaccagggtcactcaatgatattaatgttttgcacagatctcatctttttgatagacttgttgaaggcaaagctccagcagtgaactacacaattaatgggcacaagtatgatatgggctactatctagcagatgggatctatccaaattggtcagcctttgtgaaatcaatcaaggctcctgcaaatgagaaggaccaaaattttactgctgcacaagagtcgctgaggaaagatgttgaacgtgcatttggtgtactgcaggctcgatttgccattgttcgaggtccagcaaggttttgggatgtagctacacttcggaacattatgaaagcatgcataataatgcataatatgataatagaagatgaaagagacgcaggtcgtcttgagccgccctatgagaagagcgacgctgagacaaatggttgggtttcacatgttggaacatcaaacttatcagcattcatcgacaagcacaaagatatagcccattctttctttctatggcttcatgacccctgtacctccactgcaaagggctgctgatgtaactccagtgttcaaccagatattgatgaatgatcaagaagaagaatatgatggcccccctcaaaaggaaattccttctttaattgtctggacccttggaggaaagaatgtatatgttgaaggatcatgggataactggaaatcaagaaaagccatgcaaaaatctgggaaagatcactctcttttgctggtactcccgtcaggagtttaccgatacagatttgttgtagatggagaaaggagatgccttcctgaccttccctgtgaaactgatgcaatgggcaatgcggttaaccttcttgatgttaatgattttgtcccagaaagtgttgagagcgtggtagaatttgagccaccgctttctccagactctagctacagtttccaggcacctgaggacaaggacttcgccaaggagccacctgctcttccagctcaactccatctcggcgtccttaactcacagaactcggaagaaagctgcgcgcggccgcagcacatagtcctcaatcacctcttcatagagaagggctggggcgcccaccccctggtggctctcggcctaacccacaggttcgagtccaaatatgtaaccctcgtcctgtacaaacccatcgaacgatagcaatagcccgcgcatgaagagcggaagttcaatgcttgacaactcactgcgggagcagcgatgaacagcgccgaggttgtacatgcttgtgaaagtggttgaggttcaggagtattttttttccgtgccctgcttgcagaacctctggtagtctggttgttagctgtacatgctgcgctatcatgatgttggccttctggtttgtttacagagagacaaggcgtccttacaatttttacatgtccgcttgtcgtcgtcgttcctctcccatcccatggcagattggcaggaatgaaatgtgttgaaatccacatgaatgttaggtgccggagatagatcaagggattcctagatttttatttgttttttgactggtcaagaagatgttgttgttatgtactaaactcaagaaatttttacaaatgagatactagtgttctcaggcccggagccatttttttttacaatgcccttatgcaacgcattcatggagtgagatttgccaaattctgcagaactctgcactattttttcttgaaagcgtctagacatttaggtagtagagtttctgtgattaatgacatcataaaattattatgattattgtgttttacaaaaaaaaaatataaactagatcatggcaatagaaaataaa

SEQ ID NO: 210722 - DNA, 3712 bp, Zea Mays
ctcccatgtccatgtgctgccgagatggccacagtagagctgccagcggcgggcatggccggcatgctgccgccgaggaacgccacggcgcaggtggcgccgggcaacaacttctccaaccccgcctcggtcgtgtgctactcgccgatgatggtgacggcctacggcatctggcagggggtcaacccgctggagttctcgctcccgctcttcatcctccagacggccatcatcgtcgccaccacccgcctcctcgtcctcctcctcaagcccatccgccagccccgcgtcatcgctgagatcctcgccggcgtgattcttgggccttccgtgatggggcaggtggaagtctgggggaccacggtgttcccggtgcggagcctgctgacgctggagacggtggcgcacctcggcctcctctacttcctcttcctggtcggccttgagatggatgtcaacgtcatccggcggtcggggaagaaggccctcatcatcgcggtggcggggatggcgctgccgttctgcatcggcaccgccacgtccttcgtcttccggcaccaggtgtccaagaacgtgcaccaggcctccttcctgctcttcctgggcgtcgctctctccgtgacggcgttcccggtgctggcccgcatcctcgccgagatcaagctgctcaactccgacctcggccgcatcgccatgtccgccgccatcgtcaacgacatgtgcgcgtggatcctactcgcgctcgccatcgccatctccgaggtcaacagctccgccttctcctccctgtgggtgctcctctccggggtcttcttcgtgctcgcctgcttctacggcgtgcgcccgctcatgtggtggatcgcccgccgcgtccccgagggcgaggccatcagcgacgtgcacgtcacgctcgtgctcaccggcgtcatggtcgccggcgtctgcaccgacgccatcggcatccactcggtgttcggcgcgttcgtctacgggctggtcatacccagcgggcagctgggcgtcgtgctcatcgagaagctcgaggacttcgtcaccgggctgctcctcccgctcttcttcgccatcagtggcctccgcagtccgcaccaacatttcccgggtgcacgatcccgtcaccgtggggctcctcgtcctcgtgttcaccatggccagcttcgccaaggactcgtggagatgatcgtcctcaacatcggaagggacaaggaggtgctcgacgacgagtcgtttgcggtgatggtgctggtgtctgtggcgatgacggcgctcgtgacgcccgtggtgacgtcggtgtaccggccggcgcggcggctggtcggttacaagcggcgcaacctgcagcggtccaagcacgacgcagagctgcgcatgctggcgtgcgtgcacaccacccgcaacgtgccgtccatcatctcgctgctggagctgtcaaacccgaccaagcggtcccccatcttcatctacgcgctgcacctggtggagctcaccgggcgcgcgtccaacatgctcgccgcccaccactccgccgccaaccagaaccgcggctccagctcggaccacatcttcaacgccttcgagaggtacgaggagagcgtgggcggcgtgtccatccaggcgctgacggcggtgtcgccgtaccagacgatgcacgaggacgtgtccgtcctggcggaggacaagcacgtgtccatcatcgtgctcccgttccacaagcagcagacggtggacggcgggatggagcccatcaacgcgtccctccggggcttcaacgagagcatcctctcggcggcgccgtgctcggtgggcatcctcgtggaccgcggcctcagcgccgcggcggcgcgcatggcgagcgtgcaccacgtggcgctgctcttcttcggcgggcccgacgaccgggaggggctcgcgtacgcgtggcgcatggtggagcacccgggcgtctgcctcaccgtcgtccggttcatcccgccggactacagggcccccgcgctggcgccgccgcagcacatgcccgcgtccagcgtccacgcgcgcgccatcaccatcgtccccaagagcgagcggcagatggacgaggagtacctgaacgagttccggacgcgcaacgtcggcaacaacgcgatcctgtacatggagcaggtggtggccaacagcgaggacacgctggcggccatccgggacctggacagcgcgcacgagctgtacatcgtgggcaggcaccccggcgaggccgggtcggcgctgacgtcggccctggcggagtggatggagtcgccggagctggggcccatcggcgacctgctggtgtcgtccgagttctccaagatggtgtccgtgctggtgatgcagcagtacgtgatcacgacgccgcagccggcggccgtgggaccagcagcggcagcgcccgtgacggacgaccccgtccggcagtacgtgaccaacgccaaccagcggacgtcggtggccggtctcggcgtcggcggcaaccagatgggccgcggcgggtggggcggcggtgccggagggttctgacgacctctggcggcagctgcactgcacgcgcacgcacacgcacgttggtcgattcatcgatagggggttatacgtttatagggacttaaacgtgtagtacaattttagctgatcgctagctcttagtctggttatattagtgctaactcatttgtgatttctccctccattaggatggggaggcgacaagctaggtgtcacgagattgtcaagaagacaagaactatgggtgggctgttcgtaggtgcgtttaattccagagacgagctatgcctatacggctatacccatcggcggccacgtaccgccgtgctccatgtgtgcgcggcgcgggtcatcaacccacgacgaggccgggctggggactggggtgcatgcatgggaaaaaaattctacgcggcagggtcgtaaagccaccaccgtgcgctcctgatgtcgatgcctgccgcgtggagctcttgcgtatctaacgctcccacgacaatcacccttccagacggctcgaattacatacgacaggatcggctcggctctactccgttctgttcgcttctgctttaggtgtgtgcctagcagatggtgaggcggcgtcgcgcggccctcccgacggctcgccggccgcgctacggggcctgctgcagcagcccctcctccacgcctacgaggccaaggacccggccgcgtgcatggacatccggcgccctcgtggagcggcggctgcctcgccacgtccgtgttcgtctactttggagcctattcccggaggaggacaatctggacaagctgttcctaggcagcaacctaagcctttggcaaggatgctacagctgttttggagctgattcattctccccgggcacgtgccttacctcgcgtctgtctggtgttcgacaaaatgcacatgtggtcacaagcttggcagaatgcagtcaagagatgggtactcagaactgtcttatgcagtcaaaatttcaatctagtgttcctgaacttcttgcaggtacaaagagcagtcaagagcagaagtgtgtgtctgtgattgttatgaagtacagagcataactctgtcttgcaatattgagctcattaggtgaaattgtgccggtaaaagagctttgtatttacctgtctgtttgtgcttttgtgcaatggaataaac

SEQ ID NO: 210723 - DNA, 689 bp, Zea Mays
gacccactggaattaattaaaagggaaacaataacctgctggctctataaacataagcagcatactgaccggcaaatgcttggcaaaaataaaccctggaaattcgtgcaagcaaaaggatccatgcaagcagaagaaagcatggaggttccagaatacagtctcggaggccctggaggacatcacagctctatactatgacgaagatcgtgacgagatctacactggcaaccggcatggccttgtccatgtgtggtcgaactgaaagccgaaatagtggcggctttcacccacagcatggtgatcttcacctgtatgtgtattaacagcttgtacctcacatggcaggggggcacgaagacggaccccccagccaccaggtacggacgtgatgcttcattgttgaggcaattcttatttatcccaccagcgtggcaagagctctcaccacataggcacccattcagaaatcagaacaccccctccccgatttgttgtaggattgacaatcgttgtgcgttttaaatatagcatgtgtgttaattttttgttgttgttgggaatgtcgattatgtcccacaactcagtcagtgagttcaagtgttacggatgtaccttgcaagtaatgagattcattcgttgagttgtgatttcgttcaacttggctccagcccgcatctcgtttcaac

SEQ ID NO: 210724 - DNA, 1035 bp, Zea Mays
attatctcttttttgcgggtgctattatgttcttattcttctccaaacccgatgatcgctgtcgtctaatctaccgcgcgcaagcctcccctcggggctagatctccggtctccgcttgcccaatttccaccactgaggcgatgcaggaagccaagcacctcaccacctcaaagcttccgccgcaatcccaatcctcatccccatccccttcggctcccgccgcgaaccctcccccataccatcacgactatggtacctttcaccggccgtttcagccgacgctgcccgtcgtaggccccgcctaccatgactaccatgcctctcctatcgggttcggcagccaggggttcgttgcctccccgggcgccgtccagcagcaggtcttcgtggagggcatccccgtccgagagccgcccctaccgttctgcggcgtcggcgtcggctggtttttgttcttattggggttcttcttggcggcaatcccctggtatgctggtgcgttccttctattctttgttgctttggaccacagagagaagcctggattaatcgcatgcaccgttgctggcatatttgcactagttccattcatcctgaacggtatcagattgaaccctttctggtgatcagtgcttgccaatccagatccacatgactaatgttttcagcaccacattcgatatgttcatagctgtattattttgctcaaacttgcgaagaacaaaatatatgagcttatgtgtaaaaaggaattgccatgctgttttatgtccgcagcaggttcatgccctgtgatatgtgtaatcatgaattgtacagtttatctgtaccgcagcagtttacgagagatgactagatgtaccatgaagctggaaatggggcttcggggatacatgtcacagtgaattttcaaatcctgtgtaagtgatccatattcaggccattgcagctgtttacaggcctcacgttggggcctggagctttgctactggttattcgagttgctttggtactcctgatttaaggtaatccat

SEQ ID NO: 210725 - DNA, 1996 bp, Zea Mays
acgtgtcttctccgtcctgcgaactggcctctgccatccccgttgccaaaacaactcttccttcgttcagtgtcgaactatcgatgcggccgacccgcgcggcgtcgcgtgggggatgggcgttatacgagctgtacaggacaacgagccgcgtggcggcgccggcagtgctattgtggcggcgactgcaagggctggagcacccgacgcggtggccggagcggctaggacggccgtccgcggcgcggcctcggccgggctctccgctcgtgtggtttcatgccgtatcccttggcgagggaatggccgcgcttcccattgttcgccactgcgtccgcctccgtcccggcctccccgtgcttttcaccaccaccaccctctcctcgtccgaagttatcatggatctactccctgatggtgtcatatatcagatagttttattggatactggaagccaagtttggtacttcttctggaaagtgaactctggccaaacctcatcatgtctgcagcagcaaaagggattgcagtggctcttttaaatgcacgcatatcattgaaatccttcaaccactggtcgatgcctctaatgttcccattagtttctttgatgctctctaaactatcacttgttgtcccattgagtactattcaagctgttcgttttcagctgctacatacaccaccaggaatcatacattttgctggagatttaaaatatgctgttggagatgttaataccggggagaatcaggtcaaggaaataaaagatttgcaacggcagtttagcaataggcccctctggatggctgcttctattcacagaggtgaagaagaagtcatcctccgcattcatgaagagttggtcaacgtgtatcccgttctactactaattcttgtgccaagacatcctgaagactgtaagaatatttccttggcactaaagaaacagaaggtcaattttgtgctgaggtcaactagggaagtggtctcttcaatcactagggtatatatggttgatactttaggggaattaagaatgctttacagggtcaccccaattgcagttgttggtggttcatttctacctggcttagccggccataatttttctgaggctgctgccgctggttgtgctgttatgactgagtgaactctggcatgcaggaccccacgttggacacttctaccatatgctggtcgaaatgtggcaaataaatcctttagctgtcaagcaggtgtcaggagaatttgaactgctgcaaacactaaaagaactgcttggtgatgccagcactctgggagcacgtcaaagagctgcaaaagatgcattttcgattatgtcagatggagttgtgaaccgtgtatgggatttagtctgcaggctgggcattgattcccaaacaaatacgttgagcagttgacttagctgaggcttattcttgtaatctctgtgggactgtaggagtggaaatgcacagggagactgaaaccaaaaaccggcgattgtggcatgctggcgacctggtgagtggtgagtggtgacaaaggactaagctcacatgatagaacatatatccacgtcatttgctcgacttgctcctgtcggaaatttagatatattccataaaaatcctttgagatgtctgtcatcttttcatttccttgtagcatggatatgatatattttgtcattccttagtgccagccagcagatgatgttttgcagtgccttttcctttgttaaattggcacattcaaggctccaggaatttcaagggccatgccaattttagggttagatgtgaactgttaaatgcatatgacatgctttttcaggcgtgatatgtgtgattgatgttcttttctatcttggcaaagtacagttttggggataggaaagcgggaatgggaaatggacacaatttcctcgaatgtatgccataggttggactgcaatttgcaaattgacctgaggtaaccaggtaccttttat

SEQ ID NO: 210726 - DNA, 1656 bp, Zea Mays
acgtgtcttctccgtcctgcgaactggcctctgccatccccgttgccaaaacaactcttccttcgttcagtgtcgaactatcgatgcggccgacccgcgcggcgtcgcgtgggggatgggcgttatacgagctgtacaggacaacgagccgcgtggcggcgccggcagtgctattgtggcggcgactgcaagggctggagcacccgacgcggtggccggagcggctaggacggccgtccgcggcgcggcctcggccgggctctccgctcgtgtggtttcatgccgtatcccttggcgagggaatggccgcgcttcccattgttcgccactgcgtccgcctccgtcccggcctccccgtgcttttcaccaccaccaccctctcctcgtccgaagttatcatggatctactccctgatggtgtcatatatcagtttgctcctcttgactgtcctactgcaatagatagttttattggatactggaagccaagtttggtacttcttctggaaagtgaactctggccaaacctcatcatgtctgcagcagcaaaagggattgcagtggctcttttaaatgcacgcatatcattgaaatccttcaaccactggtcgatgcctctaatgttcccattagtttctttgatgctctctaaactatcacttgttgtcccattgagtactattcaagctgttcgttttcagctgctacatacaccaccaggaatcatacattttgctggagatttaaaatatgctgttggagatgttaataccggggagaatcaggtcaaggaaataaaagatttgcaacggcagtttagcaataggcccctctggatggctgcttctattcacagaggtgaagaagaagtcatcctccgcattcatgaagagttggtcaacgtgtatcccgttctactactaattcttgtgccaagacatcctgaagactgtaagaatatttccttggcactaaagaaacagaaggtcaattttgtgctgaggtcaactagggaagtggtctcttcaatcactagggtatatatggttgatactttaggggaattaagaatgctttacagggtcaccccaattgcagttgttggtggttcatttctacctggcttagccggccataatttttctgaggctgctgccgctggttgtgctgttatgactggaccccacgttggacacttctaccatatgctggtcgaaatgtggcaaataaatcctttagctgtcaagcaggtgtcaggagaatttgaactgctgcaaacactaaaagaactgcttggtgatgccagcactctgggagcacgtcaaagagctgcaaaagatgcattttcgattatgtcagatggagttgtgaaccgtgtatgggatttagtctgcaggctgggcattgattcccaaacaaatacgttgagcagttgacttagctgaggcttattcttgtaatctctgtgggactgtaggagtggaaatgcacagggagactgaaaccaaaaaccggcgattgtggcatgctggcgacctggtgagtgttttggggataggaaagcgggaatgggaaatggacacaatttcctcgaatgtatgccataggttggactgcaatttgcaaattgacctgaggtaaccaggtaccttttat

SEQ ID NO: 210727 - DNA, 1413 bp, Zea Mays
aaatgaatttcgaaataaataaataaaaagaaaaccctccataaccctaaggcccactaggggcccatctacctaaccctatcagtcgcgcgtccctggcttctctcccagccgcagccgccgccgccgcctctctctcccttccctcttctctctgccctcacctctctcccccttccatcgcctcgctagtaacaggtcaccgtgtgtgtgcgcgccatggggattcatctgtcgccgcctgccctcgccttctgcctctcggcgcccactcggttccagtggccgcttcgaggaggcgctcgcgcgcatcgaggagctccgggagcgcgacactggcgccgacgacagcagcacagcctcgtcgttcttgagcgacggagaggcggcgtcgcggctagcaggcaagcagcagtcgcactccgcagatttcttgagcgacggagaggcggcgtccggtggcattcagagacgtgcgtgacggtcggaggtcgtcgagcgcgtctagatagcatccaagacaaatagcgttgttggcgatctgaggcagctggtaggcagtctaggcttgggcgcacgcgagccagagagggagggctgggagcacgtcatctccaagagcagcgacgacgtctcctacaaggcctggtgcgacaagcccacgttttcggcgatgcgatgagggttttcggcgatccgtgcttgctagttgcgctctacgatcaggcggagggggtttgagatgtgaatattccactttttcattctagaacatcaaacctgagttgctctacgatcaggcggaggttgttttgtaagtactttgtttcagctatgatctgtgaggtagttgccaattgcgtacatgcattgcaacagatctgggctctagaagctgctaacttggtagcagaaagattgaggcattgcatagcaaaccactggatcaaagagtttagtgaatggccacagtgcatgttcttgagttggcatcaaagttccttccatataataataacaaaatatttgacataatgaatctgttggaggatagacttcaacatgcaaatggagccattgttttggcaacaattaaagtttttctccattcccatgactgttgttcatcaacagcaagagaagaaggaagacaagtcagacaaaacagaagacgagaagaactgatgtatccatgttcatgcttccactgttgaaatgcatattcaacatagcttgctcagctcctatctgttgtttcaacgttgatttaaaagaagagctggtagttgtgggcttttgaacaatagctggaatgatctagctagctatatgtaaatgatctagttgtgaatgatattataactgtgatgcttttgtgaatatataattgtggtgcttttgtgtttatgtgat

SEQ ID NO: 210728 - DNA, 1318 bp, Zea Mays
aaatgaatttcgaaataaataaataaaaagaaaaccctccataaccctaaggcccactaggggcccatctacctaaccctatcagtcgcgcgtccctggcttctctcccagccgcagccgccgccgccgcctctctctcccttccctcttctctctgccctcacctctctcccccttccatcgcctcgctagtaacaggtcaccgtgtgtgtgcgcgccatggggattcatctgtcgccgcctgccctcgccttctgcctctcggcgcccactcggttccagtggccgcttcgaggaggcgctcgcgcgcatcgaggagctccgggagcgcgacactggcgccgacgacagcagcacagcctcgtcgttcttgagcgacggagaggcggcgtccggtggcattcagagacgtgcgtgacggtcggaggtcgtcgagcgcgtctagatagcatccaagacaaatagcgttgttggcgatctgaggcagctggtaggcagtctaggcttgggcgcacgcgagccagagagggagggctgggagcacgtcatctccaagagcagcgacgacgtctcctacaaggcctggtgcgacaagcccacgttttcggcgatgcgatgagggttttcggcgatccgtgcttgctagttgcgctctacgatcaggcggagggggtttgagatgtgaatattccactttttcattctagaacatcaaacctgagttgctctacgatcaggcggaggttgttttgtagttgccaattgcgtacatgcattgcaacagatctgggctctagaagctgctaacttggtagcagaaagattgaggcattgcatagcaaaccactggatcaaagagtttagtgaatggccacagtgcatgttcttgagttggcatcaaagttccttccatataataataacaaaatatttgacataatgaatctgttggaggatagacttcaacatgcaaatggagccattgttttggcaacaattaaagtttttctccattcccatgactgttgttcatcaacagcaagagaagaaggaagacaagtcagacaaaacagaagacgagaagaactgatgtatccatgttcatgcttccactgttgaaatgcatattcaacatagcttgctcagctcctatctgttgtttcaacgttgatttaaaagaagagctggtagttgtgggcttttgaacaatagctggaatgatctagctagctatatgtaaatgatctagttgtgaatgatattataactgtgatgcttttgtgaatatataattgtggtgcttttgtgtttatgtgat

SEQ ID NO: 210729 - DNA, 880 bp, Zea Mays
tcaagaaatagcatccaagacaaatagcgttgttggcgatctgaggcagctggtaggcagtctaggcttgggcgcacgcgagccagagagggagggctgggagcacgtcatctccaagagcagcgacgacgtctcctacaaggcctggtgcgacaagcccacgttttcggcgatgcgatgagggttttcggcgatccgtgcttgctagttgcgctctacgatcaggcggagggggtttgagatgtgaatattccactttttcattctagaacatcaaacctgagttgctctacgatcaggcggaggttgttttgtagttgccaattgcgtacatgcattgcaacagatctgggctctagaagctgctaacttggtagcagaaagattgaggcattgcatagcaaaccactggatcaaagagtttagtgaatggccacagtgcatgttcttgagttggcatcaaagttccttccatataataataacaaaatatttgacataatgaatctgttggaggatagacttcaacatgcaaatggagccattgttttggcaacaattaaagtttttctccattcccatgactgttgttcatcaacagcaagagaagaaggaagacaagtcagacaaaacagaagacgagaagaactgatgtatccatgttcatgcttccactgttgaaatgcatattcaacatagcttgctcagctcctatctgttgtttcaacgttgatttaaaagaagagctggtagttgtgggcttttgaacaatagctggaatgatctagctagctatatgtaaatgatctagttgtgaatgatattataactgtgatgcttttgtgaatatataattgtggtgcttttgtgtttatgtgat

SEQ ID NO: 210730 - DNA, 872 bp, Zea Mays
gaacatccaagacaaatagcgttgttggcgatctgaggcagctggtaggcagtctaggcttgggcgcacgcgagccagagagggagggctgggagcacgtcatctccaagagcagcgacgacgtctcctacaaggcctggtgcgacaagcccacgttttcggcgatgcgatgagggttttcggcgatccgtgcttgctagttgcgctctacgatcaggcggagggggtttgagatgtgaatattccactttttcattctagaacatcaaacctgagttgctctacgatcaggcggaggttgttttgtagttgccaattgcgtacatgcattgcaacagatctgggctctagaagctgctaacttggtagcagaaagattgaggcattgcatagcaaaccactggatcaaagagtttagtgaatggccacagtgcatgttcttgagttggcatcaaagttccttccatataataataacaaaatatttgacataatgaatctgttggaggatagacttcaacatgcaaatggagccattgttttggcaacaattaaagtttttctccattcccatgactgttgttcatcaacagcaagagaagaaggaagacaagtcagacaaaacagaagacgagaagaactgatgtatccatgttcatgcttccactgttgaaatgcatattcaacatagcttgctcagctcctatctgttgtttcaacgttgatttaaaagaagagctggtagttgtgggcttttgaacaatagctggaatgatctagctagctatatgtaaatgatctagttgtgaatgatattataactgtgatgcttttgtgaatatataattgtggtgcttttgtgtttatgtgat

SEQ ID NO: 210731 - DNA, 697 bp, Zea Mays
gtaactaccgccaggtggtgacaacaatgcccttgggtccaagctataaggagcgcgagccacttccgaatccctagaacgtagtagggggcgaggtcgcgccgcaaccatgccgtgacaacattagaagtttgacggggtcgctgcactcgcgcccatattccacagttgttcggtggacaaggaggagttagggtcattcaacaacgattgaggatcgaacgcaggcacacactcgggtgtgagcgtcaccaggggccaatgaattgttcgccggagattgcagagcaccaccgagcctttttgctcgtggacggagcacgtcgcatcacgatcgtggacgtgcaagtaattgaggaacccggaactcaacagggggaaaactctgagcagaagttcgttgaaggtgaagagcaggtggccctagaggaagattactacgaagagttcgacgaggtctaggagtcatctcttaatcgacttgatggcgtcaaggaaataatattagtttgctttatttattatcagttattttgtaagacattctcgttatgtaataaagtttatgacatttatctctatacacttggtcatcatatgtattcttcttctttggcgcacatatgagacgcaccctgggtttgctccttaaatccgggtgtgacaataaaatatttgatgaatttcttaaaagtgg

SEQ ID NO: 210732 - DNA, 2214 bp, Zea Mays
actcccagctcaaccatttccagcctcaattagccgaggcccggcccattccttgcccacgtcatctttctgtctctccctctcatcgccgcgtcacgcacagccgccgccgtcgtgcgcgtgtgccggaacggccgcgtggatcctccgccccgtcccagcggcgacttgtccgtgcgaagatgctggggttctcgaccggacagctgctggtcgtcctcggggcctgctccgtcatgatgaagcccagtgatatggtgaagattgcgaggacggccgggcggatgactggaagagcggttgggcggctcatagtggctcgccggcagctggacgagattctgggccagtctgcagccacccaggttcataaggagcttaaagacgctatgacacaattagactcgatccgttatgaagtccagaacttatcaagattatctcctgggcagtttatgttgaagcaacataacgctggcatggctgaagcagggaaatctgactcctctgatggtcctacaaccaacgtatggtggtatatcattttatttcagttttagtccaagtacttgaagggcctggtgcaatgcaggtcgcgggttcgaagcagtctcctcatttgcggagaaggcttgtcttggttgattcgttccccaaaccccactcatatgggagcctccgtctgtccgccactgggtctgcccttttaatatgagtatttgaggtctaatggttgatatttcaacagatttaaaatgcttaaatgtgaatttgctataagtagcagcctgatgtgcctactatgacatacagatacagtctgttgtgtgacttcagtacagatacattttaggctgatatagtcctattctgtgcattctggccatgattcattttgaaattattccaaggcttaaaacatgcacaagaaacaatcacacgaaggatgtgcttttttaagttatgtgttgttcaatgttttttcacttttttgtagatagatcatagatctgagtgttgaccatgttgtggtcgccaatagctacatgatgttggaacttttcatttcaatgcttgcactgcacttgaaacattggttccttctacttgttaacttttggtttacttctttgtcaagagatatacttaatagagcttttatggcaatgcagcaagaagaatttcgtcaggaaattcgcagtataattcgcgatgaatttgaaaaatactgtagaacacagcccattcaaaactctgtgagcacaactgaacacagaaaacttcatgtggctgatgaaccaacggcactgaaatccaagatggctaattcaggattgacaaatctgcacaaccaagcaatgacgtatgcaaggctatctgaagccccaggacttaagatggattcttccttgagtgggaactacaaagatcaatctaaggagatggatgggctgctaactgtactgccaatatcagctgaaagtgctggattacttccaagccgcccagataaaccaacaggctcagatctagtccttgaggctgtgcttgaagcggaagttgcggagaacgctaaactgtttgtgtcgcagcctcatgatcagctacctaaggaatgaagacgaagatgatgtgcttgaagacgttgcaaacaggaccaaactgttcagctgacagccgcatggtcagttgcctacggagcgatgatggtagtttttgatccttaacaggatttggcatactaggcctgtttggtagagctctagaagttgatataccgatctggcgtccagcaccagcggtgtagcttgtagtcttgtaccctcaggcctcaactagccagctaggattcggatgccatggtagaaactggcgacatagcttgtagcctcaactagccaggtaggtttggctgccatagttgaggtaaagctgtggccggtgggcacgtagcttgtggcctcaaaaggagcaagaaagaaaaatagagtaaattagttgtggttatcaatgtgcatggtgattttaaagcttttaaggatgtcatctgtattctgtgtcctcgcaacactgatattctttgcaactctgagtagagagatacacggaatgttcagcttttcagatccattgatggtagtgttgtttttaatgttcccaagacttctgaggaagctgcaagagcaggaattgtgcatggcctccgagaacctg

SEQ ID NO: 210733 - DNA, 1499 bp, Zea Mays
taggcctgtgtgccgagtggaggtcatgggctatcgtaacctggttgttggcccttcataatttttcagattagcaggttctgaagcatctagcgccagatatatcatacaggagcttggttgcacttggtattggttgtataaatggtactcctgttgcttcatttgagaggcgggatgcagaccgtctattattcttttgcacaagtcagtgcaaagatttggctaatgaaaatggtccatattttcatcttccaagatggtcagcctcccttaccaaggacagaacaaaggtgggttcagaatcaaaacaaaatctgttgggtgcaaatggagttttggaagacaagaagcatatgatggaagggccttcctcatggtcagccgtcaaggctaaattaaagcctgcaactatgaggcccattcctcactctcgaaagcaacaaatgcatccatttatgggttttcctgaaacttcccttcacgaaactagtattgtgaagccaagcttgccagctgcaccaactgtgaagcacaattcagtttcttctgccacaaccacgcacagaaaatcaacatcagggccgtctcatactccctcagtcattcagttaaatcctctgccaatgaagaaacacggatgtgataggttgcctatccaagtgtgctctgaggaggattttttgaaggatgtcatgcagtttttaatccagaggggccacaatcgacttgtacctcacggaggactagctgaatttcctgatgcaatccttaacgccaagcgccttgatctttataacctgtacaaagaggtggtgtctagaggtggattttatgtgggtaatggcataaactggaagggtcaagttttttcaaagatgcgtaaccataccgcaacaaacagaatgactggtgtaggtaacacgttgaaaagacattacgagacatacttgttggaatatgagttggcacatgatgacgtggatggcgaatgctgcttactttgtcacagtagcgcacctggagattgggtgaactgcggtttatgtggtgaatgggctcactttggttgcgacagacgacaaggactaggcactttcaaggattacgctaagacagatggtttggaatacatctgcccccactgtagcttagcaaactacaagaagaagccaccaccaccaaaagcagctaacggtttttcaaatacagcatctgtaccacgaaatgcttaattttcttgttttttttttcttttcctttggtcccatgtttatgggaagaatcattagagtagataataggctgatggaaagatgggcaaggccttccaggtatgtagtagtattcgaatgtatcatctcgttaatttagtggttattatgaggcttatataacatgtaacaactgataacacagacaagctcctacagtagttggttagatgctggtgtaagcttcttgtttatattaatctcaattgtgtttttagtttccct

SEQ ID NO: 210734 - DNA, 1469 bp, Zea Mays
ttctccttgacgccagaacaagaggcgtcaacgtcaatttggttgtgctggttcagttttgtcagagctctttttcattcttgcaagcaaatttccgcagctgaatatctgatatgggtgaaaccatgggaaggagaacagtcagtggccttcttgtcaccaaaggaggctcaattcttgtcttcagggaggaaagcccacgccacaaggccaccgcatgttgtacccgcctctggtgcagcagtaagcttttcccgaacaaagacacgaatacacgcagggcatccagggaaacatcggctcttcagagatcacaagtgtctaggaaatccaactggatgtcccatcaaggaagtatttcttatgatcgaagcaccagtaggaatacagcaagtacttttggtgagactcacaacaaaccaagagaaaaagaaaatctcgggtgtgatctaccggctcggttgaaagaaaggatcaatacatccaggaaaagctcattgggtggactgggaagtcctaacaaatcatcaacaaacacatcaagcagtagccgatcggtttcaagatcagtatgtcggccagcatcgagaatgagaaaggatggaggaaggggcgcagaatctatgaggatgcatagagccagagatagtggtggtagctcttggggagatgtgttgacaagaaattctgaccaagattcttcacacaggtctctatctcgaaacgtgttgaggcataggagcagatctcagcaagggccaatatcatcattggaggataatttagatgattccagtgaatactggcattttgatacagatgacagtgaagaggttgaggatgactatgcctttaatgatcagcataggggaatgagaatggacattgataacatgtcttatgaggacctacttgcgcttggggagagaataggtactgtaagcactggtctttcagatgatgcgctttctgagtgtctgaagagaaacctctatgtgcccacaacttcaagcagcaatgaagatggtgacatcaaatgcatcatatgtctggaggagtactcttctggtgtggaggtggccaagatggcatgcgagcattactaccataccacttgtatccaacagtggcttcagcaaaagaactggtgcccgatttgtaaatgtgacgcttctgccattagctcatagtgttcttgacagtaacagaagtatcagttcattgtaatcaaataggattacacaagtttttttggttctagaacaaattattcacttcaatcctatactgctcttcaattcacactacacttgtcataggaagcaggaaaataagtcctagaagaaaggattttctcagttttgatgttgaagttgaagagtagatgatagtgttgccattctttacatacaaaagcgtcaaaaattcagcattaatagtgcagtttttgtttgccatcgttttcacta

SEQ ID NO: 210735 - DNA, 2580 bp, Zea Mays
ctctttcgcaacaacacaatttttgggacatgaatgacatccatttatagtcttttcatgccattgtctctcttgtttatctcaaggtcattccaaatttgaaaggaccaagcaatgttccaatacattattgctctgattcttgtcgccattttggtggtgtctatgaacaagtctgttgatgcccgcatggtccaccccattgtcacccctgaggccatcagcccctctctcgcctccaacgatggtcgtcgcctgatcggcaccaccggccacgatgaactcgtagcgttatgccaacagatgcactacaagacattatgcaccacgatgacgacgctgcccggggtgatgacaccagagcagttattggacgcatctctgcggattacagcggtgaaggcggcgatgacggagatgaagctagaccaggcaataaagtcaagcagtgcccagggtaacgcgatgatgtcatcacttgagacgtgtaaggagagctatgcgtcgctggtggactccatcaataccacgcggaacacgctcaagagcggcggtagcaatgcagacatcatgtcggagctatccgcggcggccaccttctccactgactgcgaggacaccttcgatgagcggccagagctcaaatcgcccatacctggggcgcagcgccacgttagccgcctcgtcagcaactgcctcgacctagcagccaccatcatggaccagccctagacgcctatgcgtgcattgacgcggtgcaaacatggtctaaaatgcaattgtagctgaagatcatctaggtatgtatagttaacccagagagaataggatttttataagaattaaagtatcttcaagattatttcttacttcattctctaaattattatttaaatagtcatttaaataaaaattgatctctatatttttgcttttgaatagattttatatggctcctctttggttggacttttcaacatgctttggtttctaaaaagtcaaaagccaataaaaggaatttgttctcactcaaagccagagccaaaatccatttttgagtggttcaaatttcataacagcctcctcctgctttcacatgatgtggagttaggaaagtctacaaaatcagtcacctatcactagttatgaaagataccaattcattttttccaccgagcgactcaacttcatcctccatcttatgaatgagaacatcactagcgggaggtccatgcatggacctgccccagcatgggcataaccccaatgcatagccctgccctggtataggtgtggctcaggtagtggccctggtgcggtcgtggcacatggcccttacctaacctcacaaccctatgcaacccctcgggcgagtagctttgacacaagtgatagaatccagatctacagaggatacaaatagaccataaacattcatttcaatgtcatgaaataactagagcaatgttaattagtataagaggtgatgtagaatcagataccttctctagctctatttcacaacaagcaatccccttaaataattctagtaactctcaagcacacaatttagcaactattaaattttactagacatatattaagaggtctaaatacaactagtaacaaaaaaactcctcgcaaacacaaggttgacttgtcccttgtggttggggttgatgatgagtgattgtcaacggatagcactctggttagtcagtggactgaccagagtgtgagattatgcttgtggaaccatgttggtctgcttgtggtgtgcagggtggagcaccgagacaatggtcgacggctgaggacagaggtgaaggtcatacaggctcgtgttgatcgaccaggagcggtgaagggtgattttttgggtcttgactgatggaccagagcaatcgggtgaccagtcatggtgggtgacacttgagacacgcactcgtgcgaggacatggtggagtggactgtgttgccggcatggtcgaggactagcgagacacacgtcttgtcgtggtggacgcacacgtggtgcgggactcacaatgggtttggtggtttgggcctcaaaactacctagggtatggatggcaggtgttgctgagtttgggcctcaaaacttggttgtagcgattctggaggtaaccggtggtggcacatggcatcacagtgaaaggtgcgtccaggcgaagcaacttcgtgtggagagcgtggtcatcggatcaaaaacctaggagttgtttcatttcgcccccggtggagtgggtaggctctatgtaaatagggtgagtttaggaagtgtaaataaccatctataaatagagaggcatgttgtttagttcagtatcacttggttgtcatttgttttggtttagggttttagtacacatatttcctatctctagacatctctagcttttagacaagaatccacaacaattttgtacttcgactgtgtttgtgctcttcaagtttaatccgaggaagggtcgtcggtacggcccacaggttttggtcacttctcaatctcagtttttgcacccttgctgaaattctgaagttttgtgttcttggttg

SEQ ID NO: 210736 - DNA, 2590 bp, Zea Mays
ctctttcgcaacaacacaatttttgggacatgaatgacatccatttatagtcttttcatgccattgtctctcttgtttatctcaaggtcattccaaatttgaaaggaccaagcaatgttccaatacattattgctctgattcttgtcgccattttggtggtgtctatgaacaagtctgttgatgcccgcatggtccaccccattgtcacccctgaggccatcagcccctctctcgcctccaacgatggtcgtcgcctgatcggcaccaccggccacgatgaactcgtagcgttatgccaacagatgcactacaagacattatgcaccacgatgacgacgctgcccggggtgatgacaccagagcagttattggacgcatctctgcggattacagcggtgaaggcggcgatgacggagatgaagctagaccaggcaataaagtcaagcagtgcccagggtaacgcgatgatgtcatcacttgagacgtgtaaggagagctatgcgtcgctggtggactccatcaataccacgcggaacacgctcaagagcggcggtagcaatgcagacatcatgtcggagctatccgcggcggccaccttctccactgactgcgaggacaccttcgatgagcggccagagctcaaatcgcccatacctggggcgcagcgccacgttagccgcctcgtcagcaactgcctcgacctagcagccaccatcatggaccagccctagacgcctatgcgtgcattgacgcggtgcaaacatggtacatacatgtctaaaatgcaattgtagctgaagatcatctaggtatgtatagttaacccagagagaataggatttttataagaattaaagtatcttcaagattatttcttacttcattctctaaattattatttaaatagtcatttaaataaaaattgatctctatatttttgcttttgaatagattttatatggctcctctttggttggacttttcaacatgctttggtttctaaaaagtcaaaagccaataaaaggaatttgttctcactcaaagccagagccaaaatccatttttgagtggttcaaatttcataacagcctcctcctgctttcacatgatgtggagttaggaaagtctacaaaatcagtcacctatcactagttatgaaagataccaattcattttttccaccgagcgactcaacttcatcctccatcttatgaatgagaacatcactagcgggaggtccatgcatggacctgccccagcatgggcataaccccaatgcatagccctgccctggtataggtgtggctcaggtagtggccctggtgcggtcgtggcacatggcccttacctaacctcacaaccctatgcaacccctcgggcgagtagctttgacacaagtgatagaatccagatctacagaggatacaaatagaccataaacattcatttcaatgtcatgaaataactagagcaatgttaattagtataagaggtgatgtagaatcagataccttctctagctctatttcacaacaagcaatccccttaaataattctagtaactctcaagcacacaatttagcaactattaaattttactagacatatattaagaggtctaaatacaactagtaacaaaaaaactcctcgcaaacacaaggttgacttgtcccttgtggttggggttgatgatgagtgattgtcaacggatagcactctggttagtcagtggactgaccagagtgtgagattatgcttgtggaaccatgttggtctgcttgtggtgtgcagggtggagcaccgagacaatggtcgacggctgaggacagaggtgaaggtcatacaggctcgtgttgatcgaccaggagcggtgaagggtgattttttgggtcttgactgatggaccagagcaatcgggtgaccagtcatggtgggtgacacttgagacacgcactcgtgcgaggacatggtggagtggactgtgttgccggcatggtcgaggactagcgagacacacgtcttgtcgtggtggacgcacacgtggtgcgggactcacaatgggtttggtggtttgggcctcaaaactacctagggtatggatggcaggtgttgctgagtttgggcctcaaaacttggttgtagcgattctggaggtaaccggtggtggcacatggcatcacagtgaaaggtgcgtccaggcgaagcaacttcgtgtggagagcgtggtcatcggatcaaaaacctaggagttgtttcatttcgcccccggtggagtgggtaggctctatgtaaatagggtgagtttaggaagtgtaaataaccatctataaatagagaggcatgttgtttagttcagtatcacttggttgtcatttgttttggtttagggttttagtacacatatttcctatctctagacatctctagcttttagacaagaatccacaacaattttgtacttcgactgtgtttgtgctcttcaagtttaatccgaggaagggtcgtcggtacggcccacaggttttggtcacttctcaatctcagtttttgcacccttgctgaaattctgaagttttgtgttcttggttg

SEQ ID NO: 210737 - DNA, 3829 bp, Zea Mays
ggagaagcgcttctgggtggcctccttcctcgtcgtatgggcagcagcgctgcagggccacatgatgtggatgcagcgccaggacaccttcaagcacaagtttggtatcgaccaagcagacggacccgatgctcaggattcctcatcttcgtcttcgtcttcctcttcttagtaggtcagttaccttgtatcgtctgaagcggtttgttcggaacaaatgagacatccatcctttaataaagcgggcgggagagaaggcagatgacaagacaagtgcagtgtgtgtaaccactaccaggcgttcctttgatgaatgtcatttttcttctctttagtcctgaataaattctgataccatatcttttgggtgtgggatgcaaaactctgctagcttatcattgccacaaactcatgtatttgagttgtgttttatagattgaagtgcactttccagcaggtttcatagactggacagtggactgccgttggttgtctctcggtgagtgtggaacccactttcatcacaatccttaagcacatccatccctacaggatcagtcagcctgactattccataactcctgaaatatttgagaaacaagtggggcgatttcatatttcattctacaagtgtagtgtgcctgaatattacctggaaccagcaggtaggaccaaaagcaattaagaacaaaggaaccacagatggatgccaggcacaaggcactttatgtacaagtgtagtagctattagcaaaggacacttgcctggttggatctgtgggtgcgaccacaaatgcacagtctctggtagcatgacctatgggaatccatcatttttcattaataaaaaaagttaaagacacggcaaagtgtgataacaaatttaaaacaggtgaaatactcagttctaagttggcactgtgtcacacaagtatctaacaattctgcaatgggctaataggaccaagaaatgttaaatgcatgcagatgcatacattgtcgagaacaacattggcatcaatccccaagtctctcagcaattggcacaacacgttcaggtcgactgaaaacttcattaatttgtagacaaaatataaactcttgagagaatcagcttgacaaattactcccaaagatacaatgttcctttagtgtcaatgtaggcaaccttcccatttcccacatgcatgtggattggaagttgcattctcatcaatcagaaataggaaagtagttccgttgcttctttgtttctcaaattctattgcgtctatggtccacgtgctttctaaaaaaattgatacaggggtgaacctgagtggagacacatagggtatgagccaactgggtcttccctgacctgcaggacaaccaaataacatacattttaaactaaaaaaagccagaactgaactcagaaatatagttacagtagcatatcataagtcaccgttcactgtgactattcacagtaaatactcaagacagtttctttcatttgcatgtaagaggtatgtgcacaattgtgttgtatgcaatggcaattgctcctaataccagcgatactatacaacaaataattgtctcatgtactgttcactttacagatcccattttaatttcattgtcattaaagaatcactttgcatcaaagaaatggtgagaaattgtattcatgtggttaagttagcaaagcaaaaacatgattagaaactacaaggtgagaaattttgtcatctttagtatgtagttattgaaaatgttttttttatctatcacctttatagtatttgcgagccaactccagggaagagaagcgagatttatttattttttgtcgtttttgactatgtggtgcaccaaataaatgaaacacgcttggctggtggtattacgacctatacttatgatgatgcccagcgccccagccccttgcttcccttcttgcatttgctgatgctcctgaagccttctacatatccgtgaagcatggcgttgaaggtgccggaggaaaagctatatcagcagcattattgcagtctgctcattacgatcagttgaatgtgcttctggacaaggttataacgaaacttgatggaactgcctgcacatttccaggattgacaatgagttttcttatatgattcaagtaacgaagtcatgcaagtgttttagcagcattatagattaatgtgatgatactgatgtcacacttagagccaggctttgctaggcagctttgcgttcacttcttcactcacagatttcatcatataggcaccatggctatatttggttagttgagttgctcctttcaaaaaacttgaagaaatagatggttctatatggtctaaaatccaaaagcttctagaggaaattggagttgccggtagccaagacctatcatgttcagaagtctctctgcctgtttgtatgctttgtggacttctaaagtcaaagcacaatttcattaggttgggattcctgtatgtgctggacaaatttcttatgcgttgcaaactattattggatgacagtgatatgcaagaccacacaacttctgatcatagcaagaattgtcttgataaagcttttgcagttatagatattatgaatagttctttgttacttgtggttcaggacaatgagacggaccatatcaacatcttaaagatgtgtgatatgctgttccctcaattatgcctgagaattccatccacaaatgcgatgcatgtcaggggccttcagtcccttggtcaactttttggttgtacatccaagaacatcgataatcatttggatgcccttgcatcacaccaaagtgttggaaacaagaatctttgccagagtgagacattgcaagatatgggcatggatcaatctggtcaacccactttattctgcgaagcatcaatggcaacactactgagaggacttgcaatagctcccattcagcttagcccgtgtaccaacttctttatttttctggccattgatacagcctgaaggggcagccagcgatgacattgcattgggtattgctgttggtagcacaggaagaggcaaccttcctggttctacatcagatattcgagcagcgcttcttttacttttgattggtaaatgcacagctgatcaggaggcactaaaggaggtagaaggcaatggggttcttcaggggccttctggatgacacagattcaagggtagcatatactattctgctgcttttcttttgaagagaatgatgacagaggaactagagatctaccaacggatgcttgaaagcctcatctcaaaagctcaacagatgctatgcgtgtgtttggttgcaggtcctgtggtagcctggcttactacatgccttcccgcatggagatggttgagcatacatgcatcgatgcaagttacgtatttgtgaaagtcttttacctgcatgcagggatacgcgtgaaatggccgtacgtgatgggccatgctcacatgagcccggctacacggacaggcatccaatcaccacctatgtgaatgatgtaaattatcgatgggggcatgtacatgcctctgaatttgtttgtttattctttgttagactagtcactgtccaagagagtcactgtggataatcctgtgttatggacagagacacaattctacaattttgtattgctgaaccattcattgagatcttgcatttgcatgtatggtaactgaccaaaggcgtgtatgtttgtaattgctgattttttttttgcaatttagccctttttcgaaacaattttacgtttggatctctaaatgatataatgttatttttggaccctttatt

SEQ ID NO: 210738 - DNA, 3825 bp, Zea Mays
ggagaagcgcttctgggtggcctccttcctcgtcgtatgggcagcagcgctgcagggccacatgatgtggatgcagcgccaggacaccttcaagcacaagtttggtatcgaccaagcagacggacccgatgctcaggattcctcatcttcgtcttcgtcttcctcttcttagtcagttaccttgtatcgtctgaagcggtttgttcggaacaaatgagacatccatcctttaataaagcgggcgggagagaaggcagatgacaagacaagtgcagtgtgtgtaaccactaccaggcgttcctttgatgaatgtcatttttcttctctttagtcctgaataaattctgataccatatcttttgggtgtgggatgcaaaactctgctagcttatcattgccacaaactcatgtatttgagttgtgttttatagattgaagtgcactttccagcaggtttcatagactggacagtggactgccgttggttgtctctcggtgagtgtggaacccactttcatcacaatccttaagcacatccatccctacaggatcagtcagcctgactattccataactcctgaaatatttgagaaacaagtggggcgatttcatatttcattctacaagtgtagtgtgcctgaatattacctggaaccagcaggtaggaccaaaagcaattaagaacaaaggaaccacagatggatgccaggcacaaggcactttatgtacaagtgtagtagctattagcaaaggacacttgcctggttggatctgtgggtgcgaccacaaatgcacagtctctggtagcatgacctatgggaatccatcatttttcattaataaaaaaagttaaagacacggcaaagtgtgataacaaatttaaaacaggtgaaatactcagttctaagttggcactgtgtcacacaagtatctaacaattctgcaatgggctaataggaccaagaaatgttaaatgcatgcagatgcatacattgtcgagaacaacattggcatcaatccccaagtctctcagcaattggcacaacacgttcaggtcgactgaaaacttcattaatttgtagacaaaatataaactcttgagagaatcagcttgacaaattactcccaaagatacaatgttcctttagtgtcaatgtaggcaaccttcccatttcccacatgcatgtggattggaagttgcattctcatcaatcagaaataggaaagtagttccgttgcttctttgtttctcaaattctattgcgtctatggtccacgtgctttctaaaaaaattgatacaggggtgaacctgagtggagacacatagggtatgagccaactgggtcttccctgacctgcaggacaaccaaataacatacattttaaactaaaaaaagccagaactgaactcagaaatatagttacagtagcatatcataagtcaccgttcactgtgactattcacagtaaatactcaagacagtttctttcatttgcatgtaagaggtatgtgcacaattgtgttgtatgcaatggcaattgctcctaataccagcgatactatacaacaaataattgtctcatgtactgttcactttacagatcccattttaatttcattgtcattaaagaatcactttgcatcaaagaaatggtgagaaattgtattcatgtggttaagttagcaaagcaaaaacatgattagaaactacaaggtgagaaattttgtcatctttagtatgtagttattgaaaatgttttttttatctatcacctttatagtatttgcgagccaactccagggaagagaagcgagatttatttattttttgtcgtttttgactatgtggtgcaccaaataaatgaaacacgcttggctggtggtattacgacctatacttatgatgatgcccagcgccccagccccttgcttcccttcttgcatttgctgatgctcctgaagccttctacatatccgtgaagcatggcgttgaaggtgccggaggaaaagctatatcagcagcattattgcagtctgctcattacgatcagttgaatgtgcttctggacaaggttataacgaaacttgatggaactgcctgcacatttccaggattgacaatgagttttcttatatgattcaagtaacgaagtcatgcaagtgttttagcagcattatagattaatgtgatgatactgatgtcacacttagagccaggctttgctaggcagctttgcgttcacttcttcactcacagatttcatcatataggcaccatggctatatttggttagttgagttgctcctttcaaaaaacttgaagaaatagatggttctatatggtctaaaatccaaaagcttctagaggaaattggagttgccggtagccaagacctatcatgttcagaagtctctctgcctgtttgtatgctttgtggacttctaaagtcaaagcacaatttcattaggttgggattcctgtatgtgctggacaaatttcttatgcgttgcaaactattattggatgacagtgatatgcaagaccacacaacttctgatcatagcaagaattgtcttgataaagcttttgcagttatagatattatgaatagttctttgttacttgtggttcaggacaatgagacggaccatatcaacatcttaaagatgtgtgatatgctgttccctcaattatgcctgagaattccatccacaaatgcgatgcatgtcaggggccttcagtcccttggtcaactttttggttgtacatccaagaacatcgataatcatttggatgcccttgcatcacaccaaagtgttggaaacaagaatctttgccagagtgagacattgcaagatatgggcatggatcaatctggtcaacccactttattctgcgaagcatcaatggcaacactactgagaggacttgcaatagctcccattcagcttagcccgtgtaccaacttctttatttttctggccattgatacagcctgaaggggcagccagcgatgacattgcattgggtattgctgttggtagcacaggaagaggcaaccttcctggttctacatcagatattcgagcagcgcttcttttacttttgattggtaaatgcacagctgatcaggaggcactaaaggaggtagaaggcaatggggttcttcaggggccttctggatgacacagattcaagggtagcatatactattctgctgcttttcttttgaagagaatgatgacagaggaactagagatctaccaacggatgcttgaaagcctcatctcaaaagctcaacagatgctatgcgtgtgtttggttgcaggtcctgtggtagcctggcttactacatgccttcccgcatggagatggttgagcatacatgcatcgatgcaagttacgtatttgtgaaagtcttttacctgcatgcagggatacgcgtgaaatggccgtacgtgatgggccatgctcacatgagcccggctacacggacaggcatccaatcaccacctatgtgaatgatgtaaattatcgatgggggcatgtacatgcctctgaatttgtttgtttattctttgttagactagtcactgtccaagagagtcactgtggataatcctgtgttatggacagagacacaattctacaattttgtattgctgaaccattcattgagatcttgcatttgcatgtatggtaactgaccaaaggcgtgtatgtttgtaattgctgattttttttttgcaatttagccctttttcgaaacaattttacgtttggatctctaaatgatataatgttatttttggaccctttatt

SEQ ID NO: 210739 - DNA, 4305 bp, Zea Mays
ggagaagcgcttctgggtggcctccttcctcgtcgtatgggcagcagcgctgcagggccacatgatgtggatgcagcgccaggacaccttcaagcacaagtttggtatcgaccaagcagacggacccgatgctcaggattcctcatcttcgtcttcgtcttcctcttcttagtcagttaccttgtatcgtctgaagcggtttgttcggaacaaatgagacatccatcctttaataaagcgggcgggagagaaggcagatgacaagacaagtgcagtgtgtgtaaccactaccaggcgttcctttgatgaatgtcatttttcttctctttagtcctgaataaattctgataccatatcttttgggtgtgggatgcaaaactctgctagcttatcattgccacaaactcatgtatttgagttgtgttttatagattgaagtgcactttccagcaggtttcatagactggacagtggactgccgttggttgtctctcggtgagtgtggaacccactttcatcacaatccttaagcacatccatccctacaggatcagtcagcctgactattccataactcctgaaatatttgagaaacaagtggggcgatttcatatttcattctacaagtgtagtgtgcctgaatattacctggaaccagcaggtaggaccaaaagcaattaagaacaaaggaaccacagatggatgccaggcacaaggcactttatgtacaagtgtagtagctattagcaaaggacacttgcctggttggatctgtgggtgcgaccacaaatgcacagtctctggtagcatgacctatgggaatccatcatttttcattaataaaaaaagttaaagacacggcaaagtgtgataacaaatttaaaacaggtgaaatactcagttctaagttggcactgtgtcacacaagtatctaacaattctgcaatgggctaataggaccaagaaatgttaaatgcatgcagatgcatacattgtcgagaacaacattggcatcaatccccaagtctctcagcaattggcacaacacgttcaggtcgactgaaaacttcattaatttgtagacaaaatataaactcttgagagaatcagcttgacaaattactcccaaagatacaatgttcctttagtgtcaatgtaggcaaccttcccatttcccacatgcatgtggattggaagttgcattctcatcaatcagaaataggaaagtagttccgttgcttctttgtttctcaaattctattgcgtctatggtccacgtgctttctaaaaaaattgatacaggggtgaacctgagtggagacacatagggtatgagccaactgggtcttccctgacctgcaggacaaccaaataacatacattttaaactaaaaaaagccagaactgaactcagaaatatagttacagtagcatatcataagtcaccgttcactgtgactattcacagtaaatactcaagacagtttctttcatttgcatgtaagaggtatgtgcacaattgtgttgtatgcaatggcaattgctcctaataccagcgatactatacaacaaataattgtctcatgtactgttcactttacagatcccattttaatttcattgtcattaaagaatcactttgcatcaaagaaatggtgagaaattgtattcatgtggttaagttagcaaagcaaaaacatgattagaaactacaaggtgagaaattttgtcatctttagtatgtagttattgaaaatgttttttttatctatcacctttatagtatttgcgagccaactccagggaagagaagcgagatttatttattttttgtcgtttttgactatgtggtgcaccaaataaatgaaacacgcttggctggtggtattacgacctatacttatgatgatgcccagcgccccagccccttgcttcccttcttgcatttgctgatgctcctgaagccttctacatatccgtgaagcatggcgttgaaggtgccggaggaaaagctatatcagcagcattattgcagtctgctcattacgatcagttgaatgtgcttctggacaaggttataacgaaacttgatggaactgcctgcacatttccaggattgacaatgagttttcttatatgattcaagtaacgaagtcatgcaagtgttttagcagcattatagattaatgtgatgatactgatgtcacacttagagccaggctttgctaggcagctttgcgttcacttcttcactcacagatttcatcatataggcaccatggctatatttggttagttgagttgctcctttcaaaaaacttgaagaaatagatggttctatatggtctaaaatccaaaagcttctagaggaaattggagttgccggtagccaagacctatcatgttcagaagtctctctgcctgtttgtatgctttgtggacttctaaagtcaaagcacaatttcattaggttgggattcctgtatgtgctggacaaatttcttatgcgttgcaaactattattggatgacagtgatatgcaagaccacacaacttctgatcatagcaagaattgtcttgataaagcttttgcagttatagatattatgaatagttctttgttacttgtggttcaggacaatgagacggaccatatcaacatcttaaaggtaaattccttattgtcttaaaatttcggtgcacatatcaagcatacatacaagtcagcatcatttacgtatggtatcagttgccttacaagttaaaggtgacttaagttttcaaaaaagtggatcggctacacccttctttcttttagtgttaaaaaacatatttgggttagtcctctttctgttcagtaggttttactgcatgcaacaatcgttcaatcacaaaggattttatgataaagttcgatgaattaggcttttcaagtttcaatgttcttaatctcagaattcaaaagtaattaataatgtacatactattactttcctttattattgattaaaaattagaaaagattgtttggaatcggttgaatttcttcaaatcggtttattattctggacctcctacataatgaggtactgaaatttacaccgatagcctaaaattgattatctgtgattcacaccttcctctttcagatgtgtgatatgctgttccctcaattatgcctgagaattccatccacaaatgcgatgcatgtcaggggccttcagtcccttggtcaactttttggttgtacatccaagaacatcgataatcatttggatgcccttgcatcacaccaaagtgttggaaacaagaatctttgccagagtgagacattgcaagatatgggcatggatcaatctggtcaacccactttattctgcgaagcatcaatggcaacactactgagaggacttgcaatagctcccattcagcttagcccgtgtaccaacttctttatttttctggccattgatacagcctgaaggggcagccagcgatgacattgcattgggtattgctgttggtagcacaggaagaggcaaccttcctggttctacatcagatattcgagcagcgcttcttttacttttgattggtaaatgcacagctgatcaggaggcactaaaggaggtagaaggcaatggggttcttcaggggccttctggatgacacagattcaagggtagcatatactattctgctgcttttcttttgaagagaatgatgacagaggaactagagatctaccaacggatgcttgaaagcctcatctcaaaagctcaacagatgctatgcgtgtgtttggttgcaggtcctgtggtagcctggcttactacatgccttcccgcatggagatggttgagcatacatgcatcgatgcaagttacgtatttgtgaaagtcttttacctgcatgcagggatacgcgtgaaatggccgtacgtgatgggccatgctcacatgagcccggctacacggacaggcatccaatcaccacctatgtgaatgatgtaaattatcgatgggggcatgtacatgcctctgaatttgtttgtttattctttgttagactagtcactgtccaagagagtcactgtggataatcctgtgttatggacagagacacaattctacaattttgtattgctgaaccattcattgagatcttgcatttgcatgtatggtaactgaccaaaggcgtgtatgtttgtaattgctgattttttttttgcaatttagccctttttcgaaacaattttacgtttggatctctaaatgatataatgttatttttggaccctttatt

SEQ ID NO: 210740 - DNA, 1397 bp, Zea Mays
cccccccccccaaccccccaaaaaaaaatccggtcgatcctagctcgcgatgttctccggcaccggaccctccggcggggcagcccactctacgtccaccggtggtgggggtggctcgccttccgacaggggcggccccgcgccctcggcctcggcgtcggtctccacgccagccagcgagagcaccgtcgcccgccgcctaaacggacttgacccccacggcgacgacgctccatcgtcgcagccagccacgagcaagaagaaaaagagaggggcacgagcagttggtcctgacaaaaatggccgtggattgcgtcaatttagcatgagagtatgtgagaaagtcgaaagcaaagggagaacaacctacaatgaggtggcagacgaactggttgctgagttttcagatcccaatattaatattgactctccagatcctgataattcgtctgcgcaacaatatgatgagaaaaatatccgaagaagagtttatgatgcgctgaatgtcctaatggctatggaaattatatctaaagataaaaaggaaatacagtggagaggtctgcccaagacaagtatgaatgatattgaagaactgaagacagaggtcaatggactgaaaggtcggattgacaagaaaaatgcatatctgcaggatttacaagatcaatatgcatgtctgcaaaacttggttcggcgaaatgagcagctatatgggtcaggagatgcaccttccggtggagtggccttgccatttatactagttcagacacgtcctcatgcaactgtagaagtggagatatcagaagatatgcagcacgtgcattttgatttcaataggatgattcatttgtactgaaagcaatggcattatctggcgaagaagctgattgtacccaagctcctggtgcgaatggaggcgagtgctcaagtacacggaacaattattggcaccaccaccaacaaccgcagcctccagggccaagagtagttagggtaccaaactcgcctcctattccagggatactaaaagggcgtgtcaagcatgaacactaggcttcaatatgcttagtggtgtcaaatgagctatttactttattgtccccagctagttttacctgtagaaaatgcatgtaaattatgcctgtaggggcagccgcagtctaatttgacttcgctgatggatagttcgatttgtgtcatgatatgccatacgcctagctcacgttaactcctagtattcagttgtttggtcgaggaaaagagtctgtggttaagtgtaattgtgtagtttatcttcaaacagtcggcatatcgtatctatgggacgatttgaggaacagtgttgtcagtacactccaattgatatacaataaaatgcaaatgtttgtttacag

SEQ ID NO: 210741 - DNA, 1590 bp, Zea Mays
ctcttcctctgctctgctacattcttgctcttcttcctctgctcttcttattcactcactgctaccaaaactgaacgtacattgtaactaacctcaacaacaggccgaacacttccgccagcagcttctaaagcccgcgacttagattctgccttcatcacccaaacccaaactaaccgaaacaattttgttttcgaccacaaaaaatagcaatctctcgaatttctccatttctttccgacgaccaagaggcgggaaacctcacaaaggccagaaaccaagcaacacttcacgatgcagggagatcccgggtacggctacggtagctacgggtacgggtacggctacggttacggagccggcgccgccggctacgactacgacatggccggctacggcagcggcggagccgcctactactcggcgaccgaccggtatcccgccgcgacggcagctgcctatgaggacccgctcgtcgctggtcagaggcagcacgacgtgcccgcgccgctcacggggctggagttccaggcgtccgacacgtgccccaagaactacgtcatcttcgaccatacgtacgaccggagccgggtcatgttccacccgtccctggccaacaacttcgcctcctcccccgccgccggcggcggcggcgggtacgactacgaccgccagtgctacggcggctacgaccagaactacgccggcaagagcgcctactacgtctgcgccgccgccgccgccgacgacgacggcggcggggcctcgatacggcagaaggaggacaccgacgagatcgacgccctcatgagcacggaggacggcgaggacgacgacgacgacgacgtcctcagcacaggccgcacgcccgggtgccgtgccgccggctcccccgactctacgtgctcgtccgggtacgctgccgccggcgccggtggcggcgagaagaagaaggaacggatgaaaaagatggtgcggacgctcaaggggatcatccccggtgtcgaccggatggacacgccggccgtccttgacgaggccgtgaggtacctcaagtctctcaaggtggaggtcaagaagctcggcgcgcgcgggtcaagcagctagctaagcgcgctggcctcgtcggtatgcggcggcgaccatgataatgtaatggcagtcgaaatccctctcttctttctcggcatcggcagctacgacaagccagtcggtgaacaatacatgcggtgatgacgacaagggacagcttctcatcttggcctcagatgcacgtgctctgtttgcaccgacaggatcaggacatggcttcggagagagctcggttgcagggcgctcggcaatcttttgtggtggctctgccacctctagcgttcgtgcgtgcatggattgttacatttcttccttcgtatctctttcgtatctcttgatacctcgtggctggtgttgtaactatcatgctgatgatatatatatacacacaccgtgttcttttgttatattgggctctgcagtttggagccatcttcttaattctttttagtacctggtctcggatggatcatatattattaaaagacaaaagtttcg

SEQ ID NO: 210742 - DNA, 695 bp, Zea Mays
ttatgtgggcgcattcggcactgggtctgccttcattgctaggttgctacacagtatctattaccagagctagctggcaagagcttgaccccaaaacttagcgttgttgttgccgatgcttttgttactagatttggaagctatgctggttgggcacaaaacgttctcttcattggccagctaccaactcaaaaagttgttgtggctcaagttaccagtgacaatggtaccacaaagcctaccaaaaggaagcgcagggtgcaaccggaaccatgttgagggagcatggataccagcgatagtgggtttgccattcttctgtgttattctcgttcagtaagaatgtaagatgatgtaatatgaccatgacgaatgatcttttctgctgaacaggcattaggttgctcctgatcacactaacatatttgctgtcagcttgtaacatataggaatgcctgactcattacattatgagttctattttcatatgtgggcattgtgttgtttcttcgttagcctgcccgtgcatcttccacaaaaacatcaggatggaagcgggggcacatgtaaccgtgttgtgttgttatttaaacagcgatgagggattcagttgaaagtattgggtcaatagttctctgtaacctttgcacccagctataccatcccgtgctgccaggccggcttcttctgatgaa

SEQ ID NO: 210743 - DNA, 379 bp, Zea Mays
caggctttttgcttgcttccgcgggcctcgcatgccataggctcaataacctcgccagcggatcccttccttgcgaggccggaactgagctgccgccggcgctatggcgagcggcggcctggcggctgcgtcggaagtcgccgtcgttttcctcatccgccctgtccttgccatcgccttcgtcttcaccctcatcctcctcagctggtacgtggcgtggaggacggtgctggtgcacgtgccgctggtgcaggagatcgccggcctgcgcccgaaaaagccctctaaacccaagccagccaaccgcggccgcttcgccaagttctaccagaaccaggccgaagccgcacaaagtgatgggcaagtacatagaacctaa

SEQ ID NO: 210744 - DNA, 3975 bp, Zea Mays
tagcaggtagcagcagtcgcttccgtcccccttcctcttgtattcgcttcgccgcccaacccagcctccaccgctgccttcccgaccgttctcgccgccgctgtctcctcgcccaccaccccgcacggccggcgaccagcgcccacgcggccgctcgatccaaggccagaacgagcccaccacgatccgcatcacgccgatatttttcaggttgttggtacggatctagggttttcctgctgcggattcgttcgattcgctcatggccgctgggcgccatgggggttacagggactacgaggagagggagcgggagctcgacgcggaggcctccaggaggagcaaggagcagcaccaccatctcggcggccgccaccgcgacgtggaccgccgccgcgatggcgggcgcagcaggggtggtagagactttgccaacggccacggtcgccgacgttcgcccccgcccaggagccgcctcgcgggaaggcttggtgaccgtgagcctggcgaggtgctgagcggtagcgcatctgatgactccggtgggaggtcggatagagggagggaaaatggcgtgcgcagttctagcagggagggcgacatggtggcaggcactgggatctcgtcaccgatcaagaagaggaaattctcaccgataatttgggacagggatagcccaaagccaccgcattctggtgcagccagggacaagaaatcggtagaatctgttccttctgagctccctccgccgccgccgctgccacaagaccacatcccactgagcttgtctgtggagaagtcacctatggatgtagaaactactgttggtacagagagtgctgagcagttgccggaacatgaggtcaataaggtgatagagcaggaagaggactatccaagtccaacaatgaggaacatatcgacttcaagatgggcgggtgcaaatgatgatgaggaaggtggggcagctccaatgaagaagagaagtgtttcacctgcagactcctctgtaccaggtcagtggaaacgagcaagcccagaacctggtgaagtctctggaggaagggcaatgtctaggtcatctgattcagggaaaataggtaatgatgagaaagaagattccgaggtcgataaagatgactatatggatgttgacagggagcatgctagtgacagtggtacagaaaactgtatgtcggatactgactcagacaatgaaatgtgcaggcctgaaacccctgaaccagagaggccaccacacaggtgtatcaatatgcttcaaggttgcagaagtgttgatgagtttgagaggctcaacaaaattaatgagggaacatatggtgttgtatacagagcaagggataagaagacaagtgagattgttgcattgaagaaggtaaagatggagagggagcgagaaggtttcccattaacctctcttagggaaataaatatcctcttgtctttccaccatccttcaatcgtggatgttaaggaagtagtagttggaagtagtttagatagcatttttatggttatggagtacatggaacatgatcttaaaggtgtcatggagaccatgaaacaaccatatacacaaagcgaggtcaaatgtttgatgcttcagctgctagagggtgtaaaatatctacatgacaattgggtactccatagggatctgaagacctcaaatcttttgctgaataaccgtggtgagttaaaaatatgtgattttggactgtctcgtcaatatgggagcccattaaaaccttatactcaactggttgtgactttgtggtacagggccccagaactgttgttaggaacaaaggagtattctactgctattgatatgtggtccgtgggctgtataatggctgagctccttgccaaagaaccattatttaatggaaaaacagagtttgaacagctagataagatttttagaacacttggcacacctagcgagaagatttggcctggctatgctaaattaccaggcgtgaaagtaaattttgtcaaacaaccgtataataggctaagggataagttcccagctgcatctttttctgggcgaccaatcctgtctgaagctggttttgatctattgaatagactgctaacttatgatcctgataagcgcatatcagcagacgatgctctgaaacacaaatggttctctgaagttcctctgcctaaatcaaaagacttcatgccaacatttcctgctcttaatgaacttgacaggcgtaccaaacgttatctgaagagtcctgatcctctggaagagcaacgtctgaaagaactgcaagggaacataggcaaccgtgggctttttggctgaactaagagtacttgattggattcctgtccgtactaactgttatgcttcaccctgaatccacgaggtcagatgtcttctgaggtgaggtgccatggacatgaagtatcacatcttctcggtgtctagcagcgactgatagtgttctttagcaggcttggtgccggtttgagtggataaggtttctccttgtggcccatcatagaaattttgttgcaggattaacactccatccagattgatcataaaagcaaatataaaccgtcttcatcgtaaggtgtgacatgttggctttgaatgggtacaccagtttcacctttggaacttctgtatgtaaaatattccagattggtacgttgtaaacaatccccagtgtgtcggatttaaatttaaataaaacatcatcattattagttttcttcatgctccttgtgccttttcttttgatctttgcattttgtttgcaagagacgaaagaagcgcaggggaaggaagccttttgcttttatcaggaaatcaatgacattaatacaacttagaagctaagctgtggctgcttcaagataggaaagtgacaatttgtggagggccttcaaaagtgttttactagtgaaccatggtggctgtaacacattggtatttgaagaccattgcaggttgtaacacactgttatatttgaagaccagtggtgggttgacttaaaagcagggtttaaacatcacttttgtgatttgttctgcaatatctttgccatatcatggggtttcagaccataccagtcgtaccagaccttgtggtggataagagtgaggttgaaacctcacaagttgcgggctctgattcaatagtcatagaaagggtggaaacaaatctgagcaaggaaccctttctgctagttcccttggaaaataaggaagagaaagagtcccttggtataatttgttatcttgaaaataacaaggttgatgttcctgaggccttctctccaaggagagatatacttgaattgtcaatctctagcaagtctactgatgatagtctttcattgggttgtgagacaccacgtgaaagcatctttgatccatttgctccaggacctgaggaggcagcctgtgcaccaaagaagaaagtgactagaggtgctcaagttccacctcgcaggaagctaaattttgattcaggtgactacccagttaaaaggttaagtttcgattgcagtgattctgaagaggaggatcaatatatcgaagtgattcacaagatgatcctggatctattaattctagatgtccctcttggtggacaaaaagaaactggaaagaatgcgacagatttgggcctacatggaagctgcaagacacctgattcaaagcctctacttactggcattgcatccacatgcccagatgcacctttgaggccatctcttaaagcgttaaagctgagcccaggcatttgtcgaaagattgactttgacttcgatgcagtcagtggctcaggaagtctaagttcttccatggataaaactattatagttcttctagattattgtattgagtatgcactaaccaatttaacacaaaaaattaaactgactagttaaaagttaaaacgcatatgtggcacgctcgtg

SEQ ID NO: 210745 - DNA, 2977 bp, Zea Mays
tagcaggtagcagcagtcgcttccgtcccccttcctcttgtattcgcttcgccgcccaacccagcctccaccgctgccttcccgaccgttctcgccgccgctgtctcctcgcccaccaccccgcacggccggcgaccagcgcccacgcggccgctcgatccaaggccagaacgagcccaccacgatccgcatcacgccgatatttttcaggttgttggtacggatctagggttttcctgctgcggattcgttcgattcgctcatggccgctgggcgccatgggggttacagggactacgaggagagggagcgggagctcgacgcggaggcctccaggaggagcaaggagcagcaccaccatctcggcggccgccaccgcgacgtggaccgccgccgcgatggcgggcgcagcaggggtggtagagactttgccaacggccacggtcgccgacgttcgcccccgcccaggagccgcctcgcgggaaggcttggtgaccgtgagcctggcgaggtgctgagcggtagcgcatctgatgactccggtgggaggtcggatagagggagggaaaatggcgtgcgcagttctagcagggagggcgacatggtggcaggcactgggatctcgtcaccgatcaagaagaggaaattctcaccgataatttgggacagggatagcccaaagccaccgcattctggtgcagccagggacaagaaatcggtagaatctgttccttctgagctccctccgccgccgccgctgccacaagaccacatcccactgagcttgtctgtggagaagtcacctatggatgtagaaactactgttggtacagagagtgctgagcagttgccggaacatgaggtcaataaggtgatagagcaggaagaggactatccaagtccaacaatgaggaacatatcgacttcaagatgggcgggtgcaaatgatgatgaggaaggtggggcagctccaatgaagaagagaagtgtttcacctgcagactcctctgtaccaggtcagtggaaacgagcaagcccagaacctggtgaagtctctggaggaagggcaatgtctaggtcatctgattcagggaaaataggtaatgatgagaaagaagattccgaggtcgataaagatgactatatggatgttgacagggagcatgctagtgacagtggtacagaaaactgtatgtcggatactgactcagacaatgaaatgtgcaggcctgaaacccctgaaccagagaggccaccacacaggtgtatcaatatgcttcaaggttgcagaagtgttgatgagtttgagaggctcaacaaaattaatgagggaacatatggtgttgtatacagagcaagggataagaagacaagtgagattgttgcattgaagaaggtaaagatggagagggagcgagaaggtttcccattaacctctcttagggaaataaatatcctcttgtctttccaccatccttcaatcgtggatgttaaggaagtagtagttggaagtagtttagatagcatttttatggttatggagtacatggaacatgatcttaaaggtgtcatggagaccatgaaacaaccatatacacaaagcgaggtcaaatgtttgatgcttcagctgctagagggtgtaaaatatctacatgacaattgggtactccatagggatctgaagacctcaaatcttttgctgaataaccgtggtgagttaaaaatatgtgattttggactgtctcgtcaatatgggagcccattaaaaccttatactcaactggttgtgactttgtggtacagggccccagaactgttgttaggaacaaaggagtattctactgctattgatatgtggtccgtgggctgtataatggctgagctccttgccaaagaaccattatttaatggaaaaacagagtttgaacagctagataagatttttagaacacttggcacacctagcgagaagatttggcctggctatgctaaattaccaggcgtgaaagtaaattttgtcaaacaaccgtataataggctaagggataagttcccagctgcatctttttctgggcgaccaatcctgtctgaagctggttttgatctattgaatagactgctaacttatgatcctgataagcgcatatcagcagacgatgctctgaaacacaaatggttctctgaagttcctctgcctaaatcaaaagacttcatgccaacatttcctgctcttaatgaacttgacaggcgtaccaaacgttatctgaagagtcctgatcctctggaagagcaacgtctgaaagaactgcaagggaacataggcaaccgtgggctttttggctgaactaagagtacttgattggattcctgtccgtactaactgttatgcttcaccctgaatccacgaggtcagatgtcttctgaggtgaggtgccatggacatgaagtatcacatcttctcggtgtctagcagcgactgatagtgttctttagcaggcttggtgccggtttgagtggataaggtttctccttgtggcccatcatagaaattttgttgcaggattaacactccatccagattgatcataaaagcaaatataaaccgtcttcatcgtaaggtgtgacatgttggctttgaatgggtacaccagtttcacctttggaacttctgtatgtaaaatattccagattgacgaaagaagcgcaggggaaggaagccttttgcttttatcaggaaatcaatgacattaatacaacttagaagctaagctgtggctgcttcaagataggaaagtgacaatttgtggagggccttcaaaagtgttttactagtgaaccatggtggttgttgcttatcttcagctgacagttataacattgctcacagaaaaacatgaagcgattggtttccgcaataaacaaagtgaaagttagcatgtagagtattgcaatacgtgcggtgccatttgaagttctg

SEQ ID NO: 210746 - DNA, 2845 bp, Zea Mays
ctagcaggtagcagcagtcgcttccgtcccccttcctcttgtattcgcttcgccgcccaacccagcctccaccgctgccttcccgaccgttctcgccgccgctgtctcctcgcccaccaccccgcacggccggcgaccagcgcccacgcggccgctcgatccaaggccagaacgagcccaccacgatccgcatcacgccgatatttttcaggttgttggtacggatctagggttttcctgctgcggattcgttcgattcgctcatggccgctgggcgccatgggggttacagggactacgaggagagggagcgggagctcgacgcggaggcctccaggaggagcaaggagcagcaccaccatctcggcggccgccaccgcgacgtggaccgccgccgcgatggcgggcgcagcaggggtggtagagactttgccaacggccacggtcgccgacgttcgcccccgcccaggagccgcctcgcgggaaggcttggtgaccgtgagcctggcgaggtgctgagcggtagcgcatctgatgactccggtgggaggtcggatagagggagggaaaatggcgtgcgcagttctagcagggagggcgacatggtggcaggcactgggatctcgtcaccgatcaagaagaggaaattctcaccgataatttgggacagggatagcccaaagccaccgcattctggtgcagccagggacaagaaatcggtagaatctgttccttctgagctccctccgccgccgccgctgccacaagaccacatcccactgagcttgtctgtggagaagtcacctatggatgtagaaactactgttggtacagagagtgctgagcagttgccggaacatgaggtcaataaggtgatagagcaggaagaggactatccaagtccaacaatgaggaacatatcgacttcaagatgggcgggtgcaaatgatgatgaggaaggtggggcagctccaatgaagaagagaagtgtttcacctgcagactcctctgtaccaggtcagtggaaacgagcaagcccagaacctggtgaagtctctggaggaagggcaatgtctaggtcatctgattcagggaaaataggtaatgatgagaaagaagattccgaggtcgataaagatgactatatggatgttgacagggagcatgctagtgacagtggtacagaaaactgtatgtcggatactgactcagacaatgaaatgtgcaggcctgaaacccctgaaccagagaggccaccacacaggtgtatcaatatgcttcaaggttgcagaagtgttgatgagtttgagaggctcaacaaaattaatgagggaacatatggtgttgtatacagagcaagggataagaagacaagtgagattgttgcattgaagaaggtaaagatggagagggagcgagaaggtttcccattaacctctcttagggaaataaatatcctcttgtctttccaccatccttcaatcgtggatgttaaggaagtagtagttggaagtagtttagatagcatttttatggttatggagtacatggaacatgatcttaaaggtgtcatggagaccatgaaacaaccatatacacaaagcgaggtcaaatgtttgatgcttcagctgctagagggtgtaaaatatctacatgacaattgggtactccatagggatctgaagacctcaaatcttttgctgaataaccgtggtgagttaaaaatatgtgattttggactgtctcgtcaatatgggagcccattaaaaccttatactcaactggttgtgactttgtggtacagggccccagaactgttgttaggaacaaaggagtattctactgctattgatatgtggtccgtgggctgtataatggctgagctccttgccaaagaaccattatttaatggaaaaacagagtttgaacagctagataagatttttagaacacttggcacacctagcgagaagatttggcctggctatgctaaattaccaggcgtgaaagtaaattttgtcaaacaaccgtataataggctaagggataagttcccagctgcatctttttctgggcgaccaatcctgtctgaagctggttttgatctattgaatagactgctaacttatgatcctgataagcgcatatcagcagacgatgctctgaaacacaaatggttctctgaagttcctctgcctaaatcaaaagacttcatgccaacatttcctgctcttaatgaacttgacaggcgtaccaaacgttatctgaagagtcctgatcctctggaagagcaacgtctgaaagaactgcaagggaacataggcaaccgtgggctttttggctgaactaagagtacttgattggattcctgtccgtactaactgttatgcttcaccctgaatccacgaggtcagatgtcttctgaggattaacactccatccagattgatcataaaagcaaatataaaccgtcttcatcgtaaggtgtgacatgttggctttgaatgggtacaccagtttcacctttggaacttctgtatgtaaaatattccagattgagacgaaagaagcgcaggggaaggaagccttttgcttttatcaggaaatcaatgacattaatacaacttagaagctaagctgtggctgcttcaagataggaaagtgacaatttgtggagggccttcaaaagtgttttactagtgaaccatggtggttgttgcttatcttcagctgacagttataacattgctcacagaaaaacatgaagcgattggtttccgcaataaacaaagtgaaagttagcatgtagagtattgcaatacgtgcggtgccatttgaagttctg

SEQ ID NO: 210747 - DNA, 2828 bp, Zea Mays
ctagcaggtagcagcagtcgcttccgtcccccttcctcttgtattcgcttcgccgcccaacccagcctccaccgctgccttcccgaccgttctcgccgccgctgtctcctcgcccaccaccccgcacggccggcgaccagcgcccacgcggccgctcgatccaaggccagaacgagcccaccacgatccgcatcacgccgatatttttcagggactacgaggagagggagcgggagctcgacgcggaggcctccaggaggagcaaggagcagcaccaccatctcggcggccgccaccgcgacgtggaccgccgccgcgatggcgggcgcagcaggggtggtagagactttgccaacggccacggtcgccgacgttcgcccccgcccaggagccgcctcgcgggaaggcttggtgaccgtgagcctggcgaggtgctgagcggtagcgcatctgatgactccggtgggaggtcggatagagggagggaaaatggcgtgcgcagttctagcagggagggcgacatggtggcaggcactgggatctcgtcaccgatcaagaagaggaaattctcaccgataatttgggacagggatagcccaaagccaccgcattctggtgcagccagggacaagaaatcggtagaatctgttccttctgagctccctccgccgccgccgctgccacaagaccacatcccactgagcttgtctgtggagaagtcacctatggatgtagaaactactgttggtacagagagtgctgagcagttgccggaacatgaggtcaataaggtgatagagcaggaagaggactatccaagtccaacaatgaggaacatatcgacttcaagatgggcgggtgcaaatgatgatgaggaaggtggggcagctccaatgaagaagagaagtgtttcacctgcagactcctctgtaccaggtcagtggaaacgagcaagcccagaacctggtgaagtctctggaggaagggcaatgtctaggtcatctgattcagggaaaataggtaatgatgagaaagaagattccgaggtcgataaagatgactatatggatgttgacagggagcatgctagtgacagtggtacagaaaactgtatgtcggatactgactcagacaatgaaatgtgcaggcctgaaacccctgaaccagagaggccaccacacaggtgtatcaatatgcttcaaggttgcagaagtgttgatgagtttgagaggctcaacaaaattaatgagggaacatatggtgttgtatacagagcaagggataagaagacaagtgagattgttgcattgaagaaggtaaagatggagagggagcgagaaggtttcccattaacctctcttagggaaataaatatcctcttgtctttccaccatccttcaatcgtggatgttaaggaagtagtagttggaagtagtttagatagcatttttatggttatggagtacatggaacatgatcttaaaggtgtcatggagaccatgaaacaaccatatacacaaagcgaggtcaaatgtttgatgcttcagctgctagagggtgtaaaatatctacatgacaattgggtactccatagggatctgaagacctcaaatcttttgctgaataaccgtggtgagttaaaaatatgtgattttggactgtctcgtcaatatgggagcccattaaaaccttatactcaactggttgtgactttgtggtacagggccccagaactgttgttaggaacaaaggagtattctactgctattgatatgtggtccgtgggctgtataatggctgagctccttgccaaagaaccattatttaatggaaaaacagagtttgaacagctagataagatttttagaacacttggcacacctagcgagaagatttggcctggctatgctaaattaccaggcgtgaaagtaaattttgtcaaacaaccgtataataggctaagggataagttcccagctgcatctttttctgggcgaccaatcctgtctgaagctggttttgatctattgaatagactgctaacttatgatcctgataagcgcatatcagcagacgatgctctgaaacacaaatggttctctgaagttcctctgcctaaatcaaaagacttcatgccaacatttcctgctcttaatgaacttgacaggcgtaccaaacgttatctgaagagtcctgatcctctggaagagcaacgtctgaaagaactgcaagggaacataggcaaccgtgggctttttggctgaactaagagtacttgattggattcctgtccgtactaactgttatgcttcaccctgaatccacgaggtcagatgtcttctgaggcttggtgccggtttgagtggataaggtttctccttgtggcccatcatagaaattttgttgcaggattaacactccatccagattgatcataaaagcaaatataaaccgtcttcatcgtaaggtgtgacatgttggctttgaatgggtacaccagtttcacctttggaacttctgtatgtaaaatattccagattgagacgaaagaagcgcaggggaaggaagccttttgcttttatcaggaaatcaatgacattaatacaacttagaagctaagctgtggctgcttcaagataggaaagtgacaatttgtggagggccttcaaaagtgttttactagtgaaccatggtggttgttgcttatcttcagctgacagttataacattgctcacagaaaaacatgaagcgattggtttccgcaataaacaaagtgaaagttagcatgtagagtattgcaatacgtgcggtgccatttgaagttctg

SEQ ID NO: 210748 - DNA, 2802 bp, Zea Mays
ctagcaggtagcagcagtcgcttccgtcccccttcctcttgtattcgcttcgccgcccaacccagcctccaccgctgccttcccgaccgttctcgccgccgctgtctcctcgcccaccaccccgcacggccggcgaccagcgcccacgcggccgctcgatccaaggccagaacgagcccaccacgatccgcatcacgccgatatttttcaggttgttggtacggatctagggttttcctgctgcggattcgttcgattcgctcatggccgctgggcgccatgggggttacagggactacgaggagagggagcgggagctcgacgcggaggcctccaggaggagcaaggagcagcaccaccatctcggcggccgccaccgcgacgtggaccgccgccgcgatggcgggcgcagcaggggtggtagagactttgccaacggccacggtcgccgacgttcgcccccgcccaggagccgcctcgcgggaaggcttggtgaccgtgagcctggcgaggtgctgagcggtagcgcatctgatgactccggtgggaggtcggatagagggagggaaaatggcgtgcgcagttctagcagggagggcgacatggtggcaggcactgggatctcgtcaccgatcaagaagaggaaattctcaccgataatttgggacagggatagcccaaagccaccgcattctggtgcagccagggacaagaaatcggtagaatctgttccttctgagctccctccgccgccgccgctgccacaagaccacatcccactgagcttgtctgtggagaagtcacctatggatgtagaaactactgttggtacagagagtgctgagcagttgccggaacatgaggtcaataaggtgatagagcaggaagaggactatccaagtccaacaatgaggaacatatcgacttcaagatgggcgggtgcaaatgatgatgaggaaggtggggcagctccaatgaagaagagaagtgtttcacctgcagactcctctgtaccaggtcagtggaaacgagcaagcccagaacctggtgaagtctctggaggaagggcaatgtctaggtcatctgattcagggaaaataggtaatgatgagaaagaagattccgaggtcgataaagatgactatatggatgttgacagggagcatgctagtgacagtggtacagaaaactgtatgtcggatactgactcagacaatgaaatgtgcaggcctgaaacccctgaaccagagaggccaccacacaggtgtatcaatatgcttcaaggttgcagaagtgttgatgagtttgagaggctcaacaaaattaatgagggaacatatggtgttgtatacagagcaagggataagaagacaagtgagattgttgcattgaagaaggtaaagatggagagggagcgagaaggtttcccattaacctctcttagggaaataaatatcctcttgtctttccaccatccttcaatcgtggatgttaaggaagtagtagttggaagtagtttagatagcatttttatggttatggagtacatggaacatgatcttaaaggtgtcatggagaccatgaaacaaccatatacacaaagcgaggtcaaatgtttgatgcttcagctgctagagggtgtaaaatatctacatgacaattgggtactccatagggatctgaagacctcaaatcttttgctgaataaccgtggtgagttaaaaatatgtgattttggactgtctcgtcaatatgggagcccattaaaaccttatactcaactggttgtgactttgtggtacagggccccagaactgttgttaggaacaaaggagtattctactgctattgatatgtggtccgtgggctgtataatggctgagctccttgccaaagaaccattatttaatggaaaaacagagtttgaacagctagataagatttttagaacacttggcacacctagcgagaagatttggcctggctatgctaaattaccaggcgtgaaagtaaattttgtcaaacaaccgtataataggctaagggataagttcccagctgcatctttttctgggcgaccaatcctgtctgaagctggttttgatctattgaatagactgctaacttatgatcctgataagcgcatatcagcagacgatgctctgaaacacaaatggttctctgaagttcctctgcctaaatcaaaagacttcatgccaacatttcctgctcttaatgaacttgacaggcgtaccaaacgttatctgaagagtcctgatcctctggaagagcaacgtctgaaagaactgcaagggaacataggcaaccgtgggctttttggctgaactaagagtacttgattggattcctgtccgtactaactgttatgcttcaccctgaatccacgaggtcagatgtcttctgaggattaacactccatccagattgatcataaaagcaaatataaaccgtcttcatcgtaaggtgtgacatgttggctttgaatgggtacaccagtttcacctttggaacttctgtatgtaaaatattccagattgagacgaaagaagcgcaggggaaggaagccttttgcttttatcaggaaatcaatgacattaatacaacttagaagctaagctgtggctgcttcaagataggaaagtgacaatttgtggagggccttcaaaagtgttttactagtgaaccatggtgaaaaacatgaagcgattggtttccgcaataaacaaagtgaaagttagcatgtagagtattgcaatacgtgcggtgccatttgaagttctg

SEQ ID NO: 210749 - DNA, 2938 bp, Zea Mays
gctctagcaggtagcagcagtcgcttccgtcccccttcctcttgtattcgcttcgccgcccaacccagcctccaccgctgccttcccgaccgttctcgccgccgctgtctcctcgcccaccaccccgcacggccggcgaccagcgcccacgcggccgctcgatccaaggccagaacgagcccaccacgatccgcatcacgccgatatttttcaggttgttggtacggatctagggttttcctgctgcggattcgttcgattcgctcatggccgctgggcgccatgggggttacagggactacgaggagagggagcgggagctcgacgcggaggcctccaggaggagcaaggagcagcaccaccatctcggcggccgccaccgcgacgtggaccgccgccgcgatggcgggcgcagcaggggtggtagagactttgccaacggccacggtcgccgacgttcgcccccgcccaggagccgcctcgcgggaaggcttggtgaccgtgagcctggcgaggtgctgagcggtagcgcatctgatgactccggtgggaggtcggatagagggagggaaaatggcgtgcgcagttctagcagggagggcgacatggtggcaggcactgggatctcgtcaccgatcaagaagaggaaattctcaccgataatttgggacagggatagcccaaagccaccgcattctggtgcagccagggacaagaaatcggtagaatctgttccttctgagctccctccgccgccgccgctgccacaagaccacatcccactgagcttgtctgtggagaagtcacctatggatgtagaaactactgttggtacagagagtgctgagcagttgccggaacatgaggtcaataaggtgatagagcaggaagaggactatccaagtccaacaatgaggaacatatcgacttcaagatgggcgggtgcaaatgatgatgaggaaggtggggcagctccaatgaagaagagaagtgtttcacctgcagactcctctgtaccaggtcagtggaaacgagcaagcccagaacctggtgaagtctctggaggaagggcaatgtctaggtcatctgattcagggaaaataggtaatgatgagaaagaagattccgaggtcgataaagatgactatatggatgttgacagggagcatgctagtgacagtggtacagaaaactgtatgtcggatactgactcagacaatgaaatgtgcaggcctgaaacccctgaaccagagaggccaccacacaggtgtatcaatatgcttcaaggttgcagaagtgttgatgagtttgagaggctcaacaaaattaatgagggaacatatggtgttgtatacagagcaagggataagaagacaagtgagattgttgcattgaagaaggtaaagatggagagggagcgagaaggtttcccattaacctctcttagggaaataaatatcctcttgtctttccaccatccttcaatcgtggatgttaaggaagtagtagttggaagtagtttagatagcatttttatggttatggagtacatggaacatgatcttaaaggtgtcatggagaccatgaaacaaccatatacacaaagcgaggtcaaatgtttgatgcttcagctgctagagggtgtaaaatatctacatgacaattgggtactccatagggatctgaagacctcaaatcttttgctgaataaccgtgggccccagaactgttgttaggaacaaaggagtattctactgctattgatatgtggtccgtgggctgtataatggctgagctccttgccaaagaaccattatttaatggaaaaacagagtttgaacagctagataagatttttagaacacttggcacacctagcgagaagatttggcctggctatgctaaattaccaggcgtgaaagtaaattttgtcaaacaaccgtataataggctaagggataagttcccagctgcatctttttctgggcgaccaatcctgtctgaagctggttttgatctattgaatagactgctaacttatgatcctgataagcgcatatcagcagacgatgctctgaaacacaaatggttctctgaagttcctctgcctaaatcaaaagacttcatgccaacatttcctgctcttaatgaacttgacaggcgtaccaaacgttatctgaagagtcctgatcctctggaagagcaacgtctgaaagaactgcaagggaacataggcaaccgtgggctttttggctgaactaagagtacttgattggattcctgtccgtactaactgttatgcttcaccctgaatccacgaggtcagatgtcttctgaggcttggtgccggtttgagtggataaggtttctccttgtggcccatcatagaaattttgttgcaggattaacactccatccagattgatcataaaagcaaatataaaccgtcttcatcgtaaggtgtgacatgttggctttgaatgggtacaccagtttcacctttggaacttctgtatgtaaaatattccagattggtacgttgtaaacaatccccagtgtgtcggatttaaatttaaataaaacatcatcattattagttttcttcatgctccttgtgccttttcttttgatctttgcattttgtttgcaagagacgaaagaagcgcaggggaaggaagccttttgcttttatcaggaaatcaatgacattaatacaacttagaagctaagctgtggctgcttcaagataggaaagtgacaatttgtggagggccttcaaaagtgttttactagtgaaccatggtggttgttgcttatcttcagctgacagttataacattgctcacagaaaaacatgaagcgattggtttccgcaataaacaaagtgaaagttagcatgtagagtattgcaatacgtgcggtgccatttgaagttctg

SEQ ID NO: 210750 - DNA, 2777 bp, Zea Mays
gctctagcaggtagcagcagtcgcttccgtcccccttcctcttgtattcgcttcgccgcccaacccagcctccaccgctgccttcccgaccgttctcgccgccgctgtctcctcgcccaccaccccgcacggccggcgaccagcgcccacgcggccgctcgatccaaggccagaacgagcccaccacgatccgcatcacgccgatatttttcaggttgttggtacggatctagggttttcctgctgcggattcgttcgattcgctcatggccgctgggcgccatgggggttacagggactacgaggagagggagcgggagctcgacgcggaggcctccaggaggagcaaggagcagcaccaccatctcggcggccgccaccgcgacgtggaccgccgccgcgatggcgggcgcagcaggggtggtagagactttgccaacggccacggtcgccgacgttcgcccccgcccaggagccgcctcgcgggaaggcttggtgaccgtgagcctggcgaggtgctgagcggtagcgcatctgatgactccggtgggaggtcggatagagggagggaaaatggcgtgcgcagttctagcagggagggcgacatggtggcaggcactgggatctcgtcaccgatcaagaagaggaaattctcaccgataatttgggacagggatagcccaaagccaccgcattctggtgcagccagggacaagaaatcggtagaatctgttccttctgagctccctccgccgccgccgctgccacaagaccacatcccactgagcttgtctgtggagaagtcacctatggatgtagaaactactgttggtacagagagtgctgagcagttgccggaacatgaggtcaataaggtgatagagcaggaagaggactatccaagtccaacaatgaggaacatatcgacttcaagatgggcgggtgcaaatgatgatgaggaaggtggggcagctccaatgaagaagagaagtgtttcacctgcagactcctctgtaccaggtcagtggaaacgagcaagcccagaacctggtgaagtctctggaggaagggcaatgtctaggtcatctgattcagggaaaataggtaatgatgagaaagaagattccgaggtcgataaagatgactatatggatgttgacagggagcatgctagtgacagtggtacagaaaactgtatgtcggatactgactcagacaatgaaatgtgcaggcctgaaacccctgaaccagagaggccaccacacaggtgtatcaatatgcttcaaggttgcagaagtgttgatgagtttgagaggctcaacaaaattaatgagggaacatatggtgttgtatacagagcaagggataagaagacaagtgagattgttgcattgaagaaggtaaagatggagagggagcgagaaggtttcccattaacctctcttagggaaataaatatcctcttgtctttccaccatccttcaatcgtggatgttaaggaagtagtagttggaagtagtttagatagcatttttatggttatggagtacatggaacatgatcttaaaggtgtcatggagaccatgaaacaaccatatacacaaagcgaggtcaaatgtttgatgcttcagctgctagagggtgtaaaatatctacatgacaattgggtactccatagggatctgaagacctcaaatcttttgctgaataaccgtgggccccagaactgttgttaggaacaaaggagtattctactgctattgatatgtggtccgtgggctgtataatggctgagctccttgccaaagaaccattatttaatggaaaaacagagtttgaacagctagataagatttttagaacacttggcacacctagcgagaagatttggcctggctatgctaaattaccaggcgtgaaagtaaattttgtcaaacaaccgtataataggctaagggataagttcccagctgcatctttttctgggcgaccaatcctgtctgaagctggttttgatctattgaatagactgctaacttatgatcctgataagcgcatatcagcagacgatgctctgaaacacaaatggttctctgaagttcctctgcctaaatcaaaagacttcatgccaacatttcctgctcttaatgaacttgacaggcgtaccaaacgttatctgaagagtcctgatcctctggaagagcaacgtctgaaagaactgcaagggaacataggcaaccgtgggctttttggctgaactaagagtacttgattggattcctgtccgtactaactgttatgcttcaccctgaatccacgaggtcagatgtcttctgaggattaacactccatccagattgatcataaaagcaaatataaaccgtcttcatcgtaaggtgtgacatgttggctttgaatgggtacaccagtttcacctttggaacttctgtatgtaaaatattccagattgaagcgcaggggaaggaagccttttgcttttatcaggaaatcaatgacattaatacaacttagaaggtgaattaattgtgagatatgtccacaacaaattcggaacttgaactaatgtgtgcatctaacatctgtttgctaagctgtggctgcttcaagataggaaagtgacaatttgtggagggccttcaaaagtgttttactagtgaaccatggtgaaaaacatgaagcgattggtttccgcaataaacaaagtgaaagttagcatgtagagtattgcaatacgtgcggtgccatttgaagttctg

SEQ ID NO: 210751 - DNA, 2895 bp, Zea Mays
gctctagcaggtagcagcagtcgcttccgtcccccttcctcttgtattcgcttcgccgcccaacccagcctccaccgctgccttcccgaccgttctcgccgccgctgtctcctcgcccaccaccccgcacggccggcgaccagcgcccacgcggccgctcgatccaaggccagaacgagcccaccacgatccgcatcacgccgatatttttcaggttgttggtacggatctagggttttcctgctgcggattcgttcgattcgctcatggccgctgggcgccatgggggttacagggactacgaggagagggagcgggagctcgacgcggaggcctccaggaggagcaaggagcagcaccaccatctcggcggccgccaccgcgacgtggaccgccgccgcgatggcgggcgcagcaggggtggtagagactttgccaacggccacggtcgccgacgttcgcccccgcccaggagccgcctcgcgggaaggcttggtgaccgtgagcctggcgaggtgctgagcggtagcgcatctgatgactccggtgggaggtcggatagagggagggaaaatggcgtgcgcagttctagcagggagggcgacatggtggcaggcactgggatctcgtcaccgatcaagaagaggaaattctcaccgataatttgggacagggatagcccaaagccaccgcattctggtgcagccagggacaagaaatcggtagaatctgttccttctgagctccctccgccgccgccgctgccacaagaccacatcccactgagcttgtctgtggagaagtcacctatggatgtagaaactactgttggtacagagagtgctgagcagttgccggaacatgaggtcaataaggtgatagagcaggaagaggactatccaagtccaacaatgaggaacatatcgacttcaagatgggcgggtgcaaatgatgatgaggaaggtggggcagctccaatgaagaagagaagtgtttcacctgcagactcctctgtaccaggtcagtggaaacgagcaagcccagaacctggtgaagtctctggaggaagggcaatgtctaggtcatctgattcagggaaaataggtaatgatgagaaagaagattccgaggtcgataaagatgactatatggatgttgacagggagcatgctagtgacagtggtacagaaaactgtatgtcggatactgactcagacaatgaaatgtgcaggcctgaaacccctgaaccagagaggccaccacacaggtgtatcaatatgcttcaaggttgcagaagtgttgatgagtttgagaggctcaacaaaattaatgagggaacatatggtgttgtatacagagcaagggataagaagacaagtgagattgttgcattgaagaaggtaaagatggagagggagcgagaaggtttcccattaacctctcttagggaaataaatatcctcttgtctttccaccatccttcaatcgtggatgttaaggaagtagtagttggaagtagtttagatagcatttttatggttatggagtacatggaacatgatcttaaaggtgtcatggagaccatgaaacaaccatatacacaaagcgaggtcaaatgtttgatgcttcagctgctagagggtgtaaaatatctacatgacaattgggtactccatagggatctgaagacctcaaatcttttgctgaataaccgtgggccccagaactgttgttaggaacaaaggagtattctactgctattgatatgtggtccgtgggctgtataatggctgagctccttgccaaagaaccattatttaatggaaaaacagagtttgaacagctagataagatttttagaacacttggcacacctagcgagaagatttggcctggctatgctaaattaccaggcgtgaaagtaaattttgtcaaacaaccgtataataggctaagggataagttcccagctgcatctttttctgggcgaccaatcctgtctgaagctggttttgatctattgaatagactgctaacttatgatcctgataagcgcatatcagcagacgatgctctgaaacacaaatggttctctgaagttcctctgcctaaatcaaaagacttcatgccaacatttcctgctcttaatgaacttgacaggcgtaccaaacgttatctgaagagtcctgatcctctggaagagcaacgtctgaaagaactgcaagggaacataggcaaccgtgggctttttggctgaactaagagtacttgattggattcctgtccgtactaactgttatgcttcaccctgaatccacgaggtcagatgtcttctgaggcttggtgccggtttgagtggataaggtttctccttgtggcccatcatagaaattttgttgcaggattaacactccatccagattgatcataaaagcaaatataaaccgtcttcatcgtaaggtgtgacatgttggctttgaatgggtacaccagtttcacctttggaacttctgtatgtaaaatattccagattggtacgttgtaaacaatccccagtgtgtcggatttaaatttaaataaaacatcatcattattagttttcttcatgctccttgtgccttttcttttgatctttgcattttgtttgcaagagacgaaagaagcgcaggggaaggaagccttttgcttttatcaggaaatcaatgacattaatacaacttagaagctaagctgtggctgcttcaagataggaaagtgacaatttgtggagggccttcaaaagtgttttactagtgaaccatggtgaaaaacatgaagcgattggtttccgcaataaacaaagtgaaagttagcatgtagagtattgcaatacgtgcggtgccatttgaagttctg

SEQ ID NO: 210752 - DNA, 2714 bp, Zea Mays
gctctagcaggtagcagcagtcgcttccgtcccccttcctcttgtattcgcttcgccgcccaacccagcctccaccgctgccttcccgaccgttctcgccgccgctgtctcctcgcccaccaccccgcacggccggcgaccagcgcccacgcggccgctcgatccaaggccagaacgagcccaccacgatccgcatcacgccgatatttttcaggttgttggtacggatctagggttttcctgctgcggattcgttcgattcgctcatggccgctgggcgccatgggggttacagggactacgaggagagggagcgggagctcgacgcggaggcctccaggaggagcaaggagcagcaccaccatctcggcggccgccaccgcgacgtggaccgccgccgcgatggcgggcgcagcaggggtggtagagactttgccaacggccacggtcgccgacgttcgcccccgcccaggagccgcctcgcgggaaggcttggtgaccgtgagcctggcgaggtgctgagcggtagcgcatctgatgactccggtgggaggtcggatagagggagggaaaatggcgtgcgcagttctagcagggagggcgacatggtggcaggcactgggatctcgtcaccgatcaagaagaggaaattctcaccgataatttgggacagggatagcccaaagccaccgcattctggtgcagccagggacaagaaatcggtagaatctgttccttctgagctccctccgccgccgccgctgccacaagaccacatcccactgagcttgtctgtggagaagtcacctatggatgtagaaactactgttggtacagagagtgctgagcagttgccggaacatgaggtcaataaggtgatagagcaggaagaggactatccaagtccaacaatgaggaacatatcgacttcaagatgggcgggtgcaaatgatgatgaggaaggtggggcagctccaatgaagaagagaagtgtttcacctgcagactcctctgtaccaggtcagtggaaacgagcaagcccagaacctggtgaagtctctggaggaagggcaatgtctaggtcatctgattcagggaaaataggtaatgatgagaaagaagattccgaggtcgataaagatgactatatggatgttgacagggagcatgctagtgacagtggtacagaaaactgtatgtcggatactgactcagacaatgaaatgtgcaggcctgaaacccctgaaccagagaggccaccacacaggtgtatcaatatgcttcaaggttgcagaagtgttgatgagtttgagaggctcaacaaaattaatgagggaacatatggtgttgtatacagagcaagggataagaagacaagtgagattgttgcattgaagaaggtaaagatggagagggagcgagaaggtttcccattaacctctcttagggaaataaatatcctcttgtctttccaccatccttcaatcgtggatgttaaggaagtagtagttggaagtagtttagatagcatttttatggttatggagtacatggaacatgatcttaaaggtgtcatggagaccatgaaacaaccatatacacaaagcgaggtcaaatgtttgatgcttcagctgctagagggtgtaaaatatctacatgacaattgggtactccatagggatctgaagacctcaaatcttttgctgaataaccgtgggccccagaactgttgttaggaacaaaggagtattctactgctattgatatgtggtccgtgggctgtataatggctgagctccttgccaaagaaccattatttaatggaaaaacagagtttgaacagctagataagatttttagaacacttggcacacctagcgagaagatttggcctggctatgctaaattaccaggcgtgaaagtaaattttgtcaaacaaccgtataataggctaagggataagttcccagctgcatctttttctgggcgaccaatcctgtctgaagctggttttgatctattgaatagactgctaacttatgatcctgataagcgcatatcagcagacgatgctctgaaacacaaatggttctctgaagttcctctgcctaaatcaaaagacttcatgccaacatttcctgctcttaatgaacttgacaggcgtaccaaacgttatctgaagagtcctgatcctctggaagagcaacgtctgaaagaactgcaagggaacataggcaaccgtgggctttttggctgaactaagagtacttgattggattcctgtccgtactaactgttatgcttcaccctgaatccacgaggtcagatgtcttctgaggattaacactccatccagattgatcataaaagcaaatataaaccgtcttcatcgtaaggtgtgacatgttggctttgaatgggtacaccagtttcacctttggaacttctgtatgtaaaatattccagattgagacgaaagaagcgcaggggaaggaagccttttgcttttatcaggaaatcaatgacattaatacaacttagaagctaagctgtggctgcttcaagataggaaagtgacaatttgtggagggccttcaaaagtgttttactagtgaaccatggtgaaaaacatgaagcgattggtttccgcaataaacaaagtgaaagttagcatgtagagtattgcaatacgtgcggtgccatttgaagttctg

SEQ ID NO: 210753 - DNA, 2710 bp, Zea Mays
tgagcggccgctctagcaggtagcagcagtcgcttccgtcccccttcctcttgtattcgcttcgccgcccaacccagcctccaccgctgccttcccgaccgttctcgccgccgctgtctcctcgcccaccaccccgcacggccggcgaccagcgcccacgcggccgctcgatccaaggccagaacgagcccaccacgatccgcatcacgccgatatttttcaggttgttggtacggatctagggttttcctgctgcggattcgttcgattcgctcatggccgctgggcgccatgggggttacagggactacgaggagagggagcgggagctcgacgcggaggcctccaggaggagcaaggagcagcaccaccatctcggcggccgccaccgcgacgtggaccgccgccgcgatggcgggcgcagcaggggtggtagagactttgccaacggccacggtcgccgacgttcgcccccgcccaggagccgcctcgcgggaaggcttggtgaccgtgagcctggcgaggtgctgagcggtagcgcatctgatgactccggtgggaggtcggatagagggagggaaaatggcgtgcgcagttctagcagggagggcgacatggtggcaggcactgggatctcgtcaccgatcaagaagaggaaattctcaccgataatttgggacagggatagcccaaagccaccgcattctggtgcagccagggacaagaaatcggtagaatctgttccttctgagctccctccgccgccgccgctgccacaagaccacatcccactgagcttgtctgtggagaagtcacctatggatgtagaaactactgttggtacagagagtgctgagcagttgccggaacatgaggtcaataaggtgatagagcaggaagaggactatccaagtccaacaatgaggaacatatcgacttcaagatgggcgggtgcaaatgatgatgaggaaggtggggcagctccaatgaagaagagaagtgtttcacctgcagactcctctgtaccaggtcagtggaaacgagcaagcccagaacctggtgaagtctctggaggaagggcaatgtctaggtcatctgattcagggaaaataggtaatgatgagaaagaagattccgaggtcgataaagatgactatatggatgttgacagggagcatgctagtgacagtggtacagaaaactgtatgtcggatactgactcagacaatgaaatgtgcaggcctgaaacccctgaaccagagaggccaccacacaggtgtatcaatatgcttcaaggttgcagaagtgttgatgagtttgagaggctcaacaaaattaatgagggaacatatggtgttgtatacagagcaagggataagaagacaagtgagattgttgcattgaagaaggtaaagatggagagggagcgagaaggtttcccattaacctctcttagggaaataaatatcctcttgtctttccaccatccttcaatcgtggatgttaaggaagtagtagttggaagtagtttagatagcatttttatggttatggagtacatggaacatgatcttaaaggtgtcatggagaccatgaaacaaccatatacacaaagcgaggtcaaatgtttgatgcttcagctgctagagggtgtaaaatatctacatgacaattgggtactccatagggatctgaagacctcaaatcttttgctgaataaccgtgggccccagaactgttgttaggaacaaaggagtattctactgctattgatatgtggtccgtgggctgtataatggctgagctccttgccaaagaaccattatttaatggaaaaacagagtttgaacagctagataagatttttagaacacttggcacacctagcgagaagatttggcctggctatgctaaattaccaggcgtgaaagtaaattttgtcaaacaaccgtataataggctaagggataagttcccagctgcatctttttctgggcgaccaatcctgtctgaagctggttttgatctattgaatagactgctaacttatgatcctgataagcgcatatcagcagacgatgctctgaaacacaaatggttctctgaagttcctctgcctaaatcaaaagacttcatgccaacatttcctgctcttaatgaacttgacaggcgtaccaaacgttatctgaagagtcctgatcctctggaagagcaacgtctgaaagaactgcaagggaacataggcaaccgtgggctttttggctgaactaagagtacttgattggattcctgtccgtactaactgttatgcttcaccctgaatccacgaggtcagatgtcttctgaggtgaggtgccatggacatgaagtatcacatcttctcggtgtctagcagcgactgatagtgttctttagcaggcttggtgccggtttgagtggataaggtttctccttgtggcccatcatagaaattttgttgcaggattaacactccatccagattgatcataaaagcaaatataaaccgtcttcatcgtaagctaagctgtggctgcttcaagataggaaagtgacaatttgtggagggccttcaaaagtgttttactagtgaaccatggtgaaaaacatgaagcgattggtttccgcaataaacaaagtgaaagttagcatgtagagtattgcaatacgtgcggtgccatttgaagttctg

SEQ ID NO: 210754 - DNA, 2938 bp, Zea Mays
tagcaggtagcagcagtcgcttccgtcccccttcctcttgtattcgcttcgccgcccaacccagcctccaccgctgccttcccgaccgttctcgccgccgctgtctcctcgcccaccaccccgcacggccggcgaccagcgcccacgcggccgctcgatccaaggccagaacgagcccaccacgatccgcatcacgccgatatttttcaggttgttggtacggatctagggttttcctgctgcggattcgttcgattcgctcatggccgctgggcgccatgggggttacagggactacgaggagagggagcgggagctcgacgcggaggcctccaggaggagcaaggagcagcaccaccatctcggcggccgccaccgcgacgtggaccgccgccgcgatggcgggcgcagcaggggtggtagagactttgccaacggccacggtcgccgacgttcgcccccgcccaggagccgcctcgcgggaaggcttggtgaccgtgagcctggcgaggtgctgagcggtagcgcatctgatgactccggtgggaggtcggatagagggagggaaaatggcgtgcgcagttctagcagggagggcgacatggtggcaggcactgggatctcgtcaccgatcaagaagaggaaattctcaccgataatttgggacagggatagcccaaagccaccgcattctggtgcagccagggacaagaaatcggtagaatctgttccttctgagctccctccgccgccgccgctgccacaagaccacatcccactgagcttgtctgtggagaagtcacctatggatgtagaaactactgttggtacagagagtgctgagcagttgccggaacatgaggtcaataaggtgatagagcaggaagaggactatccaagtccaacaatgaggaacatatcgacttcaagatgggcgggtgcaaatgatgatgaggaaggtggggcagctccaatgaagaagagaagtgtttcacctgcagactcctctgtaccaggtcagtggaaacgagcaagcccagaacctggtgaagtctctggaggaagggcaatgtctaggtcatctgattcagggaaaataggtaatgatgagaaagaagattccgaggtcgataaagatgactatatggatgttgacagggagcatgctagtgacagtggtacagaaaactgtatgtcggatactgactcagacaatgaaatgtgcaggcctgaaacccctgaaccagagaggccaccacacaggtgtatcaatatgcttcaaggttgcagaagtgttgatgagtttgagaggctcaacaaaattaatgagggaacatatggtgttgtatacagagcaagggataagaagacaagtgagattgttgcattgaagaaggtaaagatggagagggagcgagaaggtttcccattaacctctcttagggaaataaatatcctcttgtctttccaccatccttcaatcgtggatgttaaggaagtagtagttggaagtagtttagatagcatttttatggttatggagtacatggaacatgatcttaaaggtgtcatggagaccatgaaacaaccatatacacaaagcgaggtcaaatgtttgatgcttcagctgctagagggtgtaaaatatctacatgacaattgggtactccatagggatctgaagacctcaaatcttttgctgaataaccgtggtgagttaaaaatatgtgattttggactgtctcgtcaatatgggagcccattaaaaccttatactcaactggttgtgactttgtggtacagggccccagaactgttgttaggaacaaaggagtattctactgctattgatatgtggtccgtgggctgtataatggctgagctccttgccaaagaaccattatttaatggaaaaacagagtttgaacagctagataagatttttagaacacttggcacacctagcgagaagatttggcctggctatgctaaattaccaggcgtgaaagtaaattttgtcaaacaaccgtataataggctaagggataagttcccagctgcatctttttctgggcgaccaatcctgtctgaagctggttttgatctattgaatagactgctaacttatgatcctgataagcgcatatcagcagacgatgctctgaaacacaaatggttctctgaagttcctctgcctaaatcaaaagacttcatgccaacatttcctgctcttaatgaacttgacaggcgtaccaaacgttatctgaagagtcctgatcctctggaagagcaacgtctgaaagaactgcaagggaacataggcaaccgtgggctttttggctgaactaagagtacttgattggattcctgtccgtactaactgttatgcttcaccctgaatccacgaggtcagatgtcttctgaggtgaggtgccatggacatgaagtatcacatcttctcggtgtctagcagcgactgatagtgttctttagcaggcttggtgccggtttgagtggataaggtttctccttgtggcccatcatagaaattttgttgcaggattaacactccatccagattgatcataaaagcaaatataaaccgtcttcatcgtaaggtgtgacatgttggctttgaatgggtacaccagtttcacctttggaacttctgtatgtaaaatattccagattggtacgttgtaaacaatccccagtgtgtcggatttaaatttaaataaaacatcatcattattagttttcttcatgctccttgtgccttttcttttgatctttgcattttgtttgcaagagacgaaagaagcgcaggggaaggaagccttttgcttttatcaggaaatcaatgacattaatacaacttagaaggtgaattaattgtgagatatgtccacaacaaattcggaacttgaactaatgtgtg

SEQ ID NO: 210755 - DNA, 850 bp, Zea Mays
acggcacccacaatacggcacgcgggcgggcgggcgggcacggtgccccacgcctttcacggatcgggcagctgtccccgtccacgccgcgcaccgcgccccgtcctcgccaccccgaaatgcacacgcacacgccttgtccttgcttgcttccttggcaccaccgcctcccctcctctccttattaccaccacctagctagcagcggcagcggcagcaccggcctgttgtgctgctcgctcagacagctctgctagctgcatcctcctaactctccaggtctctctctcctctcccaactcccaagtcccatccggatcgagacgctggaggcggagcgcccccccgggacggcggcggcgacgatggggcgcggcaagatcgagatcaagcggatcgagaacgccaccaaccgccaggtgacctactccaagcgccggacggggatcatgaagaaggcgcgcgagctcaccgtgctctgcgacgcccaggtcgccatcatcatgttctcctccaccggcaagtaccacgagttctgcagccccggaaccgacatcaagaccatctttgaccggtaccagcaggccatcgggaccagcctatggatcgagcagtatgagaatatgcagcgcacgctgagccatctcaaggacatcaatcgtggtctgcgcacagagattaggcaaaggatgggcgaggatctggacagtctggacttcgacgagctgcgcggcctcgagcaaaacgtcgacgcggctctcaaggaggttcgccataggaagtaccatgtgatcagcacgcagactgatacctacaagaaaaagatgaggaccgagggtgtaggctttat

SEQ ID NO: 210756 - DNA, 1025 bp, Zea Mays
atttagcgctcgtggaaaggagacgtctctgaaccgaggctgcgactgcgagggcatcagggcagcgaggcctcttgtcgcgtgaatcccctcgagagccgccggcggagccatggcgcggtccccagctgcctcctcctcctcctacacggatagcacgggatcctcctccgactcaggctccagctcatcgggaatcgaccgccgccgccgccgccaccgccatcggagcagccgccgcaaggagggcacgtcctcgtccgcgctgaaggcgcgcaaggaccggaggtcccgccacaagcgccgccgccacgagcgggagcggcggcggtccgcgtccgacgacgacagctacagcacaagctcttatgacagtgaccgtgaggtgtctggcagatctcggaaacataagaagagcagcagatcaagaaagggagagggagcggagcaaagatagacatcatagacgagacaagagtaaacacaaagagaagaaagagagtgagcatgctgatggccctgtccagctttccaagtttcttggacgggacaaagaaaaggaagaaggtactcaacggagtgcaatctctggtaaaaagataatgatgaagcttgagaagacaaaggaagacaaggcagcagagagcaagcgaaacgaactgttgaagtttctgaatgccagttacgattgatgtgttcgaatcgctggcgcagaaagtgcagaatgcccttttttatcgtctttgcactggtgcttttggtgatacttaagttataaacgttttgtttcttgtctataacttggccaccaaagttttgttatgcttaactagtgactgagtgaaggtctacatgtaattgatttgaattctgtgttgccagtcatggatttgcagcttttaaacccatcctttttgtgattgctccttgtctttgtcaatgtcaaactgtttcactggcgattcattgttcttggcggcttactgccgtggatataaccattttgactcgagtgccactgcctg

SEQ ID NO: 210757 - DNA, 1048 bp, Zea Mays
gtcctttttcttgagaggatttagcgctcgtggaaaggagacgtctctgaaccgaggctgcgactgcgagggcatcagggcagcgaggcctcttgtcgcgtgaatcccctcgagagccgccggcggagccatggcgcggtccccagctgcctcctcctcctcctacacggatagcacgggatcctcctccgactcaggctccagctcatcgggaatcgaccgccgccgccgccgccaccgccatcggagcagccgccgcaaggagggcacgtcctcgtccgcgctgaaggcgcgcaaggaccggaggtcccgccacaagcgccgccgccacgagcgggagcggcggcggtccgcgtccgacgacgacagctacagcacaagctcttatgacagtgaccgtgaggtgtctggcagatctcggaaacataagaagagcagcagatcaagaaagtttagggagagggagcggagcaaagatagacatcatagacgagacaagagtaaacacaaagagaagaaagagagtgagcatgctgatggccctgtccagctttccaagtttcttggacgggacaaagaaaaggaagaaggtactcaacggagtgcaatctctggtaaaaagataatgatgaagcttgagaagacaaaggaagacaaggcagcagagagcaagcgaaacgaactgttgaagtttctgaatgccagttacgattgatgtgttcgaatcgctggcgcagaaagtgcagaatgcccttttttatcgtctttgcactggtgcttttggtgatacttaagttataaacgttttgtttcttgtctataacttggccaccaaagttttgttatgcttaactagtgactgagtgaaggtctacatgtaattgatttgaattctgtgttgccagtcatggatttgcagcttttaaacccatcctttttgtgattgctccttgtctttgtcaatgtcaaactgtttcactggcgattcattgttcttggcggcttactgccgtggatataaccattttgactcgagtgccactgcctg

SEQ ID NO: 210758 - DNA, 995 bp, Zea Mays
aaaaatggcagcagcctttccaccaaaaatggtaacggcagcaacccccctccatgtttatgagatccgataaatcctccaccaatcaccagtgccaaatcagttccttgccgtgcctaattcaccttcccatccttggcactagcggattcgtagcctccagtccttcagcctctccatccgatttggcgcaaatgcctccagggaggaaggggcaacgatgcacaagggaaaccccagggaacaaaaggccagagccacgtattcaagctgctaagtttgcatgagagggtggtattcacgtttttttgtctttctcttcaaagctttctcctgtcggaagcagttatcaagcttgatttcaaggaaagttgtgtgaagaacaaacttaatcgtaaaaatgtacaatatcaacaatgcacatgctctcagtcctacattgcaaaggctattatattgcacaatttaacatggaagaaatggtagcagcaccatttcaggatggacaacaaccaaaatctcctacagaagttgtttctaatgtgctactgggctccagtgtgttcctacacaatgttggtcttcagtctgcctccaagaaaagctccacaacaactgtttcggcaatggctcaacaacttcaggatgaactagagatcgagaagcaagaaaaagatggccttcaggaagaagtggaaaccttgaaggcttaagcacaagcatctcaggagaccactgatagtatgaagaggtcgatggaagaaaataacaacctccttcgtctactattaagcttcaatcgaggccaagtgcctccatcttaagtctggttgaccactataggacctgcagccttatggctgctatagtggctagcaatagtagctctagatttgaagttatcggatcattttaaattatgcttaatgtttaatactttgagttgaagttattggatttgttttggattttaagttaaaggatttgcagatata

SEQ ID NO: 210759 - DNA, 5090 bp, Zea Mays
aaaaccgtggccttgtgtattggacttcttttggaaacttcattttgaaaattagtgccggccggatgccttccacgcgtgctctttcagtctttcttcattcttcttcctatgtgaacaatataggtggtgggaccctgctggggcttattccttatcggaaatagagcaacaagttcacttggataaaaagaagaaacagcttgcgtacgtataacaaggagtcctttattattattcttattatcttagtgtaaatattattattattaggggcgtttacagcgtagcaagttcactcttgcaagcaagggacttttacaagagcatgtagctagttagttcatttggagtgtgaacatgtcttatttgcacacttgcttttttcccctctctttattttctccatcttcaggatggctattattagctcctttgcatgcgttcatggaattctgcgtcagaaaaccaaaacggaaaatagcattattggtcagtgtaatatacatgatatatatatgctacggtggagttattaggatgatatatctctactactacttatgttagtagtgtaggcgtccacacaccctctcggcgcatggttctgcctctgcagccgcgacacccgcgcgtgccttcgcctccgccgccgcgatggccgtgcctctgcccccgcctcctccgccctcgcgacgctgcgccctcccccgcgatgcctgcgccttcgtccccgtgatgctcgcgcctacccccgcctcctctgcccccgcgacaccgcgcgcgcagcctcctccccgcgatgcccgcccaagctcccaaatgccggcccccgtctcctccaccgcgactcccctcgctctcccgagactcccagatgctggcccccgtatcctcggccctgatgccgccgcgattcccagatgccggcccccgtatcctcggccccgcgctcgctctcctgagctccgacgggctcccgccctagcccctgacaccatgttgtgcccaaccctaaacctagccaccacgccgtcaacaacgccaccttccttcctcgccaccacaccttctttagatggaaggcgcgactggtggcatcttcctgatctcggagcacgtctaatcctcgctccaaatgctgctccgcccccaatccgtgcggcatcttcagatggaagccgggacaatgccccatccccctctcccgagccccgacgactgacattccagggatgtcgctctgcgatcctcacctcctcgtcgttggcggtcgcgcgacctcctgaccgtcgtctccgcccgcgagatccccccgactcgcccacctctccgtccacagccgcctccatcacgcacctccacgccgacgagaaggctcgcccacctctcagtccacgactgcctacgacgcgtcttctgaataaagatctctcgaagcacccggtggatgggttctctgctgggctggtcgacgacagcaatgtcttcgagtggcaggtcaccatcatcggaccgcctgacaccctatagattggttgttggacctgtttggtgttcttcatgatgggaagaagtcgtacccgaccattctggcatgtatgttggtagtttctctcgaggtttgtttcctgtcacttctgcttagcatcagaatggatttagtgtaatcggtttttcattttttcatactatagaacttggtttgcaagttgtgaacaatgttgatgatgcagagtttatattagcccatggtactgaagtctttggttcaccttctagcaatcctcttcccaaaagtctcgagaagcttgagcaggttctaatgcttggcctagaaaagggacttccaatggtgctgcctaatccagaattccagattatgtcactgtcgaagcttgagatcttcgtgtcatgtctgggtttggaggctcgtcggcaaccggacaggaaaacagcaaggcggaagggcattgctcgatcgctggtccgatgagtggcactgtcagggagcgtgacaggggcgacaaatctagacctccacgtcggtaagatgttgtggcaaaatgtcagtgagctcacattttgaggagctgagggtcaatgtcagcgagctcactgttgaggagctgagggtccctgagtacctgcagttcaaggaacaacttatggaagaagggtatgaattcttatattcaccaatgaagatgatccttttggtactattacaggagcaacaacaataataatcaatggcacctaaacattttcttatcctctaagttcatgtatttcatgtttactaatcattcctattttagctttaaggttgaggctgggagaacttaccatcggacagttctagagatacttgaccaattggaaaaagtatgtatgttcctaacttttctatttgagtatatttatatatattgggttgcttgttggaactaattttttgcgctccgaacttctgaaaatctttgccatatccatttgatgattatgttctgattaagtgatggtgtctaagcaccaaaaatgaaagcaccctgactcccgcaactgaaaattgatatcaaggtctttctgtttgatcttgttcactgagaatatgatgtacccattcacattctttgctttcccatatatttttctagctttcaataggatccttgtgaacccaatccactatcatttctgcttaagttgtctccctaaaatgaaagaagtatagacattgacttaggaagcatgacgaggtaaaatgaaaattaaacaaatcctgactatagcacacattcacgccaaagaccttaaattgcttcatgttttagcccatttcccagtgtgtgaatggtgttgttgatcctgaaataaaattgttggttttctgtgctgtttttcttcacaaattctggacagtaggtatgattcatttttatcactgaatatattagaattcttatcttttcagtgtgcaaaatcatgttctcctattgatagaagcatttatttagatttggcttacattgatggatgaatatgatttatatgaagttcctggtatctatcggcttcatggtatatctctactactcttaagaagataccagataataacaaggcaaatagatggttactgtggcagtcaaaagtttgaagccagatgcgcttcaaggtcatagagaatgggtggcagaagttgactttctgggacagttgcatcataaacaccttattaagctgattggatattgtattgaggatgatcaaaggttacttgtatatgaatttcatggcacggggaagtcttgaaaatcatcttttcagaaggactcttcccctaccttggtccaacaggatgaagattgctctaggtgccgcgaaaggactagccttcctccatggaggtcccaaacctgttatttacaaggattttaagacattgaatgttcttcttgatgtggagtacaacgcaaaactatctgatttcggtttagcaaaagctggtcatcagggtgaaaaaactcatgtatctactcgggttgttggcacctatggttatgttgcaccagagtatgtaatgacaggtatcagggataaacttttgacttcagtagctacctatagcagaaattatgtaccttgtttatctgttgcatgttggttctttacactgttttctgagcttgtagttattctcgtgttcactccatattggatagtaaattggcttaacatttttgtccgaagacataaaactaaggtgccattacaaatgttcttctttcaagtgaaactgtgtttttcgtttttacatgcagtaaaggttgtaaggctgtagacttatataatgaatcttgcgctccacttctttgggacatgatttaacatttcttaacatttctcactctataacgctttcagatcacttttcatatgttttttagatgcactttttttttggagactaagccctaagggcaacaatggagatgaccagcgtcttggtttatcaagaggaagttaatccctctcaactgaaactcccatcaaatttggggcgtagtgtgtcgattcagttgtaactattatatgtcattttgggttagcaaactgtatctactaatttctcagacttatgccttttgagctagaaacttgtgtaagaattttttgcactcagtgacatgctggatagtgcgagtagcagattacaatagtgacggatgaacattgtattttactttacatgatggatttttttgatgtgtaaggcttttaaggcatgtaaaaattcttaacttttaaaagatgctaacacgaatataaaattgcaatcattattcttgaatttcaatgtatcttatcataacatgttcactccgtagcaacgtacgggcatttacctagtatatatatatatacgcacgtggtgcagtcgaagttgagggtgagcgggaacggcagcggcgcgccgcactgcgcggggaggtcgcggatggcgtcggcgttgagcggctggtaattggccgccgcctgcttgacgcactcgcacgcctgccgccgctccgccgggccggacggcatggccctgatccgcttcacgccggcgcagcactcggcggccggggccgcctccttgcccgtcacgtagccgacgcaggggcgcaggcttgcgtccacgtccgcgcagttcacgtccgccctaaccgccgccgccgccagcaggaccaacgccactgctgccaccgctgttgttgcggcgccgcccttcttcttcatcatcgccatcgatcgatctgtgtctctctctctcccgaacttgacttgctgctgctggagctcgatcttagcttgttgctgctgcgttcatggagcggctcgagcgctggggttttatagggcttgctgggtcggcgaagcggttcagcatcttgttggtgctgatgttgctcgtaatggcagcgctttgagtgatgcattggtacgccaaaactggcagatggatagggtcccttttttttggccataccgtgcatgaacgccacggctagctgccgttgcaaccgtttaatgcttcgctt

SEQ ID NO: 210760 - DNA, 5368 bp, Zea Mays
ggaccctgctggggcttattccttatcggaaatagagcaacaagttcacttggataaaaagaagaaacagcttgcgtacgtataacaaggagtcctttattattattcttattatcttagtgtaaatattattattattaggggcgtttacagcgtagcaagttcactcttgcaagcaagggacttttacaagagcatgtagctagttagttcatttggagtgtgaacatgtcttatttgcacacttgcttttttcccctctctttattttctccatcttcaggatggctattattagctcctttgcatgcgttcatggaattctgcgtcagaaaaccaaaacggaaaatagcattattggtcagtgtaatatacatgatatatatatgctacggtggagttattaggatgatatatctctactactacttatgttagtagtgtaggcgtccacacaccctctcggcgcatggttctgcctctgcagccgcgacacccgcgcgtgccttcgcctccgccgccgcgatggccgtgcctctgcccccgcctcctccgccctcgcgacgctgcgccctcccccgcgatgcctgcgccttcgtccccgtgatgctcgcgcctacccccgcctcctctgcccccgcgacaccgcgcgcgcagcctcctccccgcgatgcccgcccaagctcccaaatgccggcccccgtctcctccaccgcgactcccctcgctctcccgagactcccagatgctggcccccgtatcctcggccctgatgccgccgcgattcccagatgccggcccccgtatcctcggccccgcgctcgctctcctgagctccgacgggctcccgccctagcccctgacaccatgttgtgcccaaccctaaacctagccaccacgccgtcaacaacgccaccttccttcctcgccaccacaccttctttagatggaaggcgcgactggtggcatcttcctgatctcggagcacgtctaatcctcgctccaaatgctgctccgcccccaatccgtgcggcatcttcagatggaagccgggacaatgccccatccccctctcccgagccccgacgactgacattccagggatgtcgctctgcgatcctcacctcctcgtcgttggcggtcgcgcgacctcctgaccgtcgtctccgcccgcgagatccccccgactcgcccacctctccgtccacagccgcctccatcacgcacctccacgccgacgagaaggctcgcccacctctcagtccacgactgcctacgacgcgtcttctgaataaagatctctcgaagcacccggtggatgggttctctgctgggctggtcgacgacagcaatgtcttcgagtggcaggtcaccatcatcggaccgcctgacaccctatatagaacaattcaacatattcagatcagggtcatggatatgttctcggtcaagagtctttatctctactcggattggttgttggacctgtttggtgttcttcatgatgggaagaagtcgtacccgaccattctggcatgtatgttggtagtttctctcgaggtttgtttcctgtcacttctgcttagcatcagaatggatttagtgtaatcggtttttcattttttcatactatagaacttggtttgcaagttgtgaacaatgttgatgatgcagagtttatattagcccatggtactgaagtctttggttcaccttctagcaatcctcttcccaaaagtctcgagaagcttgagcaggttctaatgcttggcctagaaaagggacttccaatggtgctgcctaatccagaattccagattatgtcactgtcgaagcttgagatcttcgtgtcatgtctggtatgttttttttgaacacgctggacatgtgtgtatccttatagagtagagagataaaatgagaaacaatcccatacaaagcaacttctccaccttacctaggagataagataaagttgaagcaaaacaccaaagttaatcatctaatatacatgtaaacaatgaaccgaccttactgaaaacactcgcactggaccctctctgcgaccaaaaaaatagctcctagagtttttagggactagaggctcaactcatctttgtagaagtgttgtgctgatggaagtgatggggttgcaccataaaaaatgttcctgtaattccataagtacttatacaatagggtttggaggctcgtcggcaaccggacaggaaaacagcaaggcggaagggcattgctcgatcgctggtccgatgagtggcactgtcagggagcgtgacaggggcgacaaatctagacctccacgtcggtaagatgttgtggcaaaatgtcagtgagctcacattttgaggagctgagggtcaatgtcagcgagctcactgttgaggagctgagggtccctgagtacctgcagttcaaggaacaacttatggaagaagggtatgaattcttatattcaccaatgaagatgatccttttggtactattacaggagcaacaacaataataatcaatggcacctaaacattttcttatcctctaagttcatgtatttcatgtttactaatcattcctattttagctttaaggttgaggctgggagaacttaccatcggacagttctagagatacttgaccaattggaaaaagtatgtatgttcctaacttttctatttgagtatatttatatatattgggttgcttgttggaactaattttttgcgctccgaacttctgaaaatctttgccatatccatttgatgattatgttctgattaagtgatggtgtctaagcaccaaaaatgaaagcaccctgactcccgcaactgaaaattgatatcaaggtctttctgtttgatcttgttcactgagaatatgatgtacccattcacattctttgctttcccatatatttttctagctttcaataggatccttgtgaacccaatccactatcatttctgcttaagttgtctccctaaaatgaaagaagtatagacattgacttaggaagcatgacgaggtaaaatgaaaattaaacaaatcctgactatagcacacattcacgccaaagaccttaaattgcttcatgttttagcccatttcccagtgtgtgaatggtgttgttgatcctgaaataaaattgttggttttctgtgctgtttttcttcacaaattctggacagtaggtatgattcatttttatcactgaatatattagaattcttatcttttcagtgtgcaaaatcatgttctcctattgatagaagcatttatttagatttggcttacattgatggatgaatatgatttatatgaagttcctggtatctatcggcttcatggtatatctctactactcttaagaagataccagataataacaaggcaaatagatggttactgtggcagtcaaaagtttgaagccagatgcgcttcaaggtcatagagaatgggtggcagaagttgactttctgggacagttgcatcataaacaccttattaagctgattggatattgtattgaggatgatcaaaggttacttgtatatgaatttcatggcacggggaagtcttgaaaatcatcttttcagaaggactcttcccctaccttggtccaacaggatgaagattgctctaggtgccgcgaaaggactagccttcctccatggaggtcccaaacctgttatttacaaggattttaagacattgaatgttcttcttgatgtggagtacaacgcaaaactatctgatttcggtttagcaaaagctggtcatcagggtgaaaaaactcatgtatctactcgggttgttggcacctatggttatgttgcaccagagtatgtaatgacaggtatcagggataaacttttgacttcagtagctacctatagcagaaattatgtaccttgtttatctgttgcatgttggttctttacactgttttctgagcttgtagttattctcgtgttcactccatattggatagtaaattggcttaacatttttgtccgaagacataaaactaaggtgccattacaaatgttcttctttcaagtgaaactgtgtttttcgtttttacatgcagtaaaggttgtaaggctgtagacttatataatgaatcttgcgctccacttctttgggacatgatttaacatttcttaacatttctcactctataacgctttcagatcacttttcatatgttttttagatgcactttttttttggagactaagccctaagggcaacaatggagatgaccagcgtcttggtttatcaagaggaagttaatccctctcaactgaaactcccatcaaatttggggcgtagtgtgtcgattcagttgtaactattatatgtcattttgggttagcaaactgtatctactaatttctcagacttatgccttttgagctagaaacttgtgtaagaattttttgcactcagtgacatgctggatagtgcgagtagcagattacaatagtgacggatgaacattgtattttactttacatgatggatttttttgatgtgtaaggcttttaaggcatgtaaaaattcttaacttttaaaagatgctaacacgaatataaaattgcaatcattattcttgaatttcaatgtatcttatcataacatgttcactccgtagcaacgtacgggcatttacctagtatatatatatatacgcacgtggtgcagtcgaagttgagggtgagcgggaacggcagcggcgcgccgcactgcgcggggaggtcgcggatggcgtcggcgttgagcggctggtaattggccgccgcctgcttgacgcactcgcacgcctgccgccgctccgccgggccggacggcatggccctgatccgcttcacgccggcgcagcactcggcggccggggccgcctccttgcccgtcacgtagccgacgcaggggcgcaggcttgcgtccacgtccgcgcagttcacgtccgccctaaccgccgccgccgccagcaggaccaacgccactgctgccaccgctgttgttgcggcgccgcccttcttcttcatcatcgccatcgatcgatctgtgtctctctctctcccgaacttgacttgctgctgctggagctcgatcttagcttgttgctgctgcgttcatggagcggctcgagcgctggggttttatagggcttgctgggtcggcgaagcggttcagcatcttgttggtgctgatgttgctcgtaatggcagcgctttgagtgatgcattggtacgccaaaactggcagatggatagggtcccttttttttggccataccgtgcatgaacgccacggctagctgccgttgcaaccgtttaatgcttcgctt

SEQ ID NO: 210761 - DNA, 4357 bp, Zea Mays
ataacaaggagtcctttattattattcttattatcttagtgtaaatattattattattaggggcgtttacagcgtagcaagttcactcttgcaagcaagggacttttacaagagcatgtagctagttagttcatttggagtgtgaacatgtcttatttgcacacttgcttttttcccctctctttattttctccatcttcaggatggctattattagctcctttgcatgcgttcatggaattctgcgtcagaaaaccaaaacggaaaatagcattattggtcagtgtaatatacatgatatatatatgctacggtggagttattaggatgatatatctctactactacttatgttagtagtgtaggcgtccacacaccctctcggcgcatggttctgcctctgcagccgcgacacccgcgcgtgccttcgcctccgccgccgcgatggccgtgcctctgcccccgcctcctccgccctcgcgacgctgcgccctcccccgcgatgcctgcgccttcgtccccgtgatgctcgcgcctacccccgcctcctctgcccccgcgacaccgcgcgcgcagcctcctccccgcgatgcccgcccaagctcccaaatgccggcccccgtctcctccaccgcgactcccctcgctctcccgagactcccagatgctggcccccgtatcctcggccctgatgccgccgcgattcccagatgccggcccccgtatcctcggccccgcgctcgctctcctgagctccgacgggctcccgccctagcccctgacaccatgttgtgcccaaccctaaacctagccaccacgccgtcaacaacgccaccttccttcctcgccaccacaccttctttagatggaaggcgcgactggtggcatcttcctgatctcggagcacgtctaatcctcgctccaaatgctgctccgcccccaatccgtgcggcatcttcagatggaagccgggacaatgccccatccccctctcccgagccccgacgactgacattccagggatgtcgctctgcgatcctcacctcctcgtcgttggcggtcgcgcgacctcctgaccgtcgtctccgcccgcgagatccccccgactcgcccacctctccgtccacagccgcctccatcacgcacctccacgccgacgagaaggctcgcccacctctcagtccacgactgcctacgacgcgtcttctgaataaagatctctcgaagcacccggtggatgggttctctgctgggctggtcgacgacagcaatgtcttcgagtggcaggtcaccatcatcggaccgcctgacaccctatagattggttgttggacctgtttggtgttcttcatgatgggaagaagtcgtacccgaccattctggcataacttggtttgcaagttgtgaacaatgttgatgatgcagagtttatattagcccatggtactgaagtctttggttcaccttctagcaatcctcttcccaaaagtctcgagaagcttgagcaggttctaatgcttggcctagaaaagggacttccaatggtgctgcctaatccagaattccagattatgtcactgtcgaagcttgagatcttcgtgtcatgtctggtatgttttttttgaacacgctggacatgtgtgtatccttatagagtagagagataaaatgagaaacaatcccatacaaagcaacttctccaccttacctaggagataagataaagttgaagcaaaacaccaaagttaatcatctaatatacatgtaaacaatgaaccgaccttactgaaaacactcgcactggaccctctctgcgaccaaaaaaatagctcctagagtttttagggactagaggctcaactcatctttgtagaagtgttgtgctgatggaagtgatggggttgcaccataaaaaatgttcctgtaattccataagtacttatacaatagggtttggaggctcgtcggcaaccggacaggaaaacagcaaggcggaagggcattgctcgatcgctggtccgatgagtggcactgtcagggagcgtgacaggggcgacaaatctagacctccacgtcggtaagatgttgtggcaaaatgtcagtgagctcacattttgaggagctgagggtcaatgtcagcgagctcactgttgaggagctgagggtccctgagtacctgcagttcaaggaacaacttatggaagaagggtatgaattcttatattcaccaatgaagatgatccttttggtactattacaggagcaacaacaataataatcaatggcacctaaacattttcttatcctctaagttcatgtatttcatgtttactaatcattcctattttagctttaaggttgaggctgggagaacttaccatcggacagttctagagatacttgaccaattggaaaaagtatgtatgttcctaacttttctatttgagtatatttatatatattgggttgcttgttggaactaattttttgcgctccgaacttctgaaaatctttgccatatccatttgatgattatgttctgattaagtgatggtgtctaagcaccaaaaatgaaagcaccctgactcccgcaactgaaaattgatatcaaggtctttctgtttgatcttgttcactgagaatatgatgtacccattcacattctttgctttcccatatatttttctagctttcaataggatccttgtgaacccaatccactatcatttctgcttaagttgtctccctaaaatgaaagaagtatagacattgacttaggaagcatgacgaggtaaaatgaaaattaaacaaatcctgactatagcacacattcacgccaaagaccttaaattgcttcatgttttagcccatttcccagtgtgtgaatggtgttgttgatcctgaaataaaattgttggttttctgtgctgtttttcttcacaaattctggacagtaggtatgattcatttttatcactgaatatattagaattcttatcttttcagtgtgcaaaatcatgttctcctattgatagaagcatttatttagatttggcttacattgatggatgaatatgatttatatgaagttcctggtatctatcggcttcatggtatatctctactactcttaagaagataccaggtatgttcctttcctttcttttattttcttagccccatctttatcatgttttcaccattacagagtttgcctaccgcccccgttcgcccgcaagcaaactctagccgaggaagacgcggtttctcacctctgcgccctcgccagtcccacgagccccgccttccctagcctctcaatgcctccagattctctaccccttgccccccagtcgttgtttccgcccgcgccgctgacccatgacctcgcatgcggggctagggtttccacatgcgatggaagtagcggtgatgactttgctgttgtttgcatctgcctcgacttcctcggtccggtcttgccatctaccagcgctgcctaggtttgcctctcctgtcctgcagtgctgaagttccgcgtgtgctggttggtgtgtgttacgcgtcttggaacgagagggcaacttcgatgcggggctttgattggctgttttgtttgtggtgggggtagttgggtttgcgacattttttaggaaaccgattggtttcgtttcagcttgttttcagagaagggatagtggatttgtcaacactagactggattccataaaaatttgatagaatcagtgctttcagctttgagctagactacacatttttctgtgaggttgcaccatttttccctagataacttctatgttgaaatggtttagttctgaagctgtcattgttagataataacaaggcaaatagatggttactgtggcagtcaaaagtttgaagccagatgcgcttcaaggtcatagagaatgggtggcagaagttgactttctgggacagttgcatcataaacaccttattaagctgattggatattgtattgaggatgatcaaaggttacttgtatatgaatttcatggcacggggaagtcttgaaaatcatcttttcagaagtaagcaatcacctaacagagttaatgctttaagttgagtagatttagtggctttattaataatttgtttccccacttaggcctaaccagtttttttcttcactaagtcttctttcattttttgagcaaccttggatttttttggttctctatcctctgtgacatcagagataattacattctaacttgatttgattatggtaatgtagacctgaacattttaacctgcccttattaagtttgatctgttccagttacacctgttcagatcttcttagttaaat

SEQ ID NO: 210762 - DNA, 4941 bp, Zea Mays
ataacaaggagtcctttattattattcttattatcttagtgtaaatattattattattaggggcgtttacagcgtagcaagttcactcttgcaagcaagggacttttacaagagcatgtagctagttagttcatttggagtgtgaacatgtcttatttgcacacttgcttttttcccctctctttattttctccatcttcaggatggctattattagctcctttgcatgcgttcatggaattctgcgtcagaaaaccaaaacggaaaatagcattattggtcagtgtaatatacatgatatatatatgctacggtggagttattaggatgatatatctctactactacttatgttagtagtgtaggcgtccacacaccctctcggcgcatggttctgcctctgcagccgcgacacccgcgcgtgccttcgcctccgccgccgcgatggccgtgcctctgcccccgcctcctccgccctcgcgacgctgcgccctcccccgcgatgcctgcgccttcgtccccgtgatgctcgcgcctacccccgcctcctctgcccccgcgacaccgcgcgcgcagcctcctccccgcgatgcccgcccaagctcccaaatgccggcccccgtctcctccaccgcgactcccctcgctctcccgagactcccagatgctggcccccgtatcctcggccctgatgccgccgcgattcccagatgccggcccccgtatcctcggccccgcgctcgctctcctgagctccgacgggctcccgccctagcccctgacaccatgttgtgcccaaccctaaacctagccaccacgccgtcaacaacgccaccttccttcctcgccaccacaccttctttagatggaaggcgcgactggtggcatcttcctgatctcggagcacgtctaatcctcgctccaaatgctgctccgcccccaatccgtgcggcatcttcagatggaagccgggacaatgccccatccccctctcccgagccccgacgactgacattccagggatgtcgctctgcgatcctcacctcctcgtcgttggcggtcgcgcgacctcctgaccgtcgtctccgcccgcgagatccccccgactcgcccacctctccgtccacagccgcctccatcacgcacctccacgccgacgagaaggctcgcccacctctcagtccacgactgcctacgacgcgtcttctgaataaagatctctcgaagcacccggtggatgggttctctgctgggctggtcgacgacagcaatgtcttcgagtggcaggtcaccatcatcggaccgcctgacaccctatagattggttgttggacctgtttggtgttcttcatgatgggaagaagtcgtacccgaccattctggcataacttggtttgcaagttgtgaacaatgttgatgatgcagagtttatattagcccatggtactgaagtctttggttcaccttctagcaatcctcttcccaaaagtctcgagaagcttgagcaggttctaatgcttggcctagaaaagggacttccaatggtgctgcctaatccagaattccagattatgtcactgtcgaagcttgagatcttcgtgtcatgtctgggtttggaggctcgtcggcaaccggacaggaaaacagcaaggcggaagggcattgctcgatcgctggtccgatgagtggcactgtcagggagcgtgacaggggcgacaaatctagacctccacgtcggtaagatgttgtggcaaaatgtcagtgagctcacattttgaggagctgagggtcaatgtcagcgagctcactgttgaggagctgagggtccctgagtacctgcagttcaaggaacaacttatggaagaagggtatgaattcttatattcaccaatgaagatgatccttttggtactattacaggagcaacaacaataataatcaatggcacctaaacattttcttatcctctaagttcatgtatttcatgtttactaatcattcctattttagctttaaggttgaggctgggagaacttaccatcggacagttctagagatacttgaccaattggaaaaaatttggcttacattgatggatgaatatgatttatatgaagttcctggtatctatcggcttcatggtatatctctactactcttaagaagataccaggtatgttcctttcctttcttttattttcttagccccatctttatcatgttttcaccattacagagtttgcctaccgcccccgttcgcccgcaagcaaactctagccgaggaagacgcggtttctcacctctgcgccctcgccagtcccacgagccccgccttccctagcctctcaatgcctccagattctctaccccttgccccccagtcgttgtttccgcccgcgccgctgacccatgacctcgcatgcggggctagggtttccacatgcgatggaagtagcggtgatgactttgctgttgtttgcatctgcctcgacttcctcggtccggtcttgccatctaccagcgctgcctaggtttgcctctcctgtcctgcagtgctgaagttccgcgtgtgctggttggtgtgtgttacgcgtcttggaacgagagggcaacttcgatgcggggctttgattggctgttttgtttgtggtgggggtagttgggtttgcgacattttttaggaaaccgattggtttcgtttcagcttgttttcagagaagggatagtggatttgtcaacactagactggattccataaaaatttgatagaatcagtgctttcagctttgagctagactacacatttttctgtgaggttgcaccatttttccctagataacttctatgttgaaatggtttagttctgaagctgtcattgttagataataacaaggcaaatagatggttactgtggcagtcaaaagtttgaagccagatgcgcttcaaggtcatagagaatgggtggcagaagttgactttctgggacagttgcatcataaacaccttattaagctgattggatattgtattgaggatgatcaaaggttacttgtatatgaatttcatggcacggggaagtcttgaaaatcatcttttcagaagatgaagattgctctaggtgccgcgaaaggactagccttcctccatggaggtcccaaacctgttatttacaaggattttaagacattgaatgttcttcttgatgtggtactttatctgttcaatctatttcatattgtgcctagacaatgcacgctaccttgttaattgtggtgattttacttcttttttttgaacatgtggtgattttacttctgtaggagtacaacgcaaaactatctgatttcggtttagcaaaagctggtcatcagggtgaaaaaactcatgtatctactcgggttgttggcacctatggttatgttgcaccagagtatgtaatgacaggtatcagggataaacttttgacttcagtagctacctatagcagaaattatgtaccttgtttatctgttgcatgttggttctttacactgttttctgagcttgtagttattctcgtgttcactccatattggatagtaaattggcttaacatttttgtccgaagacataaaactaaggtgccattacaaatgttcttctttcaagtgaaactgtgtttttcgtttttacatgcagtaaaggttgtaaggctgtagacttatataatgaatcttgcgctccacttctttgggacatgatttaacatttcttaacatttctcactctataacgctttcagatcacttttcatatgttttttagatgcactttttttttggagactaagccctaagggcaacaatggagatgaccagcgtcttggtttatcaagaggaagttaatccctctcaactgaaactcccatcaaatttggggcgtagtgtgtcgattcagttgtaactattatatgtcattttgggttagcaaactgtatctactaatttctcagacttatgccttttgagctagaaacttgtgtaagaattttttgcactcagtgacatgctggatagtgcgagtagcagattacaatagtgacggatgaacattgtattttactttacatgatggatttttttgatgtgtaaggcttttaaggcatgtaaaaattcttaacttttaaaagatgctaacacgaatataaaattgcaatcattattcttgaatttcaatgtatcttatcataacatgttcactccgtagcaacgtacgggcatttacctagtatatatatatatacgcacgtggtgcagtcgaagttgagggtgagcgggaacggcagcggcgcgccgcactgcgcggggaggtcgcggatggcgtcggcgttgagcggctggtaattggccgccgcctgcttgacgcactcgcacgcctgccgccgctccgccgggccggacggcatggccctgatccgcttcacgccggcgcagcactcggcggccggggccgcctccttgcccgtcacgtagccgacgcaggggcgcaggcttgcgtccacgtccgcgcagttcacgtccgccctaaccgccgccgccgccagcaggaccaacgccactgctgccaccgctgttgttgcggcgccgcccttcttcttcatcatcgccatcgatcgatctgtgtctctctctctcccgaacttgacttgctgctgctggagctcgatcttagcttgttgctgctgcgttcatggagcggctcgagcgctggggttttatagggcttgctgggtcggcgaagcggttcagcatcttgttggtgctgatgttgctcgtaatggcagcgctttgagtgatgcattggtacgccaaaactggcagatggatagggtcccttttttttggccataccgtgcatgaacgccacggctagctgccgttgcaaccgtttaatgcttcgctt

SEQ ID NO: 210763 - DNA, 996 bp, Zea Mays
gagccgagcagttggtttggtggcgcgcctttactgccgctgccgctcactttcccagggaggggttaattgcctccgccggcctcgctctcgcgtcgcgtccttcggatgccgcactgaccgcgaccaagtcacgcagctcagccgcgcgccgcgatgggcgagaggaggaggcgtgcgagcactgcttccctcgggggtggaggtggagctggaggtagcggtgctgtgcccgcgcggaacgaggaggacaaggccgcggagccgcctccaccgacgttgtggttcgcgctcaagcggtcgctgcactgccgctccgagctgtcggaggtccacgtgccgcgcgccaacaaggcctccggtccagtcgtcgcgagcggtggccacctgtcgtcgatcgtcaccaagcgcgcctccgcgcggtcggggtgctcgcgctccatcgccaacctgcgggacgtcatccacgggagcaagcgccacccggggcagccgcccagctgcagcccgcggtccatcggcagcagcgagttcctcaaccccatcgcgcacgaggtcgtgctcagcaccaactcccgctgcgagctcaagatcaccggcttcgggggctgcggcgggctggcggccgtggggaccggcgccgcggccgcgcacgacgcctgcggcgggggcgacggcggcgtggtgtcgtcgttcgtcggcacgctccgccccggcacgccgggccccgcgtgggccggagccgggcacggcctgccgtgcagcggctccgtgcggggcggggtgcgctgcacgccgccgcggtccccgtgcgtgctgctcgagaggaacggttccgtggtcagcggccaccgcgcgtcctcctgcgaggagaccgcaaaggacggcggcgccggcaagggttccggcgggctcagctgccacaggtgcggcgagcagttcagcaagtgggaggcgctggaggagcaccacctctccaggcatgcagtatcgttg

SEQ ID NO: 210764 - DNA, 1848 bp, Zea Mays
ccttcaagcaaatagacaatcggaggaacttcacaaagatggaaattactccaatatcacaactacgtccaggaaagttaaattatgctttacatgtgcgaatatctagaatgtgggagtttagaggcacaaatgaacagaatgacatcaaacaccttgaccttgttctcatcgatcaaaagggaaattcaatatatgcagagattccaccagatgcaattgatgtcttaaagccacatctacaagaaaaaaagattgtatacatatccaaaataacaattgaacgagctaaactgggattcagagttgttgacaatccttatatggtaaagctcaacaagagaaccattgtgcttgaagataaggatgaaattcaaggttttcctaaatatacattctcactaacacccttagataagttggaccaatacaaaaacaagaccgatcgttttatagatgtcattgctaagatcagtggagtatcaaatgtagcaaaggttcctacaacctcaggagatcagcaaatgaggagagttgtattattagaagaccttaagggaaacatgattgagctatcactatcaagaaaaagagttttggaatttgacggagatcaaattttagatgtgggtcagcaacatcatgttattgcaatatttgtaggaaccttagtcaaactttacaaaggtgaatatacattcttgagtggaacatcagcatgtcggtggtacatcaacgaaaatgacattgctgaaatcaaggctttccagaaaagttttcctttggtgcaaggacaaagatatcagtgcacaactactataattggtatcacagaaaaccaaacatggtgttacaaagcatgcaagatctgtaattcagcaatcattcaaaaggaaaatggttataaatgcacaaaggaaggatgtccatctacacaatttgaatggaagtacaagataccattcattgcaagtgaccacacctataatctagagtttatgttctttgaaaaaaagggaatggagcttataggaaagagtgcatcgactcttcgaaaacaatatgaaccaaaggagataccaccggatataacatcttggataggttataaattcacttttgttgttagagtcctatcaaagaaaagtgtcaagactattgatccatcctttgaagtgcttatgataaaagaaaaataccaaaaggaacctattatatcatttatcagctcaagtggagttgtaccagcagaatcatcttcctctacaatggcagaatacaaggaattaccattgctaatgccaattacctccaaagacatagaaaaaaggagcgatccacttcacaaccagaacacaccgaagaaactcaagatatggacattgaaccatctggcatttgggaagaatctcagatttcaaacaaaagaagctttggagacccaaactatgacaatcaggaaacaactgatgacaaagatgatcttccacaattcaagaaaatcaagagtacccactctcaaggaaaaagcaaaaaatgatgcatgatagactaagaagacaaagtaaagtagtagactttaaaagatcttgactaaagtaatatatctatattttctgtttcgataaacaacgatagcgctagcactacatcttttgatgtatataaccatgtagtatcaatagcgctaaatcttaagcgtgtagcaccagcagcgctacatattttgatgtatataagcatgtagcatcaatagcgctacatcttttgttaaatataagcacatcttttgatatatatataagcatgtagcatcaatagtcttagctatggtgctaatcttacatt

SEQ ID NO: 210765 - DNA, 1607 bp, Zea Mays
ccttcaagcaaatagacaatcggaggaacttcacaaagatgtcattgctaagatcagtggagtatcaaatgtagcaaaggttcctacaacctcaggagatcagcaaatgaggagagttgtattattagaagaccttaagggaaacatgattgagctatcactatcaagaaaaagagttttggaatttgacggagatcaaattttagatgtgggtcagcaacatcatgttattgcaatatttgtaggaaccttagtcaaactttacaaaggtgaatatacattcttgagtggaacatcagcatgtcggtggtacatcaacgaaaatgacattgctgaaatcaaggctttccagaaaagtttgccaagtgaacctgtacctatcaaaaagacctatctccaaaatgatgatgcaacacacaaatttgaggagaaaagtctagaacagctcaagcatgtagaccctttccttgacatggtaaagttttactttacaaaaacaatcatgctatgtaaaatgttgcatgagtaaaaaagttttcctttggtgcaaggacaaagatatcagtgcacaactactataattggtatcacagaaaaccaaacatggtgttacaaagcatgcaagatctgtaattcagcaatcattcaaaaggaaaatggttataaatgcacaaaggaaggatgtccatctacacaatttgaatggaagtacaagataccattcattgcaagtgaccacacctataatctagagtttatgttctttgaaaaaaagggaatggagcttataggaaagagtgcatcgactcttcgaaaacaatatgaaccaaaggagataccaccggatataacatcttggataggttataaattcacttttgttgttagagtcctatcaaagaaaagtgtcaagactattgatccatcctttgaagtgcttatgataaaagaaaaataccaaaaggaacctattatatcatttatcagctcaagtggagttgtaccagcagaatcatcttcctctacaatggcagaatacaaggaattaccattgctaatgccaattacctccaaagacatagaaaaaaggagcgatccacttcacaaccagaacacaccgaagaaactcaagatatggacattgaaccatctggcatttgggaagaatctcagatttcaaacaaaagaagctttggagacccaaactatgacaatcaggaaacaactgatgacaaagatgatcttccacaattcaagaaaatcaagagtacccactctcaaggaaaaagcaaaaaatgatgcatgatagactaagaagacaaagtaaagtagtagactttaaaagatcttgactaaagtaatatatctatattttctgtttcgataaacaacgatagcgctagcactacatcttttgatgtatataaccatgtagtatcaatagcgctaaatcttaagcgtgtagcaccagcagcgctacatattttgatgtatataagcatgtagcatcaatagcgctacatcttttgttaaatataagcacatcttttgatatatatataagcatgtagcatcaatagtcttagctatggtgctaatcttacatt

SEQ ID NO: 210766 - DNA, 2041 bp, Zea Mays
gaaaaagaaggcaattcgtgtccacaaactctcctctcgtcaatgtagaagtatccccagaaatgcggccaccctcctcgcgcggatcgacccgagggtgcccctcccactctcgcgtcggtcccgcgatgggcctgttctcatcggccgctaagagatgtagaaagtgcaagaagttcctccgcagcgcgggcgcgtgctgctgctcgccgtcggcctcctccgcccctgctggtggtgtgcgcggcaacgaagaggcgtcgacgtcggcgctggcttccgcgccagatggcaagaaaaagaagaggtggaggaagagaaagttctggagaaagaagaagaaggccaagaaggagagcgacgatggcagcggcgagctcgtggatctcgtcaacagcttctcggccaagtccgacgtgtgcaagaacgtgaatgcggccgaggagatcctacggggctgcaaccagaacatgcccagcagggcgctgacgttcagccagctgggcgccgcgaccgacgggttcagcgagcagaacctgctgggagaaggcggcttcgggcgggtgtacaaggggctcctccaggacaccagagaggtcatcgccgtgaagcagctggacaggaacgggttccagggcaaccgcgagttcctggtggaggtgctgatgctcagcctcctgcaccacccgaacctcgtcaagctgctgggctacagcaccgactccaaccagcggatcctggtgtacgagtacatgcccaggggctcgctggaggaccacctcctggacctgcccccgagctggaagcccctgccgtggcacacgcggatgcgggtcgcggtgggcgcggcgaagggcatcgagtacctgcacgaggtggccaacccgccggtgatctaccgcgacctcaaggcgtccaacatcctccttgacagggaattcaacgccaagctctccgacttcgggctcgccaagctgggccccatgggcgaccagagccacgtcagcaccagggtcatgggcacgtacggctactgcgcccccgagtacgccatgaccggcaagctcaccaagatgtcggacatctacagcttcggcgtcgtgctgctcgagctcatcaccggccgccgcgccatcgacgtcacgaggccgtccgaggagcaggtcctcgttcactggggattgcatgcgcacgcaacgcacgttcgtgcaggcaacgcctctgctgagagacaggcggaggttcatgaagctggccgacccgttgctgggcaagaggtaccccgtgaaggggctgttccaggcgctcgccgtcgcgtccatgtgcttgcaggaggacgctgccagccggccggggatcagcgacgtcgtctcggcgctctcgttcctcgccgatccgcaatactaccctccccaaggcacgggagccgagcagaaggccacagccacaggtcgagagagtaaacccaaggaggatactacagacaaggatagcagtcctcataaggccgaaatgatcagggcagacgacgaaacgaagcatagatgatgaccgtagggggaagctaaccacgggaaagggaggaacactgcagagctgtctgtctgctctcttgaatcttctttttgtaaagcgtacaccacgtaggcaggatgtaacaacaacattcaaggagttatcttgactgagatgcagattttcagcagcaatgcagcatgaagtcgagctaactgttccacacaaactactcagcaaaaggtcatgggagaggtctcaagcagggtgaccctcctcctcctcctcccctcctttttgttctggcgattgacccactacaaaaaaaatctaaagattgctacagagaccggagtactgagcaaatcggggagctgttcgcccactataaggatctcgatgtatacacatgatgcgaccttgtttgttaagccgaaaaaagaagaaattgagagaattgttagattgctaacttcaattggagaggcttttgttccgatgaccaactttcgaaagtccatgcttg

SEQ ID NO: 210767 - DNA, 1119 bp, Zea Mays
ctccggcgaaagagacgccgagatctacacatatcctcgagagccactttcgccaaggtccccataggccataggttgccctgcgggttttacaaaacaagaagaaaaaaaatcacctgctcaacggcggcatcatcggcaagacggcgggtttctgtaccaatctcagcctgtacctttggtacccatgtgtttttgctacgacagttagcttcacccaaagctgccataagctgttcttctaactttattgcaccacggatgcatacctttggctgaagaaagtcgtgtctatctgattccaggaatcaagcgtattgtggtgaacatgaactccacatcttctcagcgtggttaccctgccaagaggtggtgtgcagcgaacatgagctccacatctatgcgtcactctgcatggaagtctgagccctggactcaccttacccacaaacagagacgaccacaatggattgcttataatccaaggacaatgaggcctccaccacttagcactgataccaattctatgaagattctgtcctggaacgttaatggactgcaagctattgtacagtcagggttttctgcagatgaattggttgccagagagaactttgacgtcttatgtcttcaagagacacacttggaggagcgcaatgttgacctttttaaaaacctggtacatgaatatgattacacctgttggtcatgcagtgttgcaaggcttggttattcaggaactgctgttatatcacgggtacaaccaatctcagttcaatatgggcttggcataccagagcatgatcaggaaggcaggcttattaccttggagtttgatgatttttacttggtcaatgcttatgtcccaaattctggccgtggtttacgtagactgaattacaggatcaatgattgggatccatgctttagcgacttcataaagaaactggaatgttctaaaccagtaattgttgctggggatctaaactgtgctcgtcaaagtattgacattcacaatcctcaagtgccaattttgttaaggggaattgcagactttattttacattgttaggtgttaattttaaggggaattgcagactattttttttttcctttttg

SEQ ID NO: 210768 - DNA, 2847 bp, Zea Mays
attgtttcctgtaaaaattctgcttgtccaaaccttttgtgttttggtttatttattttggactgaacatttatttgtttaatatgaaatcattgaaatgatctacatactttagtactcttgcttttcagggagtttgcattggtttgagtgaggtcatgggcagtgcaggaaaacaccagctattaagttttatggatgaacttattcctaccattcgtactgctctatgtgacagcacccaagaggtccgtgaatctgctgggttagcgtttagtactctgtacaagagtgctggactgcaagccattgatgagattgtccccacattgctacgagctttggaagatgatgatacatctgcaacagctcttgacggtctaaagcagattttaagtgtcagaacagcagctgttttgccccatatattgcccaaattagtccagcctcccctctcttcattcaatgcacatgcattaggtgctctagcagaggttgctgggccaggtttgaattcacatatcggaactgttctcccagcattgattcttgctatggatgatgaagatgcggatgtacaaaactcagccaggaaagctgctgaaactgttctgttggttattgatgaggaaggagtggaaactttgatacctgagcttctaagagggatcaatgacagtcaggcatcaatgaggcggggttcagcctatctaattggtttcctctttaaaaacactaaattatatttggctgatgaggcttctgatatgatgtcaaccctaataattttgttgagtgatacagacaaggctactgtatcggctgctttagaagcattttcaagagttgttgcatctgttccaaaggaacagctcccgacgcatataaaactagtgcgcgatgctgtctctacagccagagataaagagcgtagaaggcgaaagggtgtgcctattcttgtgcctggcttatgtcttcctaaagcactgcagccttttcttcctatatatcagcagggtttaattagtgggtcggccgagacaaaagaacaggcagctgaaggtctaggagagttaattgacgtaacaagtgagaagactcttaaggaagttgtagtgccaattacaggacctcttattcgcatccttggtgatcggtttccatggcaagttaagtcagctatcctatcaaccctgacaatcatcatcatgaaaggtctgtccgggcgagggctgcagctgctctgggaaagcttagtgctctcagcacacgggtggatcctttagttagcgatcttctgtccatgttgcagtcaggagatgaatctgtcaaagaaagtgtgctttctgcgcttaaaggtgttatcaaacatgctggtaaaagtgtcagctctgcaataaggtcacgtggatgtgctcttcttgaagatctgctgcaggctgaagctgatgatgtccgcagttgtgctgcaaaagtgattggcacattgtctcagtacatggaggagacagagatttcagatttggtgcaaatcctattgaacatgagcacttcatcagactggtgtaccagacatggtgctttgttatcgttctcatacatatcaatgcattctccatcaaaattgtgtcatttggcatcctttccatctctggtcgatcttttgaaaggttctctcaaagacgacaagttccctgttcgtgaagttgctacaagaactctgggaaagatactctgttttgagctacagccagaagctggcaccttgcaacttgttcagctgcttatcttggccttgcgtgatgattcaagtgaagttaggagaagatctttgtcgtgtatcaaagctgctgcaaagacaaatcattcagctcttgctacacatcactctatattgggcccggcaattgctgaagctttgaaggactctagcatgcctgtacgtctagctgcggaacgctgcgcccttcatgttttccagttaacgaaagggccagataatgttacagcagcacaaaagtacctcgggatgactggcttggaagtgaagaaaatcgcaaagcttgacgtggacagtgatggtagtgagagcagcgatgatgacaagaggacatagactctactcaacagcaatcttttttcggttcagttgttatgatctttacatatagttagctacattgatagcggaatgtggggtcattttttctgtctggcccattttgtgtacatcctttttgacaacaaacaggtaaaagtgacaacgtttgcaaatcgacaaacaatggtgagttattcaatctaagaagtctgtctacccagtttttcccagatagttcggacccggaacttatattcacctcaatttgaatggaccaatttccaggacacaagttgtattgcaaccaaggactgattcgttagtttgagcacagcacaaccacccagttcaacgataacgcatgtcaatgtaagccacgcataccatatagtatcatatcgtcgagtattgttcgtaccacatcttcctcccagttgatctccttgggcaaggtaggcccttccctggacagctcgttgggcatcttgttgagcatgctctctgctctgtacctgaacgctggagtccacgaacagactgctctgagcggcgtcaatgtggataggaatgtaatcggacgtatattactggttccatgtttgttttcatattttctcattggatattaatgcaaatattatcgagttgggcatcggatattaatgcaaatattatcgagttgggatttgtgtcggataatatccgaatgaatatctagacttagataataagtttttaagtttttt

SEQ ID NO: 210769 - DNA, 687 bp, Zea Mays
aggcgaaaacgtagtcccagccctccgatcggatcagacggtggagagcacgcatagccagctcaaaaccctagcctccaactcatataccagctgctggccccgacacgcatcgactcccgccgccgccgcttccgctccgtcgctcgcctcacgcctccggcgccacctccaccatggccccgaagaaggagaaggccccgccgccatcgtccaagccggccaagtccggaggcgggaagcagaagaagaagaagtggagcaagggtaagcagaaggagaaggtcaacaacgctgtgctcttcgaccaggccacctacgataagctgctctccgaggtgcccaagtacaagcagatcaccccatccatcctatctgagcgcctcagggttaatggatccttggcacggagggccatcaaggatctgatggcaaaggggctcataaggatggtctctgttcattctagccagcagatatacaccagggcaaccaacacatgatgggtgttttgcgtcttgtggacgttatctagtctagacgacttgatgttgctattatatcaagtttaatttaatcgtggctcgatcaatcttactgtcgtgttgaatgtcgaatatttttgagattattgtactattttaatatcatgttttttataacatttaagaccatgcaaaaaaaaaa

SEQ ID NO: 210770 - DNA, 3003 bp, Zea Mays
ggagagtctcagtcctcacagatcgcgcgcgcaccagcaccaccactgccgtctccggcgacgaccacgccgccggccatgccgtcctcctacgctgccgctgcagccggatcctcttcccgcaagccgaatcgcacctccagcgctgccgcacccactcttcgcccaccagcaccctcaccgtcgccggcacccgctcccctggcggtgaaccctagcgtcatctctgattccgacccctcctcctactcatcttcctctgcggatgaggccgatttcgccgcctccgactccgcaactgcctctgttgtctctgcctacctctcggttgctggcgagggggccgacctctcgaaagttggcattttcctctcatccgccgcgcgccgccgatcgccgccgtgccttatctgcttcgatcctatacgcccctctgacccggtgtggtcatgctcttcatcctgctttgccatcctccacctcccctgcatccagtcatgggcgcaccagtcagcatccgggcccgccgtgccgtgcccaacctggggatgccccaagtgccgcttcgcctaccccaagtccgagatcccctcctcctacgtctgcttctgctccaagaccatagacccggctccggacccctggatcctcccccactcttgtggcgacgtctgtggccgccgtcttgatgcgaatctcgactccggctgtgagcatacctgcctgctgctgtgccacccagggccatgcccgccatgcccggccgttgttcctaaagcgacgtgcttctgtggagtgcaccgggagccccgacgctgcgcacatcagcgttactcttgtggggggaaatgcaacaaacgtcttagctgtggactccaccactgtccagtggattgccatgatggcccctgcccgccgtgtgcagtgctggggagtcacaaatgtgagtgtggagagatattggaggagaaattgtgctctgaaaggattttccagtgcaagagggagtgtggtgggatgctagattgcggtaagcataagtgtgagagggggtgccatgggggcaagtgtggggaatgcccactccgaggtcgacgcacttgcccgtgtgggaagaaaaattatccaaggttggagtgtgatgcagaggctgccacatgcggatcaacttgtgagaaggtgcttgggtgtggacgacacaggtgccctgagcgctgccatcgtgggccatgtgatgggacttgccgtcttgtggttactaaggcctgccgttgcggggggttgaagaaggaggtgccctgctaccaagaattgacgtgtgaaagaaaatgtcaacgtttgcgaaactgtggtcgccatgcttgtaaacgacgttgctgtgctggagattgcccaccctgctctgagaggcgcttgttcaccttgtcctctgatgaagaccatttcttgcgcctgtggaaaaacatgttttgaggttccttgtgggactgagaagaatcagaaaccacccaaatgctcaaagaaatgcaatatacctcgcctttgccgacacaagcttgaatgccggccccacaaatgccactatggagcctgcccaccttgcaagctgatctgcggggaagaatttccatgtgggcacacgtgtaaagaaaggtgtcatggccctatttctcctccaaactccgagttcacactgaaaccgacaaaaaagaaaatgggaaagcacatagaatgtacacctgggacaccgtgcccaccatgcaaagaggtggttttggtgtcatgctttgggcagcatcttggccaagaacgcactatgccatgttgcaaatggaggccttttccctgtgaaaatttatgtgggaatcctctcctttgtggcaaccattattgtacaaaatcttgccatgtgttagaagtcccattgaatcatcctgaaggagatcgtacaacatctatcagtaaagtgaacgcacttgctatgccttgtgaacaatgcaatcttccttgtcaaagggttagggagcctccttgttcacatccttgccctttgccatgtcatctgaacgattgtccttcttgtaaagtccttgttaaaagaccatgccattgtggtgctatggtgcatgcttttgaatgtgtgttttataacaacttaaatgcaaaggatcagattaaaataagatcttgtggtggcccatgtcatagaaagctaccaaattgcccccatctgtgttcagaagtatgtcaccctggtgtatgcccatcggttgatcagtgcatgaaaaaggtcaacacccgttgtgcatgcagcactctgaaacaagagtggcgatgtcaagatgtcctcaaggaataccgtaagtctggccgggatccaaaagaagtacctaaaagtcagtttggagttggcttacttgcctgcggtgaagattgcaagaagaagctgaaggctccagattcagagttgcatctccggaaaagtcaggagaacaagatccctgctgtggaagtcgtaaatgcacccaaacgcaggaagcggcgtgaccgtggacaagaagttaaaatttcgaaattccaggaagtgaagacttttgtgctgagagcgctactgattattttgctgtcaataatcgttgctgctggtctgtacctgttgtggaaaggtattttctggctttctgactggatgaacgaaatggaagagcagagggcgagtcaaaggtatccgaggggtgcaatgttgtaaaataaaacaattactttgagcctaataatcggtattgacatgtggattaattaatggttgttagggattcagttttgcaggatcataaacatgtcaccgttttctcactttttgtcactataaactagaaattgtatgcgtgatgtattgttgtatttttattttgctactctgcattgttaagtgaacaaacgatacaattactacatgattcatcgcttatatctgttaaaatgtacttcctctgttccaat

SEQ ID NO: 210771 - DNA, 3301 bp, Zea Mays
ggagagtctcagtcctcacagatcgcgcgcgcaccagcaccaccactgccgtctccggcgacgaccacgccgccggccatgccgtcctcctacgctgccgctgcagccggatcctcttcccgcaagccgaatcgcacctccagcgctgccgcacccactcttcgcccaccagcaccctcaccgtcgccggcacccgctcccctggcggtgaaccctagcgtcatctctgattccgacccctcctcctactcatcttcctctgcggatgaggccgatttcgccgcctccgactccgcaactgcctctgttgtctctgcctacctctcggttgctggcgagggggccgacctctcgaaagttggcattttcctctcatccgccgcgcgccgccgatcgccgccgtgccttatctgcttcgatcctatacgcccctctgacccggtgtggtcatgctcttcatcctgctttgccatcctccacctcccctgcatccagtcatgggcgcaccagtcagcatccgggcccgccgtgccgtgcccaacctggggatgccccaagtgccgcttcgcctaccccaagtccgagatcccctcctcctacgtctgcttctgctccaagaccatagacccggctccggacccctggatcctcccccactcttgtggcgacgtctgtggccgccgtcttgatgcgaatctcgactccggctgtgagcatacctgcctgctgctgtgccacccagggccatgcccgccatgcccggccgttgttcctaaagcgacgtgcttctgtggagtgcaccgggagccccgacgctgcgcacatcagcgttactcttgtggggggaaatgcaacaaacgtcttagctgtggactccaccactgtccagtggattgccatgatggcccctgcccgccgtgtgcagtgctggggagtcacaaatgtgagtgtggagagatattggaggagaaattgtgctctgaaaggattttccagtgcaagagggagtgtggtgggatgctagattgcggtaagcataagtgtgagagggggtgccatgggggcaagtgtggggaatgcccactccgaggtcgacgcacttgcccgtgtgggaagaaaaattatccaaggttggagtgtgatgcagaggctgccacatgcggatcaacttgtgagaaggtgcttgggtgtggacgacacaggtgccctgagcgctgccatcgtgggccatgtgatgggacttgccgtcttgtggttactaaggcctgccgttgcggggggttgaagaaggaggtgccctgctaccaagaattgacgtgtgaaagaaaatgtcaacgtttgcgaaactgtggtcgccatgcttgtaaacgacgttgctgtgctggagattgcccaccctgctctgagacttgtgataagaagctcagatgtggcaaccataaatgtctctcaccatgccacagaggcgcttgttcaccttgtcctctgatgaagaccatttcttgcgcctgtggaaaaacatgttttgaggtggaattcggttccttgtgggactgagaagaatcagaaaccacccaaatgctcaaagaaatgcaatatacctcgcctttgccgacacaagcttgaatgccggccccacaaatgccactatggagcctgcccaccttgcaagctgatctgcggggaagaatttccatgtgggcacacgtgtaaagaaaggtgtcatggccctatttctcctccaaactccgagttcacactgaaaccgacaaaaaagaaaatgggaaagcacatagaatgtacacctgggacaccgtgcccaccatgcaaagaggtggttttggtgtcatgctttgggcagcatcttggccaagaacgcactatgccatgttgcaaatggaggccttttccctgtgaaaatttatgtgggaatcctctcctttgtggcaaccattattgtacaaaatcttgccatgtgttagaagtcccattgaatcatcctgaaggagatcgtacaacatctatcagtaaagtgaacgcacttgctatgccttgtgaacaatgcaatcttccttgtcaaagggttagatactctcttttcgttttcaagaactccagtttggtttgttttacaaagcttaatatgaagaagctactgtggtttcatatgcttttgagcttggtgcaggatattgacatatttatttcaggttagggagcctccttgttcacatccttgccctttgccatgtcatctgaacgattgtccttcttgtaaagtccttgttaaaagaccatgccattgtggtgctatggtgcatgcttttgaatgtgtgttttataacaacttaaatgcaaaggatcagattaaaataagatcttgtggtggcccatgtcataggtcagtttggctcctaactgtttccgtatcgaaaattgtacaatttttctgttgttactaaactcctatcacaaatttccttaaatttatttgattttaccaagcatctgaacatgctttttgaacagaaagctaccaaattgcccccatctgtgttcagaagtatgtcaccctggtgtatgcccatcggttgatcagtgcatgaaaaagcactctgaaacaagagtggcgatgtcaagatgtcctcaaggaataccgtaagtctggccgggatccaaaagaagtacctaaaagtcagtttggagttggcttacttgcctgcggtgaagattgcaagaagaagctgaaggctccagattcagagttgcatctccggaaaagtcaggagaacaagatccctgctgtggaagtcgtaaatgcacccaaacgcaggaagcggcgtgaccgtggacaagaagttaaaatttcgaaattccaggaagtgaagacttttgtgctgagagcgctactgattattttgctgtcaataatcgttgctgctggtctgtacctgttgtggaaaggtattttctggctttctgactggatgaacgaaatggaagagcagagggcgagtcaaaggtatccgaggggtgcaatgttgtaaaataaaacaattactttgagcctaataatcggtattgacatgtggattaattaatggttgttagggattcagttttgcaggatcataaacatgtcaccgttttctcactttttgtcactataaactagaaattgtatgcgtgatgtattgttgtatttttattttgctactctgcattgttaagtgaacaaacgatacaattactacatgattcatcgcttatatctgttaaaatgtacttcctctgttccaat

SEQ ID NO: 210772 - DNA, 2920 bp, Zea Mays
ggcaacgcaacggtcccggactggtcctgcaatacaaaaggattcttcagttagcagtagctttcagctgatcgattcacttctcctccccgtctgttgagtcattacccgcaggcgtttcgtcaccgctttcagaattcagacagaggtcggtcgccaggaacccataaaaaaagtttccaagcatgcatggttttgttgcctgtgagtagatgatgttggagtacgtaacgtagtaacaatgagcagtgatgtgaattgcgatgatatacgtgacgccgagagagcacatgaacaggtcagactgtacccttgcgtgcctagctagctcaagttcttttcttgcagccttttcttcaaatcccacacacccatgacatcggccggcgatccgatctctatcctgattcctgacacacaagcacggccacggaaccctcgcgcatgcatgctgcctgctgacgcttaccttcgtttcgttttcatggctgctgctgcttattgctgcgagtgcgatgtgcaggcggcagcgggcacagtcctccagtcctcgggtgaggcgatcgtcgccggcgccatgggagggggagtccaccaccaccacccgtgcgtggctgctgatggagatggggccggggccgggcccgggccggccagcgtggaggccgcgttgaggcctcttgtcggcgtcgacgcctgggactactgcgtctactggaggctgtctcctgatcagaggttcttggagatggctgggttctgctgcagcagtcagttcgaggcacagcttccagcgctgggcgacctgcctccatcaatccagctcgactcctcgtctgcagggatgcacgccgaggcaatggtgtccaaccagccgatctggcagagcagccgcgtgccagagctccaaacaggttactccagtggcatggtgcaggagcccgggtccagcggcggcccgaggacgcggctgctggtgcccgtcgccggcggcctcgtcgagctcttcgcggcgagatacgtgcgtaagccactgcagctggacctgcgccgtttctttttcgttcttattattttcttctgtttgccgccatcacgtgagaaattccatttccaggattgttagtttctagagtacggctacgggtagttagctagagagacctgccagaaccagaaccagaagcgcacggcttctgcgtgagccagcgtcgccgcccccggcgaagatgtggcggtgaaccgctcgcaacagccacggcctttgcatttgcatgccatgcgcacacaaacacatgacatgacatgacatgacacaccagacttgacgctctcctgtctttatatgccggcgcggcgcgcgggcgtgcgtgcgcgcgcagatggcggaggaggagcagatggcggagctggtgatggcgcagtgcggggtgccgagcggcggtgaggggggcgcgtggccgccgggattcgcgtgggacggcggcgcctcggacgcgtcgcgtgggatgtacggcgatgcggtgccgccgtcgctcagcctgttcgacgccgccggcagcgtcgcggcggacccgttccaggcggtgcagcaggcgccgggcgccggtggtggtggggtggacgacgtcgccgggtggcagtatgctgctgcggctgggagcgagctggaggcggtgcagctgcagcaggagcagcagccgcgcgatgcggactcggggtccgaggtcagcgacatgcagggggacccagaggacgacggcgacggcgacgcgcaggggcgtggcggcggcaagggcggcgggaagcggcagcagtgcaagaacctcgaggcggagcggaagcggcggaagaagctcaacgagcggctctacaagctcaggtcgctcgtcccgaacatctccaagatggaccgcgcggcgatcctcggggacgccatcgactacatcgtgggcctgcagaaccaggtgaaggcgctgcaggacgagctggaggacccggcggacggcgccggcgcccccgacgtcctcctggaccacccgccgccggcgagcctggtggggctggagaacgacgagtcgccgcccacgagccaccagcacccgctcgccgggaccaagagggcccgtgcggcggcggaggaggaggaggaggagaaggggaatgacatggagccgcaggtggaggtgcggcaggtggaggccaacgagttcttcctgcagatgctgtgcgagcgccggcccgggcgcttcgtccagatcatggactccatcgccgacctgggactggaggtcaccaacgtcaacgtcacctcccacgagagcctcgtcctcaacgtcttccgcgccgccaggcgggacaatgaggtggcagtgcaggcggacagactgagggactcgctgctggaggtgatgcgggagccgtacggcgtatggtcgtcgtcggcgccgcccgtggggatgagcggcagcggcatcgccgacgtgaagcatgacagcgtggacatgaagctcgatggcatcatcgacgggcaggcggcaccgagcgtcgcagtgggggtttcagaggatcactacggcggctacaaccatctcctccaatacctcgcttgatcattatttaattgcgttcgttcatgttgaaagttcgatcaaactatcaaaggatggatcaactaataaaaacgggatccatatataagtaactgtgaattgcgatcattaattgtatgcatacaagcatatggtcgtggattaaagtttgttaattgggttttctcactgcttttctggatctttcttgtgttggttcaaacgagggcggaataataaagctatttcctctatgtttttatacaaggtaaattaaatttcgggtctttgcatgagctgtgcgctaaaagcgcttattacaagtttcg

SEQ ID NO: 210773 - DNA, 2810 bp, Zea Mays
ttcagacaagaaacgtacgccgcctgtatatatatatgcagcactagctagccctgccacacatgcatgaggcaacgcaacggtcccggactggtcctgcaatacaaaaggattcttcagttagcagtagctttcagctgatcgattcacttctcctccccgtctgttgagtcattacccgcaggcgtttcgtcaccgctttcagaattcagacagaggtcggtcgccaggaacccataaaaaaaggtagctttatgtttccctcttgctccgtcgtcgtcgtcgtcgtcgtcgtcgtcgccgccgccgttgctcgataggatgtttagaaattaactgcttgtgcacacagaggttacagttccttgtagactccttcagttcagaaatgaccatgcaatgcatgctagtttctgtttacagtttccaagcatgcatggttttgttgcctgtgagtagatgatgttggagtacgtaacgtagtaacaatgagcagtgatgtgaattgcgatgatatacgtgacgccgagagagcacatgaacaggtcagactgtacccttgcgtgcctagctagctcaagttcttttcttgcagccttttcttcaaatcccacacacccatgacatcggccggcgatccgatctctatcctgattcctgacacacaagcacggccacggaaccctcgcgcatgcatgctgcctgctgacgcttaccttcgtttcgttttcatggctgctgctgcttattgctgcgagtgcgatgtgcaggcggcagcgggcacagtcctccagtcctcgggtgaggcgatcgtcgccggcgccatgggagggggagtccaccaccaccacccgtgcgtggctgctgatggagatggggccggggccgggcccgggccggccagcgtggaggccgcgttgaggcctcttgtcggcgtcgacgcctgggactactgcgtctactggaggctgtctcctgatcagaggttcttggagatggctgggttctgctgcagcagtcagttcgaggcacagcttccagcgctgggcgacctgcctccatcaatccagctcgactcctcgtctgcagggatgcacgccgaggcaatggtgtccaaccagccgatctggcagagcagccgcgtgccagagctccaaacaggttactccagtgtacggcatggtgcaggagcccgggtccagcggcggcccgaggacgcggctgctggtgcccgtcgccggcggcctcgtcgagctcttcgcggcgagatacatggcggaggaggagcagatggcggagctggtgatggcgcagtgcggggtgccgagcggcggtgaggggggcgcgtggccgccgggattcgcgtgggacggcggcgcctcggacgcgtcgcgtgggatgtacggcgatgcggtgccgccgtcgctcagcctgttcgacgccgccggcagcgtcgcggcggacccgttccaggcggtgcagcaggcgccgggcgccggtggtggtggggtggacgacgtcgccgggtggcagtatgctgctgcggctgggagcgagctggaggcggtgcagctgcagcaggagcagcagccgcgcgatgcggactcggggtccgaggtcagcgacatgcagggggacccagaggacgacggcgacggcgacgcgcaggggcgtggcggcggcaagggcggcgggaagcggcagcagtgcaagaacctcgaggcggagcggaagcggcggaagaagctcaacgagcggctctacaagctcaggtcgctcgtcccgaacatctccaagatggaccgcgcggcgatcctcggggacgccatcgactacatcgtgggcctgcagaaccaggtgaaggcgctgcaggacgagctggaggacccggcggacggcgccggcgcccccgacgtcctcctggaccacccgccgccggcgagcctggtggggctggagaacgacgagtcgccgcccacgagccaccagcacccgctcgccgggaccaagagggcccgtgcggcggcggaggaggaggaggaggagaaggggaatgacatggagccgcaggtggaggtgcggcaggtggaggccaacgagttcttcctgcagatgctgtgcgagcgccggcccgggcgcttcgtccagatcatggactccatcgccgacctgggactggaggtcaccaacgtcaacgtcacctcccacgagagcctcgtcctcaacgtcttccgcgccgccaggcgggacaatgaggtggcagtgcaggcggacagactgagggactcgctgctggaggtgatgcgggagccgtacggcgtatggtcgtcgtcggcgccgcccgtggggatgagcggcagcggcatcgccgacgtgaagcatgacagcgtggacatgaagctcgatggcatcatcgacgggcaggcggcaccgagcgtcgcagtgggggtttcagaggatcactacggcggctacaaccatctcctccaatacctcgcttgatcattatttaattgcgttcgttcatgttgaaagttcgatcaaactatcaaaggatggatcaactaataaaaacgggatccatatataagtaactgtgaattgcgatcattaattgtatgcatacaagcatatggtcgtggattaaagtttgttaattgggttttctcactgcttttctggatctttcttgtgttggttcaaacgagggcggaataataaagctatttcctctatgtttttatacaaggtaaattaaatttcgggtctttgcatgagctgtgcgctaaaagcgcttattacaagtttcg

SEQ ID NO: 210774 - DNA, 1046 bp, Zea Mays
tcggtggctacttacctaccccttctggttctgcgtgttctatctgcaatcaacgacggcgcgtctcgacggtactgctaattagcctcctagccagcctccgcctggaggtccatccccgacctcgacgcttcccggccaaacgccgacgcccctcaccctcggcgcagcgccgcagcgtcgcggtgctccatacccatccccctccatggtcggcgcctgcatcccccggcatcgcggtgctggatcccctccctctctcgcgttacgctagagttcgagaaggggaaaagcgacgtagggttcggcaacgacacctctgtgtcccctcctccctcgcgcactcattttccttcgtctcgttgctactcagagtgcgttccatccgagcggtgatgtgagatgtgtcccccctattcttcatcggtttgcttgcaatgattgagatagatgtgctcattcgccttgcagaaaatgaaaaataaagatatctttgtgcccagattcagagatggtttgactacctaatcatatatgcatgtgcaaaccgtctaaagctgactgttggatggggttggcgaaggtgtgcttgaataaggatcacctgaaggcgtggagtccctggctgctggttgttgtgtgtcctggcgggcgacagtttgaatcccctgcaggcagtggcggctgtaatatgtactagtataagcatgcagacaacaattggaaattgtatgattcatgtgatcattttccttgtatcttttctattgttggttatatatcagattttagaagattcttgtgatccttttccttgtattcttttctattgttggttatatatcagattttagaagattcttgtgatccttttccttgtattcttttctattgttggttatatatcagattttagaagattcatgtgatccttttccttgttttttattcacctgcgtgttttattgatgtgtgtctgagagaacagaaacttctagattgttctttgtatttttcttgtaacatatcaataaattgaatatatt

SEQ ID NO: 210775 - DNA, 1257 bp, Zea Mays
cgatgagtaggcccagatcccaatacaaggaatgcaataagagacatggttgtccgtggtgctccagcaatagccatagcagcggcactagcattagccgttgaagtttctgatttagattttattggtacgcctgaagaagcagcttcttttgtttcaaagaaattggaataccttgtatccagccgaccaactgcagtgaacctatctgatgctgcaacaaagctccaaactttggtatcaaaggcagctgaaactgcaaaagattccaagtctatctttcaggtctacattgaggccgcagagacgatgcttgttgatgatgtggcagataataaagctattggctcacatggagctgtatttcttcaaaggcagcttgcaaattcaaaaaagatatctgttctaacccattgtaatactggcagtcttgcaactgctggttatggaactgcccttggggttatacgcgctcttcattcggggggagttttagagaaggccttttgcaccgaaactcgtccatttaaccagggatccagacttacagctttcgagttagttcatgaaaaaatacctgcaacactgatagcagattctgctgctgctgcgttgatgaaacaagggcatgttcaggctgtcattgttggtgctgatcgaatagcagcaaatggtgacacagccaacaagattggcacatacaacctcgccatctccgcgaagcatcatagtgtccagttctatgtgtcagcgccggtaacttccattgatctctccctcccatctggggatgagatagtcatagaagaaagatcaccaaaggagttgctgaactctgaaggtggtctgggaaagcaagttgctgcatccggtatatcagtctggaacccagctttcgatgttactccagcaaatctgatcactgcaatcataacagaaaagggtgtgatcacaaaaactgatgctgatggatctttcgacatcaaaggattccttctgcccgcaaaataatactctagcgtggcttccattctgaatgacaaatgtctggatcgacactgttgtattctgttttctctattatacacaataataaagtcatgtcctcataggattttggggctaaaaaaaataaaataaaatggaaggattaaaattagtctctagaaattaaaccccccctaagcaagatgattgtcttgcttgctttcaaaataatacattatctctatatttatagtccctagaggatttgac

SEQ ID NO: 210776 - DNA, 2095 bp, Zea Mays
aaagcaaccaccgcgctggtctctcgcctgtgccgccctcgatcgcgcgtgaagagaagcccctcacttccgtcctcctcctgtcctgtccagctaccccggccccgaccccgataaagcccgccctttaaatcggcggatcgaggcgatgagcgcctctcgcgacgccagggcggagagctagccggccgggagcccacacgcagctggaagcaccagaccgatcgtgccggccgagcggcggcgcaggcgcaggcgcttacatgggagtagaggcgggcgggtgcgggcggagggcggtcgtcaccgggttctacgtctggggctgggagttcctcaccgccctccttctcttctcggccgccgtcgccgccgcagactcctactagcaagctaccaaccttctttctttcattcccttaggtagctcagccgtacacacaacaacacacaagtcatcagttactagctagttagtagcctatacaacacatacatacatacaaaggtgagtgaggttcgcgtgcaagcagagccaatcgtgccgatcgagctatatacatagccggcggcgagggatgggagaagcggccgcggccgtggcggcgtcgaagaggggcggcgggccggcgccgttcctgaccaagacgcaccagatggtggaggagcggggcacggacgaggtgatctcgtgggcggagcagggccgctccttcgtggtgtggaagcccgtggagctggcgcgcgacctcctcccgctccacttcaagcactgcaacttctcctccttcgtccgccagctcaacacctacgtgagtacactacgccgccgctccggccatcatctcttctactacgatcgatgcaatatatcacctgtcgtcgtcgtttagtgattgcaaaacacatacacttggtttccgtattaaattaatcagctagctagctagatgatcgttctctgctctatgatctgttagttctgaagcatgttgttgttttcgtctgtgctcgataaattaagctatgttatgtggtcgacgagcgagccttccaggcagctaccgtaccgtcttccaaggagtatatgcgtggtttccgaaaggtggtgccggaccggtgggagttcgcgaacgacaacttccgtcgaggcgagcagggtctcctgtccggcatccgccgccgcaagtcaacggcgctgcagatgtccaagtccggatccggcggcagcggcggcgtgaacgccacgttccccccgcctctgccccctccgcctcccgcgtcggccaccacgtccggcgtccacgagcgcagctcgtcgtcggcgtcgtcgccaccgcgggcgcccgacctggccagcgagaacgagcagctcaagaaggacaaccacacgctgtccgccgagctggcgcaggcgcgccggcactgcgaggagctcctgggcttcctctcgcgcttcctcgacgtccggcagctcgacctccggctgctcatgcaggaggacgtgcgagcgggggcaagcgacgacggcgcacagcgccgcgcgcacgcagtggccagccagctggagcgcggcggcggcgaggaggggaagagcgtgaagctgttcggcgtactcttaaaggacgccgcgaggaagaggggccggtgcgaggaagcggcggccagcgagcggcccatcaagatgatcagggtcggcgagccgtgggtcggcgtcccgtcgtcgggcccgggccggtgcggcggcgagaattaactgtcatccaatgtgaggttgatgacaaggacagtttcatccatcatatcgagcaagtaacaaagccagtgctgtggtaaaactgcaaagacagaacacaggacacaggagaaatataggcgtaagcatgttaattaagaattaattatatatgggatgcttttgaagtagcaagattggaagtagagataagtaaaacgggctagaagcagcgcccatgtgttcagaatggaaaattagcgtttccgtgtgtgtgttaagaaaaacttatatgcgctttctgcgagcacggttgattcttaagagcgacagcaaatgaaaggtgtattattaattgaa

SEQ ID NO: 210777 - DNA, 1736 bp, Zea Mays
cttctcccccctctgcagtcttcagtcttcacttccattccaccggctccgatcccaactgccatggcgctctccatctacacgcccacctcctcctccctcgtcccgccctccattcaggtcaggctgacttcgcgaccgccaaagcccgcgactttcagcctacggaggccacatctggccgcgcgggccgccgctggcaacgcacccacgtccccggtccgcgaggtcgtcactgagctcgacgcggtcgccggcttcagcgagatcgtgccggacaccgtcgtgttcgatgatttcgagaggttcgcacccacggcggccacagtgagctcgtcgctgctgcttgggatcactgggctcccagacactaagttcaagagtgcgatagatactgcactggcagatggtgagtgcaacgcactggagaaggctgaggacaggatgtcctgttacctcaccaaggctcttgcaaatgttggcgctgaactggctcatcaagtccctgggagagtttcgacggaaatagatgctcggttagcttatgacacccagggcataatccacagggtacatgaactgttgaatctatacaaccaacatgatgtctcaactgaccgcctgttattcaaaattcctgctacatggcaaggcatagaggcctcaaggttgcttgaatctgaaggaattcaaacgcatctaacatttgtttacagtttcgcacaagcggcagcggcagcacaagctggtgcatctgtagtacaaatgtttgtgggccgattgcgggactgggcaaggcatcactctggtgacccagagatagatgaagctttgaagaatggagaagatgctgggctttctttggcgaagaaagtatatgcctatattcacaggaatgggtacaaaacaaagctgatggccgctgccatacggaacaagcaggacgtatttagccttctggggatcgattacatcattgcaccactgaagatattgcagtctctggaagaatctgtcaccgatcccgatgtgaagtacggctatgtcccgaagttgactcctgctattggcaagacgtacaacttcactgaagaggagcttgtgaagtgggaccagctgagcctgtcagctgccatgggaccagctgcagaagaactgcttgcttcagggctagaggggtacgtgaaccaagcacgccgcgttgaggagctctttgggaagatctggccacctcccaatgtttaacaacggcgttgagagcaatagcaatgtgatttgcctggcaggctcacaatgctgcgcggaagacgatttgcttctttttggataatacacgaagcactcccgtgtttacgttgacttgacttgcagtgtgcatgtattctgtttttgtttgtaattcagatgatttgctggatccatgagaacctgtcgcctgatattccctgcaactgcaatcgtcctcgtacgtacggctggcaacggcttcttggaacatcaccacctgagctgcagttacatgattccatttatacacacacgtatctgcctgctatcagaagtcatttctacgctggttagccaagttcatgttttgaggatacaatcgcccacctagcgtcaagatctcccttgtgaagcgtcatgctgaatgtatgaatttaccatatgcttttgttacttggcctgattttattatttgtgtgcaagtaatgttggatatgtcctcggacata

SEQ ID NO: 210778 - DNA, 693 bp, Zea Mays
tgaaatgaatattattaccccataagtggacacaggccagttgaaccaatacgaacccgatcaactacatcaatgcatcaccaacccaagcatcccaatccaaacaacttgtaatttgaaactagagattgcgaactgaacttaaatcaaatacttcagtattggtctctagagaggaagctctgccaaccattactaataactgagaaggatttggcaatcgcttatctttgactcaataccttatgacctcggaaaggtttgaacccgtcagggactaaagatgccaaaggtatactgttttccttctcattctactatgctataactatttctcctctactgtttttaccctacgaactgtgttgctcatcttattctacactacatctacttaaactcaattgtcagtgtcatagctttgctggaagccacatggcatattacttacatgccttcttagagtcttttagttatttctgtaatctgtattataggaatcataattaatgttgttttataacaataaatttatattgttgttttttagtcagaaaaaatgcttgtcatttggtcaattagctagcgacatgatattaagtgttgtagcatggtcaagggttagctatgtctatgtgccatgtgttaaaagtattaggctacaaaaatccgaaaatgtcttgataaaagcaa

SEQ ID NO: 210779 - DNA, 2190 bp, Zea Mays
ccaatccgcccgccccgctcccgcgcgagatccatccatcccgatcccatcgcgtcacacgtcaccttgccatttatcagcacacgcggttagccgccctctcaagctcgctcgtcgctcgctcccctgccccgcgtccgccccgcctcctgaaaattcccccttttttcctacttcccgtcccacggctcctacgccccgcgggcccaaaaaccctagccggctaatccaatcctgcttcccgcccatggcctccgcggacgctgccaagcccgcgtccccgcccgccgcggatccgcccgtcgacgaccccatggacgccgaccccgcgccccccgcgggggaggaggagcaggccacgccgcagaagcagcagccggagaagaagcggggcggccggaggaagaagggcgaggcggcggagaagacgccgccgtcgtccaagaagtcggcgggccccacggtggagcgcccgtccagggagaggaagacggtcgagaggtacgcggagctcgcgccgcgcgccacacccgccaaaaagtcccccgctattctccagggttctggaacgaagctcaaggacatacccaatgtttcatttaaactatcaaagagaaaggtggatgagaatctccagagcctccatactgtattgtatgggagaaaatcaaataaccattttctgaagagaaacatatctcaattttctgggtttgtttggacagacaatcaagaaaaacagaggaacagaataaaggaaaagcttgagaaatttaacaaggagaagttgctagatttttgtgaaatactggacgttattgtaaaagtaactatgaagaaggaagaagtttctgccaagctcttggaatttttggagtctccttgtgttactcgggatgttgttctcactgataaaaagaaggggaagaaacggggaagaaaatctaaagtaggtcgtgagacaactgctgaaggtgcttctacagagaaggaaaagagcccataaacaagcagctgaagatggtaaagagaatgatggtgaggatgatgatcccactggttctgaggatgcatcaacaggagaggaagctgatggggactctgaggcaaatgatcatgctttgagtgatgatgaacatgatgagcctgcctcaaagaaaaagtcttcagatgttaaacaaaagaaagaaacaggttctgatgcaaaggaaaaggatgcaccagggaaaaaaggttctacgaaacgtgcatcaaagccttctcaaaacagtaaaaatgagcctgaggtagagataaaaaaggttggcaagagagaaaagagttcaaaagaaactgacgtgtcaccagattcaaataagtcaaacaagaagatttctaaatccaaaaagggtgatggaaaagaaacccaaaataataaagctgccaggtcatccaataagagtaaaggtaaagtcaaaggtgggtcagtggctgggactgccccaaccactgaacagcttcatgctgttgttagtggcattttgaaggaagttgacttcaacacagcaactttggctgatattctcaggcaattagggacccattttgaaatggacctcatggacagaaaagcagaagtgaagcgcattatagaagatgtaattaatagtatgtctgatgatgaaggtgaggaaggctcagaagatgaagctgaagacgatggtaaggcggataatttaaagagtgaacccgatggaggtgaagagaagtgattctgtggactggatgtggattgaacatcgaagggtcatttttcatggcagtctcctgtttggaggtttggctctgtacaattcgggcaccgcaagaacgagccggtgacctgggtactgcttacatgattgttaaccatttcaacagccatacgcatctagctgagcttgacttggtagtgaatgtagtctagtcgcttgtcatgtaatagctttgcgattgatagtttgctagcttaggtagctagcctgactgtaatatgcagaataattcttgtcttgtttccgtccattttatccatgtaaaactatgagttctgaatctttctgaaccttgcttttcttgttctccttgtcatcttaatgtctgatcatttttgttgaattttttggttgaagcttcttaggtctatagtggttcagacgcttcagtttgtca

SEQ ID NO: 210780 - DNA, 1632 bp, Zea Mays
gagcttgcttgattgggcctgaatgactggtttcatttaaactatcaaagagaaaggtggatgagaatctccagagcctccatactgtattgtatgggagaaaatcaaataaccattttctgaagagaaacatatctcaattttctgggtttgtttggacagacaatcaagaaaaacagaggaacagaataaaggaaaagcttgagaaatttaacaaggagaagttgctagatttttgtgaaatactggacgttattgtaaaagtaactatgaagaaggaagaagtttctgccaagctcttggaatttttggagtctccttgtgttactcgggatgttgttctcactgataaaaagaaggggaagaaacggggaagaaaatctaaagtaggtcgtgagacaactgctgaaggtgcttctacagagaagaaaaggaaaagagcccataaacaagcagctgaagatggtaaagagaatgatggtgaggatgatgatcccactggttctgaggatgcatcaacaggagaggaagctgatggggactctgaggcaaatgatcatgctttgagtgatgatgaacatgatgagcctgcctcaaagaaaaagtcttcagatgttaaacaaaagaaagaaacaggttctgatgcaaaggaaaaggatgcaccagggaaaaaaggttctacgaaacgtgcatcaaagccttctcaaaacagtaaaaatgagcctgaggtagagataaaaaaggttggcaagagagaaaagagttcaaaagaaactgacgtgtcaccagattcaaataagtcaaacaagaagatttctaaatccaaaaagggtgatggaaaagaaacccaaaataataaagctgccaggtcatccaataagagtaaaggtaaagtcaaaggtgggtcagtggctgggactgccccaaccactgaacagcttcatgctgttgttagtggcattttgaaggaagttgacttcaacacagcaactttggctgatattctcaggcaattagggacccattttgaaatggacctcatggacagaaaagcagaagtgaagcgcattatagaagatgtaattaatagtatgtctgatgatgaaggtgaggaaggctcagaagatgaagctgaagacgatggtaaggcggataatttaaagagtgaacccgatggaggtgaagagaagtgattctgtggactggatgtggattgaacatcgaagggtcatttttcatggcagtctcctgtttggaggtttggctctgtacaattcgggcaccgcaagaacgagccggtgacctgggtactgcttacatgattgttaaccatttcaacagccatacgcatctagctgagcttgacttggtagtgaatgtagtctagtcgcttgtcatgtaatagctttgcgattgatagtttgctagcttaggtagctagcctgactgtaatatgcagaataattcttgtcttgtttccgtccattttatccatgtaaaactatgagttctgaatctttctgaaccttgcttttcttgttctccttgtcatcttaatgtctgatcatttttgttgaattttttggttgaagcttcttaggtctatagtggttcagacgcttcagtttgtca

SEQ ID NO: 210781 - DNA, 3641 bp, Zea Mays
caaaaagatgtgaatcatataaatatcataaacatataagcatgatacatgtatcataacagaacaactgaaaataaagaaatgacttaacagaacaactgaaacatatagacaacaacgtaaacaacatgattgtataactgaaacaaacagatatggcatataactagcatgaacatacatcagacatatcatggtatgatatgacaaaacagatgaaatatactcatggctacatacgaaacagtagagatgaacaaatgaaacatatataatctggaaaatataaaacgataaggagatgaatcgatcgtaccctcctatgtgctccgaggatccagatacttgtccaacttttctcgtcattccgtagaagatggagacgtctctctaccagaaagaagaagatgggcatctgaaaaagtttaacctgtgttgaaactccgcggtttatgagtgctaaaaattaacacaaccttgcctcgcctcgccacgtcacgcttgtgcccggccgacaacggcacactcgcgcgtgtggcacgtctttgtttgtttcttaatatctcaaattaaatagaataattctcaccatatacgtcagtcagcgtccattggaattccaattcggtactatgagtttattgatttatcaaatttaaatgggtctagcctataataattccaatagataaatgatagaagagaaaagacatgtggttagataacattattgtctgtagagaattatccattaataatacgattttatttatatataattttaatttagcaaataaaaagcatatcattctaattagattggggtatcctatttagcaaaaattaaaattctccgtgccaaaaactaatgctatctgtaattgagcattgtcatagcagatactcggtgtaagcagatattttaatccattagatttagatctaacgatatgttatatttagtaattaaacatttccatcaccatctaatgtagttttataagaaaaccctctaacaaaatataattgtatttatcattggatataaatctaacagactaaaaactattcataaacgcttgcacctagtaactgcatattagtcattgcctttacagtatgagcatgtcggctcgcatgtctgcccatctcaccaaaccgctcctaatccccaccatcatcacgtgcaattaatcaaccctctccaaccaatccgcgttggaattacaagaaagtcccttgcttcccttcccccctcgtctccgttcatggtgctggtggccgtcgaccggcaactccggcgcgggggcctctaatggcgcagtacaggcagcagtacggcgtcggcttttccgactcccgcggccaccatcaccaggtgctcccggactggcaccggccccaccacgcctccgccaagtcctcctcacggatccgccgccccgggaagcctgcgccgcgccgccgctcgccggctgctgctgccgccgtcgccgccgctctactcctcgccgccgtcttcctcctttcgcgccgcatctcgcgcagccccgcagagatcagccaagattcgagcgctagggagacgttgccggactggaaccagagcaagagctggaaggagctcaagttcgggcacggcggaggtggccgcagcgcgcgggactccaggtactgggaccgggacgataggcgccgcgacgaggactacacagaggacgaaaaggagaagatctcgggtggaagtgggacctccggcgatgctggcggcagcagcgataaaggtaccacctctgagggaggtggggaggataaaggtttgactaccggcagcgatgctaaggatgttccagaggtgtctgaaggtgggaaaggtgggaccttgtacaatgagggtggcaggaaggagctggagcagtacgaggctgcagccatgggagccacaggaacaggggtgaaggaggttgatccagatgatgagtatgacgatggcatcgatacacaggatgaaatggaggatgctcacctgcattcatctgatggtgggaggaagcttggtggtggcagccatgagggtgctgagaagaaggacgaggtcgctactgagaggcacacagaagcaggtggagggattgcgggtagtcatgatattagcagcccagacaaaaagaaggtttcaggtactggagacaagaagcatgggcccaagaagaaaccgaaacgcaagaagtctggttcaatttgtcaaatgaagtttcttaactcaactgctcagcttgtggagcctgtgaggaatgagaaatttgctagttttaagttggagtatgtagaagttgaagaaagacctattggatcagaattttgggaaccgagatttgccggccaccaaagcctgcaagaaagagaggagtcatacaaagcccatgaccaacagttgacatgcgcttttgttaagggtccaaatggtacaagtactggttttgatatatctgatgatgaccgaaagtacatgagtaaatgccacattgctgtatcatcctgcatctttggaaattctgatcgactgaggactccatttggcaaaacgattacaagcctctcaaagaagacagtttgctttgctatgtttttggatgaagtgacattgcacactttagaatctgaaggccagaaaatggacagcatgggtttcattggcatatggaagatcatattgattaagaacatgccttataatgacatgcgtagagtggggaaaataccaaagtttttggcacacaggctattcccatcatcgaggttctcaatctggttagacagcaaactgagactacaaactgatcctatccttatcctggagtatttcctctggcggcatggctatgaatatgctatttccaatcactatgatcggcattgtgtttgggaggaagtagcacaaaataaaaagctgaacaagttcaaccatacaataattgaccagcaatttgagttttaccaagcagacggactgacaaggttcaacccgtcggatcccaacaagcttctaccaagctatgtccccgaaggctcttttatcgtgagagaacacacaccaatgtccaacttattctcttgcctgtggtacaatgaggttgatcgtttcacgcctcgtgaccagctcagctttgcatatacgtacctaaaactaagaaggataaaccctgacagaccgttccgactcaatatgtttaaggattgtgagaggcgatcgatagcgaagctattccatcatcgatcagaagagagtcacagtggtgcacaactaacaagatgacacatccttcttggtgatggggggcagaagagggagagatcagggattgtattttttatacagctcagcagtcagctatgcacaagatccattgaaatttatacccctgtcgaagagttcatactttatataatgcaagtcatctttacccttgttactctctagtgctgcagaccagttcccgcctttcatgttttgcagttgacaaaggcagattaggaggttctagttgtttggtttttctttattctccgtaaagctctgtttattctttggataatatgggaaagttgtggctgggcatggacttcccagatgtattatt

SEQ ID NO: 210782 - DNA, 2116 bp, Zea Mays
gcgcgtctgggctcttctggtgcgcgattcgagatcagccaagattcgagcgctagggagacgttgccggactggaaccagagcaagagctggaaggagctcaagttcgggcacggcggaggtggccgcagcgcgcgggactccaggtactgggaccgggacgataggcgccgcgacgaggactacacagaggacgaaaaggagaagatctcgggtggaagtgggacctccggcgatgctggcggcagcagcgataaaggtaccacctctgagggaggtggggaggataaaggtttgactaccggcagcgatgctaaggatgttccagaggtgtctgaaggtgggaaaggtgggaccttgtacaatgagggtggcaggaaggagctggagcagtacgaggctgcagccatgggagccacaggaacaggggtgaaggaggttgatccagatgatgagtatgacgatggcatcgatacacaggatgaaatggaggatgctcacctgcattcatctgatggtgggaggaagcttggtggtggcagccatgagggtgctgagaagaaggacgaggtcgctactgagaggcacacagaagcaggtggagggattgcgggtagtcatgatattagcagcccagacaaaaagaaggtttcaggtactggagacaagaagcatgggcccaagaagaaaccgaaacgcaagaagtctggttcaatttgtcaaatgaagtttcttaactcaactgctcagcttgtggagcctgtgaggaatgagaaatttgctagttttaagttggagtatgtagaagttgaagaaagacctattggatcagaattttgggaaccgagatttgccggccaccaaagcctgcaagaaagagaggagtcatacaaagcccatgaccaacagttgacatgcgcttttgttaagggtccaaatggtacaagtactggttttgatatatctgatgatgaccgaaagtacatgagtaaatgccacattgctgtatcatcctgcatctttggaaattctgatcgactgaggactccatttggcaaaacgattacaagcctctcaaagaagacagtttgctttgctatgtttttggatgaagtgacattgcacactttagaatctgaaggccagaaaatggacagcatgggtttcattggcatatggaagatcatattgattaagaacatgccttataatgacatgcgtagagtggggaaaataccaaagtttttggcacacaggctattcccatcatcgaggttctcaatctggttagacagcaaactgagactacaaactgatcctatccttatcctggagtatttcctctggcggcatggctatgaatatgctatttccaatcactatgatcggcattgtgtttgggaggaagtagcacaaaataaaaagctgaacaagttcaaccatacaataattgaccagcaatttgagttttaccaagcagacggactgacaaggttcaacccgtcggatcccaacaagcttctaccaagctatgtccccgaaggctcttttatcgtgagagaacacacaccaatgtccaacttattctcttgcctgtggtacaatgaggttgatcgtttcacgcctcgtgaccagctcagctttgcatatacgtacctaaaactaagaaggataaaccctgacagaccgttccgactcaatatgtttaaggattgtgagaggcgatcgatagcgaagctattccatcatcgatcagaagagagtcacagtggtgcacaactaacaagatgacacatccttcttggtgatggggggcagaagagggagagatcagggattgtattttttatacagctcagcagtcagctatgcacaagatccattgaaatttatacccctgtcgaagagttcatactttatataatgcaagtcatctttacccttgttactctctagtgctgcagaccagttcccgcctttcatgttttgcagttgacaaaggcagattaggaggttctagttgtttggtttttctttattctccgtaaagctctgtttattctttggataatatgggaaagttgtggctgggcatggacttcccagatgtattatt

SEQ ID NO: 210783 - DNA, 1043 bp, Zea Mays
atctgaaccagcacagtttatcagggacgtagcagtgagttggttatagagaactcatatttgatggctaaacataaaagcgacttagaaggattcaagttagatgtatacgaaagtggtgaggactcgcaagaagttcaatccactgccagaaggttagatttgagtctcaattattttcaagggaagggatcatgctgataattcactccatgggtacaaggttttcaaaaatccgagcattagtgatgtcctgtgcacaacaacagcagaggctcttgcaatggggaaattcgtgatttgcgcagaacatccatcaaatgagtttttcatgtcatttccgaactgtttgacatacaagacttcataggagtttgttgcgagagtgaaagaggcaatggatagagaaccctaaccgctaacccctgagcaaagatacaacctttcgtgggaggcagtgactgagagattcatggagtactcagaccttgacaaggatctgaacaatgaggctgctcagcctgaacaaggtaggaaaagaaagaataaaagaacctcacatcctaatttgtccgacatcatggatggcggtctagcgttggcccatcgatgcttaactggcaatgaggttctcaggctggcaaccgaagccattcctggtacccgggactactataagcagcattgtgtggatattagtctcttgcctccttaagtagcaccctgtatatggctggtgatatggctggtgatgactgatgagcacccaaagctaatcgtaggtatatgtgtacataatacaccatgtcgctcttatgtcgactaatgtttggagtattgtaattgtagcacgcatgacaaactttggccattgttttgtactctgtaataaggttctttctccttaaatttggtgttttattgcagaaatttgtagtacatggatatcaaaagttcataactccagcagactgtcagcacaatatttatctgcttttgccactgaattagagaaacatagtcttaaaaagttaagagacgaa

SEQ ID NO: 210784 - DNA, 1055 bp, Zea Mays
ctcggtttcgatagccgcaggccgcgccattaacccgcagaggcggactcatggtaccacacgccatcggcccatcagtagttaaccaccaaccacgtagtaggccttacgggcctaatgtcgttggctggtcctttgccacgccatgaaaccaaagagcggcgtcgttgcgatccaagacggcaggcgagctccaggttcagttgttcggaggaagcccagcgccggcgatggcgagtgtaaaccccgcggtggcggaggcagaggcggaggcggtggggcggcgggacgagctgtcggagtcgctggctgagctcttcaccaacgtctccctcatggtccgcggcgagctccagatgaatgatcgcgtatcacaggaatacagcaactacggtgacatcgccgctggtctgcgagtatttgtagagcagctgaatgagaaaaaccgaggcttcgaggattacgtgtcgcagattgatgcgatagatcaacaggtgactgagtttgaggcagtggtgtccatgctcgacaagcatgttgccctcttggaaaagaaagtaaaatcggcctatcacatttctactacccaatgatttccatccatatgccacaatgcagattcttttgccaacacttgagcttatccgggaaacatattattatatattctggctgaggaaacaacgctgtagctgtagctgtaggtgttcccaccgttgaaatgatgcaatcagattccaagttgtgctgtagtaactttcagacaaacaggcagcagttgggttttgtccctcacagtcacagtgtattattagtgttaggaaattgatgcatgggtgccgggatttgcggggcacaatcattgcctactgctccacaagaaacatgtcactgttgtgtgtgttgtaatttctggatcaatgggcgaactgcatcttgcagtgtacgcgcttgccaccaagattcctgcagattttcagccaaaggaaatctggctgcaggggagcagtccatggagctgaatcctcctgtacaaaagaatcttgaggccttgg

SEQ ID NO: 210785 - DNA, 285 bp, Zea Mays
aatgccttgttctcccaccttgcatgggtgcagacagacaggaagtcgggtgggctcggcgatcttaaatacccacttgtttctgatgtgaccaaatcaatttcaaaggcctttggtgttctgatccctgaccagggtattgctttgagaggactgttcatcattgacaaggagggagtgattcagcactctaccattaacaaccttgccattggtcgtagtgtggatgagaccatgaggacccttcagtccacaggtcacaattggaagagtattgaagttgac

SEQ ID NO: 210786 - DNA, 2121 bp, Zea Mays
gggaatttggtggtttccatctaccagtaaatcacgcgcgatgtaccgggtgaagagcgagggggagggcgagggcgagggcgactgcgaaatgatgctgcaggaacagatggactcgctggtggccgacgacgtcagcagcggaggagggtcgcctcacaggggcgtcggcacgcccctgaagaaggggccatggacgtccgcggaggacgccatcctggtggactacgttaagaagaacggcgagggcaactggaacgcggtgcagaagaacaccgggctgttccgctgcggcaagagctgccgcctccggtgggcgaaccacctcaggcccaacctcaagaagggggccttcacccccgaggaggagcgcctcatcatccagctccacgccaagatggggaacaagtgggcgaggatggctggtcacttgccagggcgtactgacaatgagatcaagaactactggaacactcgaataaagagatgtcaacgagctagccttcctatttatcctgctagtgtatgcaatcaatctacaaatgaagatcagcaactgtctggtaattttaacggtggcgagaatatatccaatgatcttctatctgggaacagcctttatctgccagattttaccagtgacaatttcattgcgaacccagaggctttatcctatgcaccacagttgtcagctgtttcaataagcaatttgctcggccaaagctttgcatcaaaaagttgtagcttcatggatcaggttgaccaagcggggatgctgaaacaatctggctgtgtgcttcctgcattgagcgatgccattgacagtgtgctttcctcagctgatcatttttcaaatgactctgagaagctcaggcaggctttaggttttgattatctgaatgaagccaatgctagcagcaagagtattgcacctttcggggttgcacttactggcagccatgcctttttaaatggcaatttctctgcttctaggcccacaaatggtcctttgaagatggagctcccttcactccaagatactgaatctgatccaaatagctggctcaagtatactgtggctcctgcaatgcagcctactgaattagtagatccttacctgcagtctccatcagcgaccccttcagtgaaatctgagtgtgcatcgccgaggaacagtggtcttttggaagagctgcttcatgaagctcaggcactaagatctgggaagaaccaacaatcatcggtccgaagttcaagttcttctgctggcacaccttatgagactaccacggtggttagcccagagtttgatatgggtcaggaatattgggaagaacagcccagttctttcctcagtgaatatgctcattttagtggaaattctttcactgaatccactcctcctgttagtgctgcgtcacctgatatcttccagctctccaagatttctcctgcacaaagcccttcaatgggctctggcgagcaggcgttagagcctaaacatgagtcggcagcttcacctcgtcctgaaaacttgaggcctgatgcattattctctgggaacacagccgatccatccattttcaataatgccatagccatgctcctgggcaatggcattgatgccgagtacaaacctgttcttggtgatggaattgtgctcgattcttcgtcatggaacaacatgcaacatgcttttcagatggcgggattcaaatgagttccatgcacttgtttgtgatgctgaagggcttcttgttgcttgttttggggtcagtatcagcgaaggccgcattgattgtgacgctgcattcctgacagagggcgtgcaggtgcagcagctaccatatgtgatcttcatgctaatagtccttttgtctaataaagtgcatgaagataaaccggatattttttttttgctttgtattagagaaccgtttttgtcaaccctgtcaggattctgttggaaatgtgtcatgatttttgtttgaacaatttaatatctgtcattgatactgtgctgtgtgctactccttgatgcatttgcttgtggcagcaaattgtttaagtatacactgtcattgctgctggcacatcatttgggcaatattgatgtttttc

SEQ ID NO: 210787 - DNA, 1871 bp, Zea Mays
cccaaactgccgaccagcgatcacctctggtgggtctccagtgagtcactgctcaccagtcaccgccatggccgggaagcagttcccctccccggcgcactcgcgctccgcctcagcctcctcccgccgactcctcgccgccgtcgccgcctccctcatactcctcacagcttcctacttcctcctcctctccccatcctcgcaccgatccgccccagccatcctcgcgaaccctagcgccaccacatccttcctcgcctccctcgaccgcttcctctccgatccgcatccctctgcctccgccgccgctcccgtagaacttgacgccgcgatccgggtccaggaggatgcccgtctctacggggaccccacatggcccgcgccggccgcggggctgctcagggtctacgtttacgagatgccgagcaagttcacgtacgatcttctgaggttgttcagggattcctaccgggacaccgacaacctcacgtccaatgggagccccgtgcaccgcctcatcgagcagcattctattgactactggctatgggcggatctcatcgcacttgattcacagagacttttgaagagtgttattagggttcagcagcaagaagaagccgacattttctatgtgccattcttcacgacaatcagttatttcttgctggagaaacaagaatgcaaggcactttatagggtctgggagcatctcttaagctttgaaatgggtcacagatcagcctgcttggcaacgttcagaaggcagggatcatgtcattcctgttcatcatccatggtcatttaagtcagtccggagatctgtcaagaaagcaatatggcttctacctgatatggactccaccgggaactggtataaacctggacaagtatatctagaaaaggatgtcatccttccatatgttccaaacgttgatctttgtgatcacaagtgtgtattagaaactcaatccaaaaggagtatattgctgttctttcgaggaagactgaagagaaatgctggaggaaagatccgcagtaaacttgtagaggaacttaaaagtgcaaaagacatagttatagaagaaggttctactggagctcagggaaaagcagcagctcaggatggcatgcgcaagtctttcttttgcttgagtccggctggggataccccatcttctgctcgcctgtttgatgcaatcgttagtggttgtatcccagttataattagtgatgaactggagcttccatttgaaggaatacttgactatagggagatagcattgtttgtttcagcaagtgatgctgtgcaaccgggctggctcttgaaatacctaagaggaatcaatgccaaaagaataagagaaattcagtctaatcttgtgaagtattcaagacattttctgtattcaagtcctgcccaacctctcggaccagaagaccttacatggagaatgattgctggtaagctggtaaatatcaagttgcagattcggcgttctcaacgtttggtcaaagagtcaaggagcatatgtacatgtgaatgtagagttgggaacaccacgagaatgctttgaccaatattttcatttgtgcctttaaacttttgtagcatagccgttttttgttaccaatgaggcgagctttgagtttggcaaaatttgccgatgtatttgtaaatgcaactgagctggaaagagttgtgatactgtactaatcccgatgcttgtgtttgctttactgcccgttaggaacaaaaggaatgtaaaacagagaaatgtaaaaaaaaatcaagagcttgaagtagatatttatttcctccatttcatgaatgaaagtaaaggtctgtttggtttgtggctaaatatgcc

SEQ ID NO: 210788 - DNA, 1672 bp, Zea Mays
gagcactagcgcgtcttctaaatatggagttttctggcattccccctcctcaatcgacaaccactcactcccatcttgttcggagctagagaaggtgtggccttcgccgtcacgaaactaggctctgtgcggcgccctcctctcggttgtggaggcgaacccctcaaatttgggggccattgcttggcttgctctgacgagtcggtggagcaggtatgaccgggttgttgttgtccaagtgcaagagagaagagggcaattagacagggacgacatagactctcaacgagccagatgacgactcgacaaggtggatctatcggggcactacaacgccgagacggcggaggactctgtgatgccagtacctagatctgttgtgacaaaaggaggtgttcaccagagcagggctgttccgtcagcatcgattcatcatcacccactacaaggaggcataggatggactctgagtcttcaaacttgttaccccagtatggggatttcccatgtcgaacttcagttcaacaaaatgcacaaccaccaaatgtttcaactcagctacgagatattgtcgaaggaccacaatcaactgtccaagtgaaaagaaggccagtggcgaggagaaaacttgcaaatttctgtaccaaggaggattgcaggttgtcccagtgttggctagcaataaaatgtgaccctgttgtcaacactggacaaaaacaacaaggattatggaataggctcaccgaggcatacaaccatcgacggggcaacatgcctgaaagatcaactaagtcacttatgagtagatgggataccataaaaacacaatgctcactattttctggctacatggcaaatgtcctacgagagaactctagtgggttgtccgacgctgataaggatgaaccaaagtggatggatcatagttccaataagcaagttcgaattattgaagttgcaccaattggatcgaacatcatcgacctagaccctaaagactcttttcttggtagcacaacatcaaagcaacatctaggtcaagatgcaagcaagggaaaaactaaaaaggctcgatcaagctcaatcactgtaagctcatcggatgaatatcttgccaaaatggatgatctttctctacaaaggttgtcggtttaccaaacaactatggcatttgagcagcaaaaggcagagagggatgatcaatttcgtaaacaacaattggagattgagcaacaaaagttggccattgaacgagagcgtttggaacgccagaaaaggattgatgagaaggcagaagaggagcgtatcctagcaattgacatgtccatttgcaatcctgctcagcgtgcatactataagaagttgcagcaacagatcctatctaagatacaagccgatatgtccaatattgaatgaggtttccatggagttttagcatgccaaaaccataaaatttatatactttgttgtgttcagtttccttacaagtttggtattggtatttctttgattttctttcatgcattagttcatcaaatttcttgtaataagagcatgtgtctgatgttgttgtgataatagaaatgttaaaagccagtcatgtggtttgacattaattgttgtggaaatgcagttagttttctcataatggtgcaaatcaatccaaggtgtg

SEQ ID NO: 210789 - DNA, 3033 bp, Zea Mays
gtttgatcaggaactcaactactgcaggttgagatgaacggtccatcgaatttcatgcctactcctgaacaggatgttctggacgtcaagcccttgaggacattggctccaatgttccctgctcctctgggtgtcaatacatttaaccactcaaccacgccaccattgatatttgtcactccttctggacaatttcaagggggttttggtgattggaataattctgctgccaaatcatttttcgctttcagcagcaaggatgctcgtggaggcaaggctgatacatttagtgatcagaatactggtactggcaaggctgccacttttggtgatcaggatgcttttggcagccagaatgtttttgctagtgatcacagtactggtactggcaaggctgccacttttggtgatcaggatgcttttggcagccagaatgtcgccactggtgtgcaggatgctgcgaaaggccagactgcaacagattggacagatgtgagtgccaatcctaatggcccaattgatgccattgccatttcagcttacaggtcaacacagcctaatgttatatcactggatgatgatgatgacgacgacgatgatgagccttatgctgctaacaagacatcagcatctggacgcaagatcaagaggccatcccacctcagcggatacaatgtgagtgatgctttggtaagtgacagctccaacagcatgaaggttaagcgccccaaatcctctcacgggaaagctgctgctgacaacgagcatgccttgcttccaccttctgaggatcccagggaaattgtggaggcagttctcatgacctttgaggcgttgcggcgtaggcatctccaattggatgaggcacaagagactagcaagcgtgcagatctgaaggctagtgctatcttgatgtccagtaatatcagggctaaccctgggaagaggataggggttgttcctggagttgaaataggggacattttctacttcaggatggagctatgtattattgggctgcatgctcctagcatggccggaattgactatatgactgccaagtttggtgacgaggatgattctgttgcaatatgtattgttgctgcaggtggttatgacaataatgatgatgatacagatgtactggtttacagtggttcaggaggtaatagcaagaacagtgaggagaagcatgaccagaagcttgagaggggcaacctggctcttgagaggagcttgtccagaaaaaatgtaatccgtgtggttcggggctataaggatccaggttgcttgactgggaaggtttatatttatgatggcctctataggattcacgagtcatggaaggagaaaacgaagagtggaatattttgttttaagtacaagctgctgcgagagccaggacaacctgatggggttgcaatctggaagatgtcccagaaatgggtacaaaatccactgactagaggcagtgttttaaatcctgatctatcatctggtgcagaaaatcttccagtgtgtcttgttaatgacattgacagtgatgaagtgccacaccatttcacatataccactcaggtcgaacacttgaaaccactcagttctgtgaagcctttacagggttgcagatgccttagtgtttgtctgcctggtgatgccaactgctgctgtgcacagcgtaatggaggcagcttaccttacagctcatcaggactgcttgtatgccgcaagactatggtttatgaatgtggtgaatcctgtcggtgttctttcaattgtcgtaacagagtgacccagaaaggagttaggatccactttgaggtctttaagacgggaaatcgaggctggggtcttcgttcgtgggacgctatacgggctggttcatttatatgcgagtatgttggtgaggttattgatgatgctaacattaatctgaatgatattgaagatgattatatatttcagatgtcgtgtcctggtgagaggacattaaaatggaattttggacctgaattgataggggagcaaagcacaaatgtttctgctgatacctttgagactctacccattaagataagtgctaaaagaataggaaacatatcacgtttcatgaaccatagttgtgctcctaacgtattttggcagccagttcagtttgaccatgaagatgatcatcgcccacatatcatgttctttgctttgaagcatattcctcccatgacagagttgacttatgactatggtgacgttggagctgatcctagtggtgtacggtctcctagagcaaagaactgcctttgtgaatcctcaaattgtcggggattctttatctgaccgtggaaaatgcatattctatctatcaacattcaaccctaccagctagattctcggctttgtcgacaactcgacatcgaattgtttctgattcaacagctaatgtcgcaagacagcatcaatttcgtcatccaaaattatcactccatatcctttttggtggcacctgaagaaaaagtaggactgttcgaacagcttgcatcactctgtcgttgtggaaccattatattaattaatgtcaatcttttagatgaccattcagcaactaatgcacaaacgtttcttttgtgggggaagaatgttggtcttggaagttcaattttgtgtagtttgtagacttgtagagcatttagtgctgctaaacttgtgcaccttaagtcttttggctgtaaaagagcctcgaggctccagctgaattggttaggcagtctaagtagcatttctttgatcctgaatttgactccacgtgagtcaatttcaagctggagttaaaaaaaacattcttatgttctatactaaagtacagttctaaggctcaaccatgatcatagtcgttctcacatgtgctatattgctgttgtgtatgggtgtggtacgtgaaacttgatatattggtaaagtttttttatactaattaaaaacttgagaaaatacagactacccaagtgtagagctgttggatcctcgcattttatccat

SEQ ID NO: 210790 - DNA, 3033 bp, Zea Mays
cggacaagagaagaaatcaagaaaacccccctacctcgccccaaaaatgccaaaccacaacaagtcgcttccgtccctccccacgccgccgagggccgccgaccaggagatcacgcgctcatctctcatggagtccgtctagcttccgctcgtctgcgcccactccaagcagccgcagcggaactcaactactgcaggttgagatgaacggtccatcgaatttcatgcctactcctgaacaggatgttctggacgtcaagcccttgaggacattggctccaatgttccctgctcctctgggtgtcaatacatttaaccactcaaccacgccaccattgatatttgtcactccttctggacaatttcaagggggttttggtgattggaataattctgctgccaaatcatttttcgctttcagcagcaaggatgctcgtggaggcaaggctgatacatttagtgatcagaatactggtactggcaaggctgccacttttggtgatcaggatgcttttggcagccagaatgtttttgctagtgatcacagtactggtactggcaaggctgccacttttggtgatcaggatgcttttggcagccagaatgtcgccactggtgtgcaggatgctgcgaaaggccagactgcaacagattggacagatgtgagtgccaatcctaatggcccaattgatgccattgccatttcagcttacaggtcaacacagcctaatgttatatcactggatgatgatgatgacgacgacgatgatgagccttatgctgctaacaagacatcagcatctggacgcaagatcaagaggccatcccacctcagcggatacaatgtgagtgatgctttggtaagtgacagctccaacagcatgaaggttaagcgccccaaatcctctcacgggaaagctgctgctgacaacgagcatgccttgcttccaccttctgaggatcccagggaaattgtggaggcagttctcatgacctttgaggcgttgcggcgtaggcatctccaattggatgaggcacaagagactagcaagcgtgcagatctgaaggctagtgctatcttgatgtccagtaatatcagggctaaccctgggaagaggataggggttgttcctggagttgaaataggggacattttctacttcaggatggagctatgtattattgggctgcatgctcctagcatggccggaattgactatatgactgccaagtttggtgacgaggatgattctgttgcaatatgtattgttgctgcaggtggttatgacaataatgatgatgatacagatgtactggtttacagtggttcaggaggtaatagcaagaacagtgaggagaagcatgaccagaagcttgagaggggcaacctggctcttgagaggagcttgtccagaaaaaatgtaatccgtgtggttcggggctataaggatccaggttgcttgactgggaaggtttatatttatgatggcctctataggattcacgagtcatggaaggagaaaacgaagagtggaatattttgttttaagtacaagctgctgcgagagccaggacaacctgatggggttgcaatctggaagatgtcccagaaatgggtacaaaatccactgactagaggcagtgttttaaatcctgatctatcatctggtgcagaaaatcttccagtgtgtcttgttaatgacattgacagtgatgaagtgccacaccatttcacatataccactcaggtcgaacacttgaaaccactcagttctgtgaagcctttacagggttgcagatgccttagtgtttgtctgcctggtgatgccaactgctgctgtgcacagcgtaatggaggcagcttaccttacagctcatcaggactgcttgtatgccgcaagactatggtttatgaatgtggtgaatcctgtcggtgttctttcaattgtcgtaacagagtgacccagaaaggagttaggatccactttgaggtctttaagacgggaaatcgaggctggggtcttcgttcgtgggacgctatacgggctggttcatttatatgcgaatgtcgtgtcctggtgagaggacattaaaatggaattttggacctgaattgataggggagcaaagcacaaatgtttctgctgatacctttgagactctacccattaagataagtgctaaaagaataggaaacatatcacgtttcatgaaccatagttgtgctcctaacgtattttggcagccagttcagtttgaccatgaagatgatcatcgcccacatatcatgttctttgctttgaagcatattcctcccatgacagagttgacttatgactatggtgacgttggagctgatcctagtggtgtacggtctcctagagcaaagaactgcctttgtgaatcctcaaattgtcggggattctttatctgaccgtggaaaatgcatattctatctatcaacattcaaccctaccagctagatcctttttggtggcacctgaagaaaaagtaggactgttcgaacagcttgcatcactctgtcgttgtggaaccattatattaattaatgtcaatcttttagatgaccattcagcaactaatgcacaaacgtttcttttgtgggggaagaatgttggtcttggaagttcaattttgtgtagtttgtagacttgtagagcatttagtgctgctaaacttgtgcaccttaagtcttttggctgtaaaagagcctcgaggctccagctgaattggttaggcagtctaagtagcatttctttgatcctgaatttgactccacgtgagtcaatttcaagctggagttaaaaaaaacattcttatgttctatactaaagtacagttctaaggctcaaccatgatcatagtcgttctcacatgtgctatattgctgttgtgtatgggtgtggtacgtgaaacttgatatattggtaaagtttttttatactaattaaaaacttgagaaaatacagactacccaagtgtagagctgttggatcctcgcattttatccat

SEQ ID NO: 210791 - DNA, 3258 bp, Zea Mays
aacacatcagaccggacacagcgagaagctcgagcatttgtccccgaggagcgagcggacaagagaagaaatcaagaaaacccccctacctcgccccaaaaatgccaaaccacaacaagtcgcttccgtccctccccacgccgccgagggccgccgaccaggagatcacgcgctcatctctcatggagtccgtctagcttccgctcgtctgcgcccactccaagcagccgcagcggaactcaactactgcaggttgagatgaacggtccatcgaatttcatgcctactcctgaacaggatgttctggacgtcaagcccttgaggacattggctccaatgttccctgctcctctgggtgtcaatacatttaaccactcaaccacgccaccattgatatttgtcactccttctggacaatttcaagggggttttggtgattggaataattctgctgccaaatcatttttcgctttcagcagcaaggatgctcgtggaggcaaggctgatacatttagtgatcagaatactggtactggcaaggctgccacttttggtgatcaggatgcttttggcagccagaatgtttttgctagtgatcacagtactggtactggcaaggctgccacttttggtgatcaggatgcttttggcagccagaatgtcgccactggtgtgcaggatgctgcgaaaggccagactgcaacagattggacagatgtgagtgccaatcctaatggcccaattgatgccattgccatttcagcttacaggtcaacacagcctaatgttatatcactggatgatgatgatgacgacgacgatgatgagccttatgctgctaacaagacatcagcatctggacgcaagatcaagaggccatcccacctcagcggatacaatgtgagtgatgctttggtaagtgacagctccaacagcatgaaggttaagcgccccaaatcctctcacgggaaagctgctgctgacaacgagcatgccttgcttccaccttctgaggatcccagggaaattgtggaggcagttctcatgacctttgaggcgttgcggcgtaggcatctccaattggatgaggcacaagagactagcaagcgtgcagatctgaaggctagtgctatcttgatgtccagtaatatcagggctaaccctgggaagaggataggggttgttcctggagttgaaataggggacattttctacttcaggatggagctatgtattattgggctgcatgctcctagcatggccggaattgactatatgactgccaagtttggtgacgaggatgattctgttgcaatatgtattgttgctgcaggtggttatgacaataatgatgatgatacagatgtactggtttacagtggttcaggaggtaatagcaagaacagtgaggagaagcatgaccagaagcttgagaggggcaacctggctcttgagaggagcttgtccagaaaaaatgtaatccgtgtggttcggggctataaggatccaggttgcttgactgggaaggtttatatttatgatggcctctataggattcacgagtcatggaaggagaaaacgaagagtggaatattttgttttaagtacaagctgctgcgagagccaggacaacctgatggggttgcaatctggaagatgtcccagaaatgggtacaaaatccactgactagaggcagtgttttaaatcctgatctatcatctggtgcagaaaatcttccagtgtgtcttgttaatgacattgacagtgatgaagtgccacaccatttcacatataccactcaggtcgaacacttgaaaccactcagttctgtgaagcctttacagggttgcagatgccttagtgtttgtctgcctggtgatgccaactgctgctgtgcacagcgtaatggaggcagcttaccttacagctcatcaggactgcttgtatgccgcaagactatggtttatgaatgtggtgaatcctgtcggtgttctttcaattgtcgtaacagagtgacccagaaaggagttaggatccactttgaggtctttaagacgggaaatcgaggctggggtcttcgttcgtgggacgctatacgggctggttcatttatatgcgagtatgttggtgaggttattgatgatgctaacattaatctgaatgatattgaagatgattatatatttcagatgtcgtgtcctggtgagaggacattaaaatggaattttggacctgaattgataggggagcaaagcacaaatgtttctgctgatacctttgagactctacccattaagataagtgctaaaagaataggaaacatatcacgtttcatgaaccatagttgtgctcctaacgtattttggcagccagttcagtttgaccatgaagatgatcatcgcccacatatcatgttctttgctttgaagcatattcctcccatgacagagttgacttatgactatggtgacgttggagctgatcctagtggtgtacggtctcctagagcaaagaactgcctttgtgaatcctcaaattgtcggggattctttatctgaccgtggaaaatgcatattctatctatcaacattcaaccctaccagctagattctcggctttgtcgacaactcgacatcgaattgtttctgattcaacagctaatgtcgcaagacagcatcaatttcgtcatccaaaattatcactccatatcctttttggtggcacctgaagaaaaagtaggactgttcgaacagcttgcatcactctgtcgttgtggaaccattatattaattaatgtcaatcttttagatgaccattcagcaactaatgcacaaacgtttcttttgtgggggaagaatgttggtcttggaagttcaattttgtgtagtttgtagacttgtagagcatttagtgctgctaaacttgtgcaccttaagtcttttggctgtaaaagagcctcgaggctccagctgaattggttaggcagtctaagtagcatttctttgatcctgaatttgactccacgtgagtcaatttcaagctggagttaaaaaaaacattcttatgttctatactaaagtacagttctaaggctcaaccatgatcatagtcgttctcacatgtgctatattgctgttgtgtatgggtgtggtacgtgaaacttgatatattggtaaagtttttttatactaattaaaaacttgagaaaatacagactacccaagtgtagagctgttggatcctcgcattttatccat

SEQ ID NO: 210792 - DNA, 2822 bp, Zea Mays
cggacaagagaagaaatcaagaaaacccccctacctcgccccaaaaatgccaaaccacaacaagtcgcttccgtccctccccacgccgccgagggccgccgaccaggagatcacgcgctcatctctcatggagtccgtctagcttccgctcgtctgcgcccactccaagcagccgcagcggaactcaactactgcaggttgagatgaacggtccatcgaatttcatgcctactcctgaacaggatgttctggacgtcaagcccttgaggacattggctccaatgttccctgctcctctgggtgtcaatacatttaaccactcaaccacgccaccattgatatttgtcactccttctggacaatttcaagggggttttggtgattggaataattctgctgccaaatcatttttcgctttcagcagcaaggatgctcgtggaggcaaggctgatacatttagtgatcagaatactggtactggcaaggctgccacttttggtgatcaggatgcttttggcagccagaatgtttttgctagtgatcacagtactggtactggcaaggctgccacttttggtgatcaggatgcttttggcagccagaatgtcgccactggtgtgcaggatgctgcgaaaggccagactgcaacagattggacagatgtgagtgccaatcctaatggcccaattgatgccattgccatttcagcttacaggtcaacacagcctaatgttatatcactggatgatgatgatgacgacgacgatgatgagccttatgctgctaacaagacatcagcatctggacgcaagatcaagaggccatcccacctcagcggatacaatgtgagtgatgctttggtaagtgacagctccaacagcatgaaggttaagcgccccaaatcctctcacgggaaagctgctgctgacaacgagcatgccttgcttccaccttctgaggatcccagggaaattgtggaggcagttctcatgacctttgaggcgttgcggcgtaggcatctccaattggatgaggcacaagagactagcaagcgtgcagatctgaaggctagtgctatcttgatgtccagtaatatcagggctaaccctgggaagaggataggggttgttcctggagttgaaataggggacattttctacttcaggatggagctatgtattattgggctgcatgctcctagcatggccggaattgactatatgactgccaagtttggtgacgaggatgattctgttgcaatatgtattgttgctgcaggtggttatgacaataatgatgatgatacagatgtactggtttacagtggttcaggaggtaatagcaagaacagtgaggagaagcatgaccagaagcttgagaggggcaacctggctcttgagaggagcttgtccagaaaaaatgtaatccgtgtggttcggggctataaggatccaggttgcttgactgggaaggtttatatttatgatggcctctataggattcacgagtcatggaaggagaaaacgaagagtggaatattttgttttaagtacaagctgctgcgagagccaggacaacctgatggggttgcaatctggaagatgtcccagaaatgggtacaaaatccactgactagaggcagtgttttaaatcctgatctatcatctggtgcagaaaatcttccagtgtgtcttgttaatgacattgacagtgatgaagtgccacaccatttcacatataccactcaggtcgaacacttgaaaccactcagttctgtgaagcctttacagggttgcagatgccttagtgtttgtctgcctggtgatgccaactgctgctgtgcacagcgtaatggaggcagcttaccttacagctcatcaggactgcttgtatgccgcaagactatggtttatgaatgtggtgaatcctgtcggtgttctttcaattgtcgtaacagagtgacccagaaaggagttaggatccactttgaggtctttaagacgggaaatcgaggctggggtcttcgttcgtgggacgctatacgggctggttcatttatatgcgagtatgttggtgaggttattgatgatgctaacattaatctgaatgatattgaagatgattatatatttcagatgtcgtgtcctggtgagaggacattaaaatggaattttggacctgaattgataggggagcaaagcacaaatgtttctgctgatacctttgagactctacccattaagataagtgctaaaagaataggaaacatatcacgtttcatgaaccatagttgtgctcctaacgtattttggcagccagttcagtttgaccatgaagatgatcatcgcccacatatcatgttctttgctttgaagcatattcctcccatgacagagttgacttatgactatggtgacgttggagctgatcctagtggtgtacggtctcctagagcaaagaactgcctttgtgaatcctcaaattgtcggggattctttatctgaccgtggaaaatgcatattctatctatcaacattcaaccctaccagctaggtaaaaacttctagttttttttccagttctgagtttcagccatgcttctagttacggatgaagttcctgggttttcttgtttcgtctaaggggttgagttttcataggcaaccagtttgtgttgatactattcctgtaatcctgtttactgttgatgttttttaatgtgaaaccatgctgcttgttgattttggtttatctgtcgatgtgtcttccatcctgcacaagtttcatatccatgcactgtgtctcatgatgttggccagaac

SEQ ID NO: 210793 - DNA, 3257 bp, Zea Mays
gtataatctataagccctgtattatatataattcggaaggaagggccttcttccccttccctctcacccactcgtggactcggtcctcgctcttcacctgcccgcgcctcggtaggcgctagtcgccttcctccctggaaggaaaaacaaacaaacacgaaacgcaggtccgaatccaaatctagcggcacgcttaacgtcgcgatcccgcggactccacccacgcccgcggcggcagcgcggatcccgcctagggctcgcgtgtcggtcgctccggcgctaactagtaactaccccctcgcggcgacgggaggtcggtagcggcgatcgcgctagcggagccgcttcttcgccctcgacgccgccggcctcgatcaggccccgccgacggaatggcatccaaagtccgctttacagtgggttctcaagtttgggttgaggatgctgaggtggcttggattgatgggttggtggaggaggtacaaggagatgaattaattataaactgcacttctgggaagaaggttactgcaaatgtctcaagtgtgtatcctaaggatgcagaagcgaagcgctgtggcgttgaggatatgacgaggctagcttatcttaatgaaccaggagttttacagaacttaaagtctagatatggaatgaatgaaatatatacttatactggcaacattttaatagctgttaatccatttcaaagacttccccacctttataacaatcacatgatgggaatctataaaggcgcagaatttggcgagctgagcccccatcctttcgctattgcagatcatgcatataggcttatgatgaattgtggaaaaagtcaagccatattagtgagtggcgaaagtggagctggtaagacagaaagcactaaaagccttatgcagtatcttgcatttatgggtggtaaagctcaatctgggggaaggtcagtgcaacaacaagtactggagtcaaatcctgttcttgaggcatttggaaatgcaaaaacagtcaggaataataattcaagtcgttttggaaaatttgttgagattcagtttgacaagaatgggaagatctcaggagctgccataaggacttacctcttagaaaggtctcgtgtctgccaaatatctgatccagaaaggaactatcactgcttttacatgctatgtaatgcaccagctgaggaccgtgagagatataaactgggagatgccgcatcatttcactatcttaaccagtctagttgtattaagcttgatgcgatggatgatgcttcagaatatatcataactaggagggcaatggacattgtgggcatcagttctgatgaacaggatgcaatatttagagttgttgctgctattcttcatttgggcaatgtggaattttcagaagggagtgaagcagattcttctgtacccaaagatgacaagtcccagttccatcttaggacagctgcggagcttttcatgtgtgatgagaaggctcttgaggaatctttgtgtaagcgtgttatggtaacacgtggtgaaagtattgttaaaaatttagatgcacgagcagcagctctcagtagagatgcactagccagaattgtttactctcgtttgtttgattggcttgtaactaagataaatacttcaataggacaagatctaagctcgaagcttttgattggtgtactggatatatatggttttgagagtttcaagacaaacagtttcgagcagttttgcatcaacttaactaacgagaagctgcagcaacactttaatcagcatgtgtttaagatggaacaagaagaatatacaaaggaagaaattgattggagttatatccagtttgtagacaaccaagagattcttgatcttattgagaagaaacctgggggtataattgctctactggatgaaacttgcatgctgcgaaattcaacccatgaaatatttgctgaaaagctgtatcaaaaatttaaggggaacttgcacttcagtaggccaaagttctcacggtctgatttcactattcatcactacgctggaaatgttacgtaccaaacagatctgttcttggataagaacattgattatgctgtgaatgagcatcaagttttgttacatgcttcgagatgttcgttcgtttccagtctttttccacatgaagtatcagctaaatctacgaaatttacatcaataggttcaagctttaagcaacaattacaagctttgctggaaactttgagcgcaacagagccacattacatccgctgcataaagcccaataatgttctcaagccagcgattttcgagaacagtaatgttctccagcagcttcgatgtgggggagtattagaggcaataagaataagctgccttggatatccaacaaggaggagatttgatgaatttgttgaccgttttggtgttttactacctgaagttcttggtgaaagttatgatgaagttactgctacaaacatgcttcttgacaaagtcaatctcacaggatatcagatagggaaaactaaagtgtttctgcgtgctggtcaaatggctgaattagatgctatgagaactgaggtcttgggatgttctgctagtaaaatccagagaaaagtacggtcatacttagctcgaaaaaaattcattcagttgcgaatatctgctactcatctccaggctatttgcagagggcaaattgcaaggcattattacgatgatctccgcagggaggctgcttcattgaccatacaaacctgctaccgtatgtactttgcaaggaagaactacataaatctctgtactgcatcaactactatccaatctggtctacgtggtatggctgctcgcaagaaactccagttccgtcaacatacaaaagctgcggtgaccattcagagtttctggcgtagttatgtagcacgctctcgattcatgagtttgaagaaggcagccattgctactcaatgtgcttggagaggaagagtggccagaaaagagcttcgaaaacttaaaatggctgctaaagaaactggtgctctccaagctgctaagaataaattagagaaacaagttgaggagctcacgtggcggctgcaactagagaaacgcatgagggagtacaatatgttgatctctaccgatgaccaggaggtgatctgggagatcaggtacataagccaaccagagaatcacgtaaacagggaaataaggtaaccaatcaatcacctaaacaggaaaagggtgcctaag

SEQ ID NO: 210794 - DNA, 3259 bp, Zea Mays
ataagccctgtattatatataattcggaaggaagggccttcttccccttccctctcacccactcgtggactcggtcctcgctcttcacctgcccgcgcctcggtaggcgctagtcgccttcctccctggaaggaaaaacaaacaaacacgaaacgcaggtccgaatccaaatctagcggcacgcttaacgtcgcgatcccgcggactccacccacgcccgcggcggcagcgcggatcccgcctagggctcgcgtgtcggtcgctccggcgctaactagtaactaccccctcgcggcgacgggaggtcggtagcggcgatcgcgctagcggagccgcttcttcgccctcgacgccgccggcctcgatcaggccccgccgacggaatggcatccaaagtccgctttacagtgggttctcaagtttgggttgaggatgctgaggtggcttggattgatgggttggtggaggaggtacaaggagatgaattaattataaactgcacttctgggaagaaggttactgcaaatgtctcaagtgtgtatcctaaggatgcagaagcgaagcgctgtggcgttgaggatatgacgaggctagcttatcttaatgaaccaggagttttacagaacttaaagtctagatatggaatgaatgaaatatatacttatactggcaacattttaatagctgttaatccatttcaaagacttccccacctttataacaatcacatgatgggaatctataaaggcgcagaatttggcgagctgagcccccatcctttcgctattgcagatcatgcatataggcttatgatgaattgtggaaaaagtcaagccatattagtgagtggcgaaagtggagctggtaagacagaaagcactaaaagccttatgcagtatcttgcatttatgggtggtaaagctcaatctgggggaaggtcagtgcaacaacaagtactggagtcaaatcctgttcttgaggcatttggaaatgcaaaaacagtcaggaataataattcaagtcgttttggaaaatttgttgagattcagtttgacaagaatgggaagatctcaggagctgccataaggacttacctcttagaaaggtctcgtgtctgccaaatatctgatccagaaaggaactatcactgcttttacatgctatgtaatgcaccagctgaggaccgtgagagatataaactgggagatgccgcatcatttcactatcttaaccagtctagttgtattaagcttgatgcgatggatgatgcttcagaatatatcataactaggagggcaatggacattgtgggcatcagttctgatgaacaggatgcaatatttagagttgttgctgctattcttcatttgggcaatgtggaattttcagaagggagtgaagcagattcttctgtacccaaagatgacaagtcccagttccatcttaggacagctgcggagcttttcatgtgtgatgagaaggctcttgaggaatctttgtgtaagcgtgttatggtaacacgtggtgaaagtattgttaaaaatttagatgcacgagcagcagctctcagtagagatgcactagccagaattgtttactctcgtttgtttgattggcttgtaactaagataaatacttcaataggacaagatctaagctcgaagcttttgattggtgtactggatatatatggttttgagagtttcaagacaaacaggtgcttaactgtttcgagcagttttgcatcaacttaactaacgagaagctgcagcaacactttaatcagcatgtgtttaagatggaacaagaagaatatacaaaggaagaaattgattggagttatatccagtttgtagacaaccaagagattcttgatcttattgagaagaaacctgggggtataattgctctactggatgaaacttgcatgctgcgaaattcaacccatgaaatatttgctgaaaagctgtatcaaaaatttaaggggaacttgcacttcagtaggccaaagttctcacggtctgatttcactattcatcactacgctggaaatgttacgtaccaaacagatctgttcttggataagaacattgattatgctgtgaatgagcatcaagttttgttacatgcttcgagatgttcgttcgtttccagtctttttccacatgaagtatcagctaaatctacgaaatttacatcaataggttcaagctttaagcaacaattacaagctttgctggaaactttgagcgcaacagagccacattacatccgctgcataaagcccaataatgttctcaagccagcgattttcgagaacagtaatgttctccagcagcttcgatgtgggggagtattagaggcaataagaataagctgccttggatatccaacaaggaggagatttgatgaatttgttgaccgttttggtgttttactacctgaagttcttggtgaaagttatgatgaagttactgctacaaacatgcttcttgacaaagtcaatctcacaggatatcagatagggaaaactaaagtgtttctgcgtgctggtcaaatggctgaattagatgctatgagaactgaggtcttgggatgttctgctagtaaaatccagagaaaagtacggtcatacttagctcgaaaaaaattcattcagttgcgaatatctgctactcatctccaggctatttgcagagggcaaattgcaaggcattattacgatgatctccgcagggaggctgcttcattgaccatacaaacctgctaccgtatgtactttgcaaggaagaactacataaatctctgtactgcatcaactactatccaatctggtctacgtggtatggctgctcgcaagaaactccagttccgtcaacatacaaaagctgcggtgaccattcagagtttctggcgtagttatgtagcacgctctcgattcatgagtttgaagaaggcagccattgctactcaatgtgcttggagaggaagagtggccagaaaagagcttcgaaaacttaaaatggctgctaaagaaactggtgctctccaagctgctaagaataaattagagaaacaagttgaggagctcacgtggcggctgcaactagagaaacgcatgagggagtacaatatgttgatctctaccgatgaccaggaggtgatctgggagatcaggtacataagccaaccagagaatcacgtaaacagggaaataaggtaaccaatcaatcacctaaacaggaaaagggtgcctaag

SEQ ID NO: 210795 - DNA, 2333 bp, Zea Mays
ccactcgtggactcggtcctcgctcttcacctgcccgcgcctcggtaggcgctagtcgccttcctccctggaaggaaaaacaaacaaacacgaaacgcaggtccgaatccaaatctagcggcacgcttaacgtcgcgatcccgcggactccacccacgcccgcggcggcagcgcggatcccgcctagggctcgcgtgtcggtcgctccggcgctaactagtaactaccccctcgcggcgacgggaggtcggtagcggcgatcgcgctagcggagccgcttcttcgccctcgacgccgccggcctcgatcaggccccgccgacggaatggcatccaaagtccgctttacagtgggttctcaagtttgggttgaggatgctgaggtggcttggattgatgggttggtggaggaggtacaaggagatgaattaattataaactgcacttctgggaagaaggttactgcaaatgtctcaagtgtgtatcctaaggatgcagaagcgaagcgctgtggcgttgaggatatgacgaggctagcttatcttaatgaaccaggagttttacagaacttaaagtctagatatggaatgaatgaaatatatacttatactggcaacattttaatagctgttaatccatttcaaagacttccccacctttataacaatcacatgatgggaatctataaaggcgcagaatttggcgagctgagcccccatcctttcgctattgcagatcatgcatataggcttatgatgaattgtggaaaaagtcaagccatattagtgagtggcgaaagtggagctggtaagacagaaagcactaaaagccttatgcagtatcttgcatttatgggtggtaaagctcaatctgggggaaggtcagtgcaacaacaagtactggagtcaaatcctgttcttgaggcatttggaaatgcaaaaacagtcaggaataataattcaagtcgttttggaaaatttgttgagattcagtttgacaagaatgggaagatctcaggagctgccataaggacttacctcttagaaaggtctcgtgtctgccaaatatctgatccagaaaggaactatcactgcttttacatgctatgtaatgcaccagctgaggaccgtgagagatataaactgggagatgccgcatcatttcactatcttaaccagtctagttgtattaagcttgatgcgatggatgatgcttcagaatatatcataactaggagggcaatggacattgtgggcatcagttctgatgaacaggatgcaatatttagagttgttgctgctattcttcatttgggcaatgtggaattttcagaagggagtgaagcagattcttctgtacccaaagatgacaagtcccagttccatcttaggacagctgcggagcttttcatgtgtgatgagaaggctcttgaggaatctttgtgtaagcgtgttatggtaacacgtggtgaaagtattgttaaaaatttagatgcacgagcagcagctctcagtagagatgcactagccagaattgtttactctcgtttgtttgattggcttgtaactaagataaatacttcaataggacaagatctaagctcgaagcttttgattggtgtactggatatatatggttttgagagtttcaagacaaacagtttcgagcagttttgcatcaacttaactaacgagaagctgcagcaacactttaatcagcatgtgtttaagatggaacaagaagaatatacaaaggaagaaattgattggagttatatccagtttgtagacaaccaagagattcttgatcttattgagaagaaacctgggggtataattgctctactggatgaaacttgcatgctgcgaaattcaacccatgaaatatttgctgaaaagctgtatcaaaaatttaaggggaacttgcacttcagtaggccaaagttctcacggtctgatttcactattcatcactacgctggaaatgttacgtaccaaacagatctgttcttggataagaacattgattatgctgtgaatgagcatcaagttttgttacatgcttcgagatgttcgttcgtttccagtctttttccacatgaagtatcagctaaatctacgaaatttacatcaataggttcaagctttaagcaacaattacaagctttgctggaaactttgagcgcaacagagccacattacatccgctgcataaagcccaataatgttctcaagccagcgattttcgagaacagtaatgttctccagcagcttcgatgtggggtaatactataaaaatgcattccatgatgaatctaaggacacttatgtcaac

SEQ ID NO: 210796 - DNA, 2475 bp, Zea Mays
ccactcgtggactcggtcctcgctcttcacctgcccgcgcctcggtaggcgctagtcgccttcctccctggaaggaaaaacaaacaaacacgaaacgcaggtccgaatccaaatctagcggcacgcttaacgtcgcgatcccgcggactccacccacgcccgcggcggcagcgcggatcccgcctagggctcgcgtgtcggtcgctccggcgctaactagtaactaccccctcgcggcgacgggaggtcggtagcggcgatcgcgctagcggagccgcttcttcgccctcgacgccgccggcctcgatcaggccccgccgacggaatggcatccaaagtccgctttacagtgggttctcaagtttgggttgaggatgctgaggtggcttggattgatgggttggtggaggaggtacaaggagatgaattaattataaactgcacttctgggaagaaggttactgcaaatgtctcaagtgtgtatcctaaggatgcagaagcgaagcgctgtggcgttgaggatatgacgaggctagcttatcttaatgaaccaggagttttacagaacttaaagtctagatatggaatgaatgaaatatatacttatactggcaacattttaatagctgttaatccatttcaaagacttccccacctttataacaatcacatgatgggaatctataaaggcgcagaatttggcgagctgagcccccatcctttcgctattgcagatcatgcatataggcttatgatgaattgtggaaaaagtcaagccatattagtgagtggcgaaagtggagctggtaagacagaaagcactaaaagccttatgcagtatcttgcatttatgggtggtaaagctcaatctgggggaaggtcagtgcaacaacaagtactggagtcaaatcctgttcttgaggcatttggaaatgcaaaaacagtcaggaataataattcaagtcgttttggaaaatttgttgagattcagtttgacaagaatgggaagatctcaggagctgccataaggacttacctcttagaaaggtctcgtgtctgccaaatatctgatccagaaaggaactatcactgcttttacatgctatgtaatgcaccagctgaggaccgtgagagatataaactgggagatgccgcatcatttcactatcttaaccagtctagttgtattaagcttgatgcgatggatgatgcttcagaatatatcataactaggagggcaatggacattgtgggcatcagttctgatgaacaggatgcaatatttagagttgttgctgctattcttcatttgggcaatgtggaattttcagaagggagtgaagcagattcttctgtacccaaagatgacaagtcccagttccatcttaggacagctgcggagcttttcatgtgtgatgagaaggctcttgaggaatctttgtgtaagcgtgttatggtaacacgtggtgaaagtattgttaaaaatttagatgcacgagcagcagctctcagtagagatgcactagccagaattgtttactctcgtttgtttgattggcttgtaactaagataaatacttcaataggacaagatctaagctcgaagcttttgattggtgtactggatatatatggttttgagagtttcaagacaaacagtttcgagcagttttgcatcaacttaactaacgagaagctgcagcaacactttaatcagcatgtgtttaagatggaacaagaagaatatacaaaggaagaaattgattggagttatatccagtttgtagacaaccaagagattcttgatcttattgagaagaaacctgggggtataattgctctactggatgaaacttgcatgctgcgaaattcaacccatgaaatatttgctgaaaagctgtatcaaaaatttaaggggaacttgcacttcagtaggccaaagttctcacggtctgatttcactattcatcactacgctggaaatgttacgtaccaaacagatctgttcttggataagaacattgattatgctgtgaatgagcatcaagttttgttacatgcttcgagatgttcgttcgtttccagtctttttccacatgaagtatcagctaaatctacgaaatttacatcaataggttcaagctttaagcaacaattacaagctttgctggaaactttgagcgcaacagagccacattacatccgctgcataaagcccaataatgttctcaagccagcgattttcgagaacagtaatgttctccagcagcttcgatgtgggggagtattagaggcaataagaataagctgccttggatatccaacaaggaggagatttgatgaatttgttgaccgttttggtgttttactacctgaagttcttggtgaaagttatgatgaagttactgctacaaacatgcttcttgacaaagtcaatctcacaggatatcagtattatctctgattttgaagggg

SEQ ID NO: 210797 - DNA, 3187 bp, Zea Mays
cctcgctcttcacctgcccgcgcctcggtaggcgctagtcgccttcctccctggaaggaaaaacaaacaaacacgaaacgcaggtccgaatccaaatctagcggcacgcttaacgtcgcgatcccgcggactccacccacgcccgcggcggcagcgcggatcccgcctagggctcgcgtgtcggtcgctccggcgctaactagtaactaccccctcgcggcgacgggaggtcggtagcggcgatcgcgctagcggagccgcttcttcgccctcgacgccgccggcctcgatcaggccccgccgacggaatggcatccaaagtccgctttacagtgggttctcaagtttgggttgaggatgctgaggtggcttggattgatgggttggtggaggaggtacaaggagatgaattaattataaactgcacttctgggaagaaggttactgcaaatgtctcaagtgtgtatcctaaggatgcagaagcgaagcgctgtggcgttgaggatatgacgaggctagcttatcttaatgaaccaggagttttacagaacttaaagtctagatatggaatgaatgaaatatatacttatactggcaacattttaatagctgttaatccatttcaaagacttccccacctttataacaatcacatgatgggaatctataaaggcgcagaatttggcgagctgagcccccatcctttcgctattgcagatcatgcatataggcttatgatgaattgtggaaaaagtcaagccatattagtgagtggcgaaagtggagctggtaagacagaaagcactaaaagccttatgcagtatcttgcatttatgggtggtaaagctcaatctgggggaaggtcagtgcaacaacaagtactggagtcaaatcctgttcttgaggcatttggaaatgcaaaaacagtcaggaataataattcaagtcgttttggaaaatttgttgagattcagtttgacaagaatgggaagatctcaggagctgccataaggacttacctcttagaaaggtctcgtgtctgccaaatatctgatccagaaaggaactatcactgcttttacatgctatgtaatgcaccagctgaggaccgtgagagatataaactgggagatgccgcatcatttcactatcttaaccagtctagttgtattaagcttgatgcgatggatgatgcttcagaatatatcataactaggagggcaatggacattgtgggcatcagttctgatgaacaggatgcaatatttagagttgttgctgctattcttcatttgggcaatgtggaattttcagaagggagtgaagcagattcttctgtacccaaagatgacaagtcccagttccatcttaggacagctgcggagcttttcatgtgtgatgagaaggctcttgaggaatctttgtgtaagcgtgttatggtaacacgtggtgaaagtattgttaaaaatttagatgcacgagcagcagctctcagtagagatgcactagccagaattgtttactctcgtttgtttgattggcttgtaactaagataaatacttcaataggacaagatctaagctcgaagcttttgattggtgtactggatatatatggttttgagagtttcaagacaaacagtttcgagcagttttgcatcaacttaactaacgagaagctgcagcaacactttaatcagcatgtgtttaagatggaacaagaagaatatacaaaggaagaaattgattggagttatatccagtttgtagacaaccaagagattcttgatcttattgagaaggtgaacaacataagaaacctgggggtataattgctctactggatgaaacttgcatgctgcgaaattcaacccatgaaatatttgctgaaaagctgtatcaaaaatttaaggggaacttgcacttcagtaggccaaagttctcacggtctgatttcactattcatcactacgctggaaatgttacgtaccaaacagatctgttcttggataagaacattgattatgctgtgaatgagcatcaagttttgttacatgcttcgagatgttcgttcgtttccagtctttttccacatgaagtatcagctaaatctacgaaatttacatcaataggttcaagctttaagcaacaattacaagctttgctggaaactttgagcgcaacagagccacattacatccgctgcataaagcccaataatgttctcaagccagcgattttcgagaacagtaatgttctccagcagcttcgatgtgggggagtattagaggcaataagaataagctgccttggatatccaacaaggaggagatttgatgaatttgttgaccgttttggtgttttactacctgaagttcttggtgaaagttatgatgaagttactgctacaaacatgcttcttgacaaagtcaatctcacaggatatcagatagggaaaactaaagtgtttctgcgtgctggtcaaatggctgaattagatgctatgagaactgaggtcttgggatgttctgctagtaaaatccagagaaaagtacggtcatacttagctcgaaaaaaattcattcagttgcgaatatctgctactcatctccaggctatttgcagagggcaaattgcaaggcattattacgatgatctccgcagggaggctgcttcattgaccatacaaacctgctaccgtatgtactttgcaaggaagaactacataaatctctgtactgcatcaactactatccaatctggtctacgtggtatggctgctcgcaagaaactccagttccgtcaacatacaaaagctgcggtgaccattcagagtttctggcgtagttatgtagcacgctctcgattcatgagtttgaagaaggcagccattgctactcaatgtgcttggagaggaagagtggccagaaaagagcttcgaaaacttaaaatggctgctaaagaaactggtgctctccaagctgctaagaataaattagagaaacaagttgaggagctcacgtggcggctgcaactagagaaacgcatgagggagtacaatatgttgatctctaccgatgaccaggaggtgatctgggagatcaggtacataagccaaccagagaatcacgtaaacagggaaataaggtaaccaatcaatcacctaaacaggaaaagggtgcctaag

SEQ ID NO: 210798 - DNA, 3135 bp, Zea Mays
cctcgctcttcacctgcccgcgcctcggtaggcgctagtcgccttcctccctggaaggaaaaacaaacaaacacgaaacgcaggtccgaatccaaatctagcggcacgcttaacgtcgcgatcccgcggactccacccacgcccgcggcggcagcgcggatcccgcctagggctcgcgtgtcggtcgctccggcgctaactagtaactaccccctcgcggcgacgggaggtcggtagcggcgatcgcgctagcggagccgcttcttcgccctcgacgccgccggcctcgatcaggccccgccgacggaatggcatccaaagtccgctttacagtgggttctcaagtttgggttgaggatgctgaggtggcttggattgatgggttggtggaggaggtacaaggagatgaattaattataaactgcacttctgggaagaaggttactgcaaatgtctcaagtgtgtatcctaaggatgcagaagcgaagcgctgtggcgttgaggatatgacgaggctagcttatcttaatgaaccaggagttttacagaacttaaagtctagatatggaatgaatgaaatatatacttatactggcaacattttaatagctgttaatccatttcaaagacttccccacctttataacaatcacatgatgggaatctataaaggcgcagaatttggcgagctgagcccccatcctttcgctattgcagatcatgcatataggcttatgatgaattgtggaaaaagtcaagccatattagtgagtggcgaaagtggagctggtaagacagaaagcactaaaagccttatgcagtatcttgcatttatgggtggtaaagctcaatctgggggaaggtcagtgcaacaacaagtactggagtcaaatcctgttcttgaggcatttggaaatgcaaaaacagtcaggaataataattcaagtcgttttggaaaatttgttgagattcagtttgacaagaatgggaagatctcaggagctgccataaggacttacctcttagaaaggtctcgtgtctgccaaatatctgatccagaaaggaactatcactgcttttacatgctatgtaatgcaccagctgaggaccgtgagagatataaactgggagatgccgcatcatttcactatcttaaccagtctagttgtattaagcttgatgcgatggatgatgcttcagaatatatcataactaggagggcaatggacattgtgggcatcagttctgatgaacaggatgcaatatttagagttgttgctgctattcttcatttgggcaatgtggaattttcagaagggagtgaagcagattcttctgtacccaaagatgacaagtcccagttccatcttaggacagctgcggagcttttcatgtgtgatgagaaggctcttgaggaatctttgtgtaagcgtgttatggtaacacgtggtgaaagtattgttaaaaatttagatgcacgagcagcagctctcagtagagatgcactagccagaattgtttactctcgtttgtttgattggcttgtaactaagataaatacttcaataggacaagatctaagctcgaagcttttgattggtgtactggatatatatggttttgagagtttcaagacaaacaggtgcttaactgtttcgagcagttttgcatcaacttaactaacgagaagctgcagcaacactttaatcagcatgtgtttaagatggaacaagaagaatatacaaaggaagaaattgattggagttatatccagtttgtagacaaccaagagattcttgatcttattgagaagaaacctgggggtataattgctctactggatgaaacttgcatgctgcgaaattcaacccatgaaatatttgctgaaaagctgtatcaaaaatttaaggggaacttgcacttcagtaggccaaagttctcacggtctgatttcactattcatcactacgctggaaatgttacgtaccaaacagatctgttcttggataagaacattgattatgctgtgaatgagcatcaagttttgttacatgcttcgagatgttcgttcgtttccagtctttttccacatgaagtatcagctaaatctacgaaatttacatcaataggttcaagctttaagcaacaattacaagctttgctggaaactttgagcgcaacagagccacattacatccgctgcataaagcccaataatgttctcaagccagcgattttcgagaacagtaatgttctccagcagcttcgatgtgggggagtattagaggcaataagaataagctgccttggatatccaacaaggaggagatttgatgaatttgttgaccgttttggtgttttactacctgaagttcttggtgaaagttatgatgaagttactgctacaaacatgcttcttgacaaagtcaatctcacaggatatcagatgctatgagaactgaggtcttgggatgttctgctagtaaaatccagagaaaagtacggtcatacttagctcgaaaaaaattcattcagttgcgaatatctgctactcatctccaggctatttgcagagggcaaattgcaaggcattattacgatgatctccgcagggaggctgcttcattgaccatacaaacctgctaccgtatgtactttgcaaggaagaactacataaatctctgtactgcatcaactactatccaatctggtctacgtggtatggctgctcgcaagaaactccagttccgtcaacatacaaaagctgcggtgaccattcagagtttctggcgtagttatgtagcacgctctcgattcatgagtttgaagaaggcagccattgctactcaatgtgcttggagaggaagagtggccagaaaagagcttcgaaaacttaaaatggctgctaaagaaactggtgctctccaagctgctaagaataaattagagaaacaagttgaggagctcacgtggcggctgcaactagagaaacgcatgagggagtacaatatgttgatctctaccgatgaccaggaggtgatctgggagatcaggtacataagccaaccagagaatcacgtaaacagggaaataaggtaaccaatcaatcacctaaacaggaaaagggtgcctaag

SEQ ID NO: 210799 - DNA, 2053 bp, Zea Mays
aaacaaacaaacacgaaacgcaggtccgaatccaaatctagcggcacgcttaacgtcgcgatcccgcggactccacccacgcccgcggcggcagcgcggatcccgcctagggctcgcgtgtcggtcgctccggcgctaactagtaactaccccctcgcggcgacgggaggtcggtagcggcgatcgcgctagcggagccgcttcttcgccctcgacgccgccggcctcgatcaggccccgccgacggaatggcatccaaagtccgctttacagtgggttctcaagtttgggttgaggatgctgaggtggcttggattgatgggttggtggaggaggtacaaggagatgaattaattataaactgcacttctgggaagaaggttactgcaaatgtctcaagtgtgtatcctaaggatgcagaagcgaagcgctgtggcgttgaggatatgacgaggctagcttatcttaatgaaccaggagttttacagaacttaaagtctagatatggaatgaatgaaatatatacttatactggcaacattttaatagctgttaatccatttcaaagacttccccacctttataacaatcacatgatgggaatctataaaggcgcagaatttggcgagctgagcccccatcctttcgctattgcagatcatgcatataggcttatgatgaattgtggaaaaagtcaagccatattagtgagtggcgaaagtggagctggtaagacagaaagcactaaaagccttatgcagtatcttgcatttatgggtggtaaagctcaatctgggggaaggtcagtgcaacaacaagtactggagtcaaatcctgttcttgaggcatttggaaatgcaaaaacagtcaggaataataattcaagtcgttttggaaaatttgttgagattcagtttgacaagaatgggaagatctcaggagctgccataaggacttacctcttagaaaggtctcgtgtctgccaaatatctgatccagaaaggaactatcactgcttttacatgctatgtaatgcaccagctgaggaccgtgagagatataaactgggagatgccgcatcatttcactatcttaaccagtctagttgtattaagcttgatgcgatggatgatgcttcagaatatatcataactaggagggcaatggacattgtgggcatcagttctgatgaacaggatgcaatatttagagttgttgctgctattcttcatttgggcaatgtggaattttcagaagggagtgaagcagattcttctgtacccaaagatgacaagtcccagttccatcttaggacagctgcggagcttttcatgtgtgatgagaaggctcttgaggaatctttgtgtaagcgtgttatggtaacacgtggtgaaagtattgttaaaaatttagatgcacgagcagcagctctcagtagagatgcactagccagaattgtttactctcgtttgtttgattggcttgtaactaagataaatacttcaataggacaagatctaagctcgaagcttttgattggtgtactggatatatatggttttgagagtttcaagacaaacaggtgcttaactgtttcgagcagttttgcatcaacttaactaacgagaagctgcagcaacactttaatcagcatgtgtttaagatggaacaagaagaatatacaaaggaagaaattgattggagttatatccagtttgtagacaaccaagagattcttgatcttattgagaagaaacctgggggtataattgctctactggatgaaacttgcatgctgcgaaattcaacccatgaaatatttgctgaaaagctgtatcaaaaatttaaggggaacttgcacttcagtaggccaaagttctcacggtctgatttcactattcatcactacgctggaaatgattgcagatcctaccgggggtgctacgaaggttgtatggatgagaggtgggaggacgggaacgactacgacacagagatccgtggctgatcgtgcgcagtgaagtgagggagaggagagagagagccgatggct

SEQ ID NO: 210800 - DNA, 1131 bp, Zea Mays
aatttccttagcatcttaaggctaaagatgaaaatggcagactagatgttgcatttttggcctcttcaattggacccagagttgcagcatcatgcgcacatgcagcattatcttttttgactagagacgaggattccagggtgagttcagaaggctcacatgctggtggtctgggcaatggtgcaaattcaaattttcagaaccataatggtgcttcaccatccatttctccaggaaatgttaaatatgctgccatgcttggtctgtcagcagcagcaatgaagtctaagctctttgccgatcaagaagaacgcgaagtgcaaagactaactgctactgtaataaatcatcagttgaagagattggagttgaagctgaagcagtttgcggaagttgagaccttgctcttgaaggaatgtgagcaagtagaaagggttagacacaggatttcagctgaacgcgtcaggatgaggtcagccctattaggtcccaccggaagcggtctaccagggggcagttgtagcactatgccatcaaatccagcaggcatgagccccagaccagtcggtgtgccaggctacatgccacagaccagcatgccagccacatatgccaacaacctgcaggggcatgggaatcctcagatgccgttcttacatcagcggcctcagatgctttcgttcggccctcgcctaccactctcagccatccagactcaaccatcaccacaatcatcaaacatgttcaactctggcatgcccaattcgattgctcctaaccaccatcagttgctgagatcatcctccggaaacaattctagtgcaggataggggaattgtccataagattttttttttctcagcttaggtttgtcaggtgtagcattatgtcatttataaacacatcactgtaattcatttatgtgatgtatgtgtttgtcatataagttttttattaggtcctataaattgtccccatattgctgcgcccttgtgtacctttgttaccaggtcacctcttcccagtgcagggagattcaaatgaacagaatatgttttcatatgtatcccttgagaactcttattgaatatatatgtatgtagttaattcaataagtttgaggttatgaag

SEQ ID NO: 210801 - DNA, 2860 bp, Zea Mays
cccgaacgcccacccctactcgcacgtgcttcccctccttccccatcgactcgttccgacaacgcccgcgtctagtctcgtctcgtctcaccattcgtcactcgcgcgcgccgtcgtccttctccgccgtcgtccccgccgccgacgatgcctcgtaaggcctcgtcgacctcaggtccatgcgtccgggcccttctcgaaacctcttaaactctctagcgccagatctaaccgccttgctaaccctaactcccagattcgcgcctcaaatggcgcaagcggaagctcaaccccgacgcgtccccgtcgaagccctccatttctaccgcggcggccgaccactcctccgactccgactccgccgccttaaacgacgacgaggacccctccgccctcggcgcgacgggggacggggcaaccgacaacgacgcggacgccgcggcgtccgaggaccccgcggtcgagctccgcgaggcggaggttctgccctcggccgatgccatctctagcttccctgccgccaagcgccgcgtggtcaaccggccgcatgcgtccatcctcgcgctgctcgaggccgaacgatctgcttgttccggcgatgtccctaccgtggcactgccggcgctagagaacatctcgcacgggcagctgcaggtgctgtctggggtgcttccggaccacccatcccttgcgacagaccccgacaagccgtccttgtatgtgtgcacgccgcctcccctcatggagggtcacggggtgcccaagcagttccagggtcgcttccatgtggtgcccaagcactcagattggttctccccagggacagttcataggctggaaaggcaggtagtgccacacttctttacagggaagtctccagggcatactccggagaagtatgtcatgttaaggaataaagttattgctaaatacttagagaacccaagcaagaggcttgcttttgctgagtgccaggggcttgttgggagcacatctgaattgtatgatctgagtaggattgttaggttcttggacacttggggcatcatcaattaccttgcggctgggtctgtgcaccgtggtctgaggatggcaacttcgcttctaagagaggaacctacaggggaactgcaattgcttacagcaccattgaaatcaatcgatggtctaattttgtttgaccggccaaaatgtagcctcccagtggaggacatttctaggatggcagcgacttcatcgaactcggaggctgtggattttgatgctgcattttcagacttggatggaaagattagggagcgtttgtctgagagctcttgcagttattgcttacagcctttgccaagtttacattaccggtcgcaaaaggaggcagatatttttctatgttctgattgcttccatgatgcgagatatatcactggacattcttgcttagatttccaaagagttgatggggataatgatgaatcagaaaatgatagtgataaatggactgatgaagaaacattgttgctgttggaaggcattgagaagtacaatgacaactgggatgacattgcaggtcatgttggaacaaaatcaaaggcacaatgtatctaccattttattcggttgccagtggaagattgtttgctagagaatgttgagatacccaatgcacccattccatttcgaccacaaagcaatggttatcaatgtttagattccaatggcagcacatcaggagctccagttcaaaatatccaacaaggcaatgagcttccgttcataaattcttctaatccggtcatgtcactggttgcatttttggcctcttcaattggacccagagttgcagcatcatgcgcacatgcagcattatcttttttgactagagacgaggattccagggtgagttcagaaggctcacatgctggtggtctgggcaatggtgcaaattcaaattttcagaaccataatggaaatgttaaatatgctgccatgcttggtctgtcagcagcagcaatgaagtctaagctctttgccgatcaagaagaacgcgaagtgcaaagactaactgctactgtaataaatcatcagttgaagagattggagttgaagctgaagcagtttgcggaagttgagaccttgctcttgaaggaatgtgagcaagtagaaagggttagacacaggatttcagctgaacgcgtcaggatgaggtcagccctattaggtcccaccggaagcggtctaccagggggcagttgtagcactatgccatcaaatccagcaggcatgagccccagaccagtcggtgtgccaggctacatgccacagaccagcatgccagccacatatgccaacaacctgcaggggcatgggaatcctcagatgccgttcttacatcagcggcctcagatgctttcgttcggccctcgcctaccactctcagccatccagactcaaccatcaccacaatcatcaaacatgttcaactctggcatgcccaattcgattgctcctaaccaccatcagttgctgagatcatcctccggaaacaattctagtgcaggataggggaattgtccataagattttttttttctcagcttaggtttgtcaggtgtagcattatgtcatttataaacacatcactgtaattcatttatgtgatgtatgtgtttgtcatataagttttttattaggtcctataaattgtccccatattgctgcgcccttgtgtacctttgttaccaggtcacctcttcccagtgcagggagattcaaatgaacagaatatgttttcatatgtatcccttgagaactcttattgaatatatatgtatgtagttaattcaataagtttgaggttatgaag

SEQ ID NO: 210802 - DNA, 722 bp, Zea Mays
atgacatatttgatagcgggccgcaggctaagccattccttctaactgcaactgctgctcctctttgtctcccccgttccgttctccactgaactcctcgccctcgtcgacccgtgacccgtgagcctcttccactgccgccgtcgacgagagctgcgttagccgctagggacaggtgatttcggctgcttccctcatggcgaccgcgctcaagtcgttcttgaacagccccgttggccccaagaccacccacttctggggccctgttgccaactggggcttcgtcgtcgcgggcttggttgacatgaacaagcctcctgaaatgatatctggcaacatgacagcaggtacctggagaagaaagagccagagacacaacagtaaagagggagaagttttattcctttatcttcgggttagttacttcatgtggatgacttgaagcttagaaggtttttatatatctcttatggaaaggcttcacccttccaattattgtaataagttatgcacttcgagtactatcaggacttgtaataaatacatctcattctaccatgtaaaacttgagttctggaatgtaaagtgtactttgtaaaagtcttccgctctatctccaatgtgtgtgtatcaaatgtgattactgtaatatacctgttatgtgggagatccttgggatgatgagttccagttggcgaactcgatagccttgttaagttacc

SEQ ID NO: 210803 - DNA, 1555 bp, Zea Mays
agggtttcggacaaccgtctctttccctctctagtctctactgcttctcggccgtcggcggctctccgagtccggtatccccgtctccccgtcggcgtcgtcggggttgggttcatcacaccgtcccgtttcctatgcacgccgtcacgcgcagaggcacgaagcgccggtcgtcgagcaacaaggctgttgggcccaggcacgcagccaacggaggggccactgccatacggcgtgcattccgccacccgtgaagccacatcgtggttacttcccccagccgccaatcaaacctaccagttccagccagagccagccttccccttcgccatggcggcctccgccgcagctcaacgtagatctgcaggaagtaggacgacgtacgagagggcagagctcgaggcgctcagggacgccccgtcgaaggaggctcacgcgcggctctgggccgacgtccgcgctacccttgtcgcctccgggttctccggtgagtatgacgggctgctcgttgccgaggaggacgtgaggagcaggaggggtaatagggggatgaaggctatgagcgtgaggaagtggcccgaagaggcggcggcggcggcccggtttttggagattggtgcacacagaaatggggatctggcggtttgtcacgaacaccgatttgtatctgctcatgaccatgctgggacgtctggagtggttgaagagtcgtttcatcaaggtgaagatgttgaatgtgaagatgacagtgatgatgactataacggaattctgaagcctgcatttgctgtggatggagatccagattttgagtctggtgagccacttgatggctttgagtaccttcggcgtgtcaggtgggaagctaaccaaattcctagagtcaaggtggccaagatatattcaagtgcagctagaaatgagcaaactccttatatgccagaaattccggatataccaaagtgcttacctgatttgcgtgcgtcaaaacaatgggaggacagatttatcgtcgactttgaggaaaccaggatggtgctctctgagcttgacaattctgatgaaccatctgtatctagtgggacaaaaatctcaacaaaacctggcagcgggacggagccacagactgacccgacgctgacaatgattcgcagcatggatgcagtgtcaagagctgcgacacttcggaactacatcgatatgattcagagcttggatgcactatcaaggaacaactgcatgtggctcttcgcactctgtgttgccgttcacactcccctggacgcggagacatgtgcctcactgaggtccttgctgcgcaagtgcgccagcatccttgccaccaagactgagatggacgatgaagtcgtaatgctgaatatactgatgacaatttcgggaaggtattttggacaggacgaaagctgaaaacagcaattgaaattggagatcaggataacaccattgcaatgctgaattctcaccgatagtttgatgtcagaatatattatatttattattatatatgtgaaagttatgtttcattttcttgtaa

SEQ ID NO: 210804 - DNA, 673 bp, Zea Mays
gtgcagtacaatcaagaacagcagtagcagtaggtgatggcgtacttcacgatctcggcggtggccgtggcgatggaggcggcgatgatcggcaagtacgggtcgcagcagttccagtggatgaagacgtgccacctctacaagcgtttctgcgcgcaggcgggtggcgccgtggcctgcgcggtggcggccagcctgaacatggtcggcgtctcgctcgtctcggcgttcaacctcttccggctgtacggcagcggcaaagggaggaagtgatctcggtcggcctgctgccactaggaacacagggccggcagcgccgcctgttctcttaggttttaacacccagtatggaaccatagcgccatggatggatggatggtctcttcttctccggtttgagtttttctggtgttgggtaggcatacctgtcgtctgtcagcgtagacataaaaaaaaaggtctctgggacgctcgcccatgtatgtatgtatatgatgtgaagtgatccaaggtggttcgcgtgctatggcaataaacgtgtgggaaagcgatgtatcgtcgatgactgtcgccgcctgcagggatggcaggggaatttactctctgggttattatacaatgcggtagctggctttgctgatgctgtgccaactgccatcatttactcctgact

SEQ ID NO: 210805 - DNA, 803 bp, Zea Mays
ctttattcgcaccatcggccggtggcgattcctggtgatagcaaacgggatggcagcgtgctacagcctgctgcagggcgggaggtgcctggtgagcatcctcacaggtggtggcgtactaatcaacaggcccatggcatgggccatcttctcctgcgatcaggtgatggcgtacttcacgatctcggcggtggccgtggcgatggaggcggcgatgatcggcaagtacgggtcgcagcagttccagtggatgaagacgtgccacctctacaagcgtttctgcgcgcaggcgggtggcgccgtggcctgcgcggtggcggccagcctgaacatggtcggcgtctcgctcgtctcggcgttcaacctcttccggctgtacggcagcggcaaagggaggaagtgatctcggtcggcctgctgccactaggaacacagggccggcagcgccgcctgttctcttaggttttaacacccagtatggaaccatagcgccatggatggatggatggtctcttcttctccggtttgagtttttctggtgttgggtaggcatacctgtcgtctgtcagcgtagacataaaaaaaaaggtctctgggacgctcgcccatgtatgtatgtatatgatgtgaagtgatccaaggtggttcgcgtgctatggcaataaacgtgtgggaaagcgatgtatcgtcgatgactgtcgccgcctgcagggatggcaggggaatttactctctgggttattatacaatgcggtagctggctttgctgatgctgtgccaactgccatcatttactcctgact

SEQ ID NO: 210806 - DNA, 919 bp, Zea Mays
atggcggagctcggcagtagacctcaccgtggactcaggagaccggcatccccaatcgtagcgagagggacgaccagcgggacacagtccaagcggcaaggcttccccatgcgtgatcctgcccgaggagatttcaaaggtcttggaaatccagccatcgccgtcgggtatcccacccccgagcctgcgcccccaccaaccccgcccccgagttcacccgccaccaagctcgtcgccggctttattggcaactacaatcaggtttacatcaggtttcgtagatataatgtacagctataacatgcttcatctttttttttctgtcttgtactctttatgcagtccaagatgagaatacatctcaatttcacatgggctatatataaggtcaaaattcataagcaaagtaagcaagtgatgtagaaaaaaatgcaaacaatatgctactgtaagtctttcctaattttaacttattagaagtcagtaagcattttttaacaattgtggttgacaacaaaataaagaatgagctttggacccttggaatttatgtccaaagtttcaatggtgatttactttatgagccatgtcatgtttatgatgagactgggcatgcatttacaacctttaacaaaaacagggagaaatgtatgaacctacctattgagatatcacaatatattgcacctacgaggttggtggcaacattaggttttttttgccataacatcatttctgttttcatgagcatctgtagatttttttatttcattgcacaacatagattttttttagttttggttcttcatataacgtctataatggctttagttgtttgctccgaagcactactcattagtattccatatacacaattttagtgattgctcctctactatttggatttaatgcttctata

SEQ ID NO: 210807 - DNA, 1135 bp, Zea Mays
ttttacttgaccagtatacagtgggcgaaataagttccatcgagggggtccacgctgcctccagatgctgcaaagaggttgatgagttcgttggaaggaacccggatccgttcctaacgattcagcaagagagaggaagccacgatcaatctcagcagtttctgaagaagttccgaggaaagagctgcctgagctactacctctcgtggatctgcggtggcgggtggtggtgcccgccgccgttgcagctcaagaggccaccggcgccgagctgctcctgcgcgccgcggctggggaagctctgctcctccaccgcctcctcctgctgcagctgttgctgctgccggttccgcgtcgtgtacgccgccgccggctgcgggtgctgcgcgccgtgcccgcgctgctcgtgcgactgcacctgcgcctgcccgcgctgctgctcctgcgcctgccccatgtgcagcgccgcgtgctgcgccccgcgctgctgcctgtgcctatgatggccatgagaaattttgcgtgcatgctagtagtagtagtacccggagatgatgatggatgactggcattttgcagcatggttttttttttggtttagtttcggcgacacgagtactgttgtaactggctgtacgtggctgatctggttagtgctggtgaatggtgtcgattccacattttccgctgagagttgccatgacatgcagccctactagtcttacgtacagcacaaaagatgcttagattccactcagtccttcggttattgcaatttaatgtggacgggagtgtattgaaatgtattgggatagattttgacttgctattaatttaaaccgacccaatatcactcaatccatatggattaacagtgcgaacaaaccctaatggcctgttcgtttatgccggatttcactaaaaatcgttccagctgatcaaaccttatgcggctgattggttggactgctgcccgtggcctgcctcaggcgagcatgccccgtgggaaacagaagtttctagcgtacccgcgcatgcagctttaagagatatttttttgctagcgttgcatctgccagtacaacttgatctcgttttatgcacttaaccaaacaaaggctagtgttgggtcaac

SEQ ID NO: 210808 - DNA, 2960 bp, Zea Mays
attttacactattcagcgacaaataaaaagaaacggagggagtaccaccgtcgacgcctcaccaatcaccatggcatggcatgcaccacgtacgagacggtagaactttggtatgtagagcttcgttcacggtcacgcggtggtggagctccatcctgcagactttaaccatgcatgcccgtgagtccgtgacgaccttcttttccctctctctctctccccctactgctatcatggtcatggccatgggctcatggctaacctgcttcggctgtcttcttcaccgctctccccgtccccacaccgtctgacctgtccgttttttttaaaaaaataattaattaattaaagccgccaaatttgaagaagagaagaaggagaagatgagaagagagaaaaactgagtgccgaaagattcgatcggagtgagatgtagactttcggcagcatatagttataaccttaatgattaatctatcacgagattattgatatgccactatatatatgccggcgtacgtacggccgtctgtatataactatatagttgcactatctcgttacattagaataataatactgcaggaaaggccccaatgcaagctgggtttttttttcttcttcagcgagactccaaacttcgaaggtgccgcgtgtgttttaaaaatatcccagacaatgcctgaaaagttgacagctgaacacatggctttttacttgaccagtatacagtggtatttactatttaccaacatagtattactatatcattaccccctgaaacgctcggtttggtttccgttgctgcatgcagggcgaaataagttccatcgagggggtccacgctgcctccagatgctgcaaagaggttgatgagttcgttggaaggaacccggatccgttcctaacgattcagcaagagagaggaagccacgatcaatctcagcagtttctgaagaagttccggtacttccgttgctcacagctcttaataattattatagtaatcgccggttcttgcccattagtaaactacacgtctttattaatgttattttgttgtcaattgtgtattaccctagcactagctagcagatcgatcacatgaaaaaagactaatttgtacgagagaaaaaaaaatcctactatcatcacccaaatcatttttaggtaggatgggagaagcaacataaacaactagcctctgcaaatcgtcatatataagacagaaaactatcacccagagctaataaaccccgaaatgaatgagacatagatatctcaattattactgtctactgagaccacaacctgtccattttctgaaaaagtatgaaaagggggcatattcattcagtgcaagctgtatgaaagcttggtgatcatccgcgaacgagctgagcctcagtcccactccctcccaccagcgcgcgtacgtacgtgtacgtcctagcagcttcaacggcttgtatcagatctctgctgctttttttttacccctttgcagcctgcaacccgtactgcactactccctccgttcctttttatttgtcgctggatagtgtaattttgcactatccagcgacaaataaaaagaaacggagggagtacaaactttcagagtaatcagcatgtcgtctactttaaactgccatgccgtcaacatcacacgttgtcagcccagccctgcagagcaatcagtttgtcgttgtctgcgctaacacttaatcgagcatctatagtgctgcttttcagaaccgtcacctcattgttactataattgtttcaactatttcctcatcaccacgtcgtcagaaaaaccatcgtcgtctgctgctggctagctgaataggagtgcatcagtaaaacctgaaaataatgctgctgctactgtttgttgctaatgctagctagctactgcatagcttgcattgagttgggtgaattaatgattggcaatcagatgaatgaagttgagttttgtgcatgcatgcatgcagaggaaagagctgcctgagctactacctctcgtggatctgcggtggcgggtggtggtgcccgccgccgttgcagctcaagaggccaccggcgccgagctgctcctgcgcgccgcggctggggaagctctgctcctccaccgcctcctcctgctgcagctgttgctgctgccggttccgcgtcgtgtacgccgccgccggctgcgggtgctgcgcgccgtgcccgcgctgctcgtgcgactgcacctgcgcctgcccgcgctgctgctcctgcgcctgccccatgtgcagcgccgcgtgctgcgccccgcgctgctgcctgtgcctatgatggccatgagaaattttgcgtgcatgctagtagtagtagtacccggagatgatgatggatgactggcattttgcagcatggttttttttttggtttagtttcggcgacacgagtactgttgtaactggctgtacgtggctgatctggttagtgctggtgaatggtgtcgattccacattttccgctgagagttgccatgacatgcagccctactagtcttacgtacagcacaaaagatgcttagattccactcagtccttcggttattgcaatttaatgtggacgggagtgtattgaaatgtattgggatagattttgacttgctattaatttaaaccgacccaatatcactcaatccatatggattaacagtgcgaacaaaccctaatggcctgttcgtttatgccggatttcactaaaaatcgttccagctgatcaaaccttatgcggctgattggttggactgctgcccgtggcctgcctcaggcgagcatgccccgtgggaaacagaagtttctagcgtacccgcgcatgcagctttaagagatatttttttgctagcgttgcatctgccagtacaacttgatctcgttttatgcacttaaccaaacaaaggctagtgttgggtcaac

SEQ ID NO: 210809 - DNA, 2524 bp, Zea Mays
taaatgcttttgagttctaacaaaatgcagtttcttgcctcaacagaagttgtagactgtactttgttgaacaagtcgcactaggaacttactacattcttgctctatagaaactgtcaggcttgtgagagttctgttatgtaccgcttcttttctaaagaaaaatagtagagttttagaaaacataatgaatacagcttcttttattgaactcttagaagtactccagccattgtagtttaatttatctgcatacagttggttgtattgaacactgggacaccctgaggtctttgttgttcaattatgattatatttctgtatactttatttttaatggttaatcaaaatgctagcttatataatgctccctcaaatgcaggttgcaatattttccagcatagcttgctcacctacttctcaatttagaagacttcaatttctggatctgagcatcaaatcaagaccataccactttagtcagtcctgtctgatggcactggctgcagctccagccagtggtgattcacagagtggtcctcagaggaactatcaggttgttgtggctgccactcgtgacatgggcattggcaagggtggggtcatgccatggaagcttcttggtgatcttaaattcttcaaagaacttacactaactacaactgatcctgccaaaaagaatgcagttataatgggaaggaaaacatgggagagcattcctgttaagtcaaggccactgcctggtcgtttgaatgtcatacttactcgatctggtagttttgattttgcaacagtagagaatgttgttatatgtggaagtatgaagtctgccttagagctgctagcatcaactccatactgcttatcaattgagaaagtttttgtcataggaggtgggcaggtactgagagaatatttgaatggacctgcatgtgaggctatccatctgactgatattcagtcaagcattgagtgtgatactttcatccctccagttgacttttcagtgttccagccatggtattcatctttcccagtggtagagagcaacattaggcattcttttgtgacttttgttcgtgttagaaagtcagtggcagaaactcatgagtcaaatggcaaggaatcaactgagattgataccaagaatgacaaatttgaaatagagaatttctcttttctccccaagatagtatatgaccgccatgaggagtatcaatatctcaatcttgttgaagatattataaggttcggtgctcagaaaaatgacaggacaggaactggaacattgtcaaaatttgggtgtcagatgcgattcaacttaaggaaaaattttcctctgctgacaacaaagagggtgttttggcgtggtgttgtcgaagaactcctttggttcatcagtggctcaacaaatgcaaaggttttgcaagaaaagggtattcatatctgggatggcaatgcttcaagagagtatcttgaccgggaggaaggtgatctaggtccagtttatggatttcaatggcgacactttggtgccgaatatactgacatgcatgctgactatactggaaaaggctttgatcagctaatggatgtgattgacaagattaagaacaatcctgatgaccgccgaataattttatcggcgtggaatccttcagatctcaagaagatggctcttcctccttgccacatgtttgcacaattttatgtggagaacggggagctatcctgccagatgtatcaacgctctgcagacatggggcttggtgttccattcaacatcgcatcatattctcttttgacatatatgattgctcaagtttgtgatctttctccaggagattttgtccatgttataggggatgctcatgtctatagaaatcacgttcgagctctggaggaacagattcagaagatgcctaaaccatttccaattttgaagataaatccttcgaaaaaggatatagattctttcatggcgtcagacttcaagctggttggctatgatcctcaccagaagctagagatgaaaatggcagtgtaacggtggcttagctctggagcccccagccttggaacctcggtgggtgaaatcagtcgaacgaactggtactacataaaaaatgaaccggacatcgcactagcttgtttttggtgatggtgctgaatgttgtgcgggaggcgttttcccccgttattagtagcgatctgcgtgctatatatggtcgctgaagtcaaaattggctctcttttattttttatctactactactactcatttgcgagtgagagatggtctgggcacaccattcaattgcaacggcctactggtgtgttgccccccaatgagggctgtgacgattgcgccactacctcgtgagaaacatgatgtgaccgaaattgctgtgtacctgcatggtagaacaacgcactctttggtatctggttgccttaatacgtgacctggttaattcagtttccagtttggatgggcacaagatagcgatttgctgtggcgttt

SEQ ID NO: 210810 - DNA, 2258 bp, Zea Mays
ccagatgttagttgcagaggtgctcagagctggagcgtacatctctaggttttctcggcgtgcatgcaaagtatacactactagcggaatatattgtggttgcaatattttccagcatagcttgctcacctacttctcaatttagaagacttcaatttctggatctgagcatcaaatcaagaccataccactttagtcagtcctgtctgatggcactggctgcagctccagccagtggtgattcacagagtggtcctcagaggaactatcaggttgttgtggctgccactcgtgacatgggcattggcaagggtggggtcatgccatggaagcttcttggtgatcttaaattcttcaaagaacttacactaactacaactgatcctgccaaaaagaatgcagttataatgggaaggaaaacatgggagagcattcctgttaagtcaaggccactgcctggtcgtttgaatgtcatacttactcgatctggtagttttgattttgcaacagtagagaatgttgttatatgtggaagtatgaagtctgccttagagctgctagcatcaactccatactgcttatcaattgagaaagtttttgtcataggaggtgggcaggtactgagagaatatttgaatggacctgcatgtgaggctatccatctgactgatattcagtcaagcattgagtgtgatactttcatccctccagttgacttttcagtgttccagccatggtattcatctttcccagtggtagagagcaacattaggcattcttttgtgacttttgttcgtgttagaaagtcagtggcagaaactcatgagtcaaatggcaaggaatcaactgagattgataccaagaatgacaaatttgaaatagagaatttctcttttctccccaagatagtatatgaccgccatgaggagtatcaatatctcaatcttgttgaagatattataaggttcggtgctcagaaaaatgacaggacaggaactggaacattgtcaaaatttgggtgtcagatgcgattcaacttaaggaaaaattttcctctgctgacaacaaagagggtgttttggcgtggtgttgtcgaagaactcctttggttcatcagtggctcaacaaatgcaaaggttttgcaagaaaagggtattcatatctgggatggcaatgcttcaagagagtatcttgaccgtattggcttggcacacagggaggaaggtgatctaggtccagtttatggatttcaatggcgacactttggtgccgaatatactgacatgcatgctgactatactggaaaaggctttgatcagctaatggatgtgattgacaagattaagaacaatcctgatgaccgccgaataattttatcggcgtggaatccttcagatctcaagaagatggctcttcctccttgccacatgtttgcacaattttatgtggagaacggggagctatcctgccagatgtatcaacgctctgcagacatggggcttggtgttccattcaacatcgcatcatattctcttttgacatatatgattgctcaagtttgtgatctttctccaggagattttgtccatgttataggggatgctcatgtctatagaaatcacgttcgagctctggaggaacagattcagaagatgcctaaaccatttccaattttgaagataaatccttcgaaaaaggatatagattctttcatggcgtcagacttcaagctggttggctatgatcctcaccagaagctagagatgaaaatggcagtgtaacggtggcttagctctggagcccccagccttggaacctcggtgggtgaaatcagtcgaacgaactggtactacataaaaaatgaaccggacatcgcactagcttgtttttggtgatggtgctgaatgttgtgcgggaggcgttttcccccgttattagtagcgatctgcgtgctatatatggtcgctgaagtcaaaattggctctcttttattttttatctactactactactcatttgcgagtgagagatggtctgggcacaccattcaattgcaacggcctactggtgtgttgccccccaatgagggctgtgacgattgcgccactacctcgtgagaaacatgatgtgaccgaaattgctgtgtacctgcatggtagaacaacgcactctttggtatctggttgccttaatacgtgacctggttaattcagtttccagtttggatgggcacaagatagcgatttgctgtggcgttt

SEQ ID NO: 210811 - DNA, 2800 bp, Zea Mays
tgcgcgcctcccgctcccctatcgcctcggtcgaacgtcgacggcgcccggccccggcggctgcattgcgctgcttgcggccggcgggtagcgggagccagcaggctctgctcccccaaggcggccgcgccgctttgttcttggtccagatgttagttgcagaggtgctcagagctggagcgtacatctctaggttttctcggcgtgcatgcaaagtatacactactagcggaatatattgtggtagcattttgcatctaaatgcttttgagttctaacaaaatgcagtttcttgcctcaacagaagttgtagactgtactttgttgaacaagtcgcactaggaacttactacattcttgctctatagaaactgtcaggcttgtgagagttctgttatgtaccgcttcttttctaaagaaaaatagtagagttttagaaaacataatgaatacagcttcttttattgaactcttagaagtactccagccattgtagtttaatttatctgcatacagttggttgtattgaacactgggacaccctgaggtctttgttgttcaattatgattatatttctgtatactttatttttaatggttaatcaaaatgctagcttatataatgctccctcaaatgcaggttgcaatattttccagcatagcttgctcacctacttctcaatttagaagacttcaatttctggatctgagcatcaaatcaagaccataccactttagtcagtcctgtctgatggcactggctgcagctccagccagtggtgattcacagagtggtcctcagaggaactatcaggttgttgtggctgccactcgtgacatgggcattggcaagggtggggtcatgccatggaagcttcttggtgatcttaaattcttcaaagaacttacactaactacaactgatcctgccaaaaagaatgcagttataatgggaaggaaaacatgggagagcattcctgttaagtcaaggccactgcctggtcgtttgaatgtcatacttactcgatctggtagttttgattttgcaacagtagagaatgttgttatatgtggaagtatgaagtctgccttagagctgctagcatcaactccatactgcttatcaattgagaaagtttttgtcataggaggtgggcaggtactgagagaatatttgaatggacctgcatgtgaggctatccatctgactgatattcagtcaagcattgagtgtgatactttcatccctccagttgacttttcagtgttccagccatggtattcatctttcccagtggtagagagcaacattaggcattcttttgtgacttttgttcgtgttagaaagtcagtggcagaaactcatgagtcaaatggcaaggaatcaactgagattgataccaagaatgacaaatttgaaatagagaatttctcttttctccccaagatagtatatgaccgccatgaggagtatcaatatctcaatcttgttgaagatattataaggttcggtgctcagaaaaatgacaggacaggaactggaacattgtcaaaatttgggtgtcagatgcgattcaacttaaggaaaaattttcctctgctgacaacaaagagggtgttttggcgtggtgttgtcgaagaactcctttggttcatcagtggctcaacaaatgcaaaggttttgcaagaaaagggtattcatatctgggatggcaatgcttcaagagagtatcttgaccgtattggcttggcacacagggaggaaggtgatctaggtccagtttatggatttcaatggcgacactttggtgccgaatatactgacatgcatgctgactatactggaaaaggctttgatcagctaatggatgtgattgacaagattaagaacaatcctgatgaccgccgaataattttatcggcgtggaatccttcagatctcaagaagatggctcttcctccttgccacatgtttgcacaattttatgtggagaacggggagctatcctgccagatgtatcaacgctctgcagacatggggcttggtgttccattcaacatcgcatcatattctcttttgacatatatgattgctcaagtttgtgatctttctccaggagattttgtccatgttataggggatgctcatgtctatagaaatcacgttcgagctctggaggaacagattcagaagatgcctaaaccatttccaattttgaagataaatccttcgaaaaaggatatagattctttcatggcgtcagacttcaagctggttggctatgatcctcaccagaagctagagatgaaaatggcagtgtaacggtggcttagctctggagcccccagccttggaacctcggtgggtgaaatcagtcgaacgaactggtactacataaaaaatgaaccggacatcgcactagcttgtttttggtgatggtgctgaatgttgtgcgggaggcgttttcccccgttattagtagcgatctgcgtgctatatatggtcgctgaagtcaaaattggctctcttttattttttatctactactactactcatttgcgagtgagagatggtctgggcacaccattcaattgcaacggcctactggtgtgttgccccccaatgagggctgtgacgattgcgccactacctcgtgagaaacatgatgtgaccgaaattgctgtgtacctgcatggtagaacaacgcactctttggtatctggttgccttaatacgtgacctggttaattcagtttccagtttggatgggcacaagatagcgatttgctgtggcgttt

SEQ ID NO: 210812 - DNA, 2272 bp, Zea Mays
ctgcggtggcgctcaggctcgggctctcagcaacggcggggcagtcccagactcagcggctccctctctccaatcgccttgcgccctcgctccgttcctctgctcaccggccgattctgcgttgcaatattttccagcatagcttgctcacctacttctcaatttagaagacttcaatttctggatctgagcatcaaatcaagaccataccactttagtcagtcctgtctgatggcactggctgcagctccagccagtggtgattcacagagtggtcctcagaggaactatcaggttgttgtggctgccactcgtgacatgggcattggcaagggtggggtcatgccatggaagcttcttggtgatcttaaattcttcaaagaacttacactaactacaactgatcctgccaaaaagaatgcagttataatgggaaggaaaacatgggagagcattcctgttaagtcaaggccactgcctggtcgtttgaatgtcatacttactcgatctggtagttttgattttgcaacagtagagaatgttgttatatgtggaagtatgaagtctgccttagagctgctagcatcaactccatactgcttatcaattgagaaagtttttgtcataggaggtgggcagagaatatttgaatggacctgcatgtgaggctatccatctgactgatattcagtcaagcattgagtgtgatactttcatccctccagttgacttttcagtgttccagccatggtattcatctttcccagtggtagagagcaacattaggcattcttttgtgacttttgttcgtgttagaaagtcagtggcagaaactcatgagtcaaatggcaaggaatcaactgagattgataccaagaatgacaaatttgaaatagagaatttctcttttctccccaagatagtatatgaccgccatgaggagtatcaatatctcaatcttgttgaagatattataaggttcggtgctcagaaaaatgacaggacaggaactggaacattgtcaaaatttgggtgtcagatgcgattcaacttaaggaaaaattttcctctgctgacaacaaagagggtgttttggcgtggtgttgtcgaagaactcctttggttcatcagtggctcaacaaatgcaaaggttttgcaagaaaagggtattcatatctgggatggcaatgcttcaagagagtatcttgaccgtattggcttggcacacagggaggaaggtgatctaggtccagtttatggatttcaatggcgacactttggtgccgaatatactgacatgcatgctgactatactggaaaaggctttgatcagctaatggatgtgattgacaagattaagaacaatcctgatgaccgccgaataattttatcggcgtggaatccttcagatctcaagaagatggctcttcctccttgccacatgtttgcacaattttatgtggagaacggggagctatcctgccagatgtatcaacgctctgcagacatggggcttggtgttccattcaacatcgcatcatattctcttttgacatatatgattgctcaagtttgtgatctttctccaggagattttgtccatgttataggggatgctcatgtctatagaaatcacgttcgagctctggaggaacagattcagaagatgcctaaaccatttccaattttgaagataaatccttcgaaaaaggatatagattctttcatggcgtcagacttcaagctggttggctatgatcctcaccagaagctagagatgaaaatggcagtgtaacggtggcttagctctggagcccccagccttggaacctcggtgggtgaaatcagtcgaacgaactggtactacataaaaaatgaaccggacatcgcactagcttgtttttggtgatggtgctgaatgttgtgcgggaggcgttttcccccgttattagtagcgatctgcgtgctatatatggtcgctgaagtcaaaattggctctcttttattttttatctactactactactcatttgcgagtgagagatggtctgggcacaccattcaattgcaacggcctactggtgtgttgccccccaatgagggctgtgacgattgcgccactacctcgtgagaaacatgatgtgaccgaaattgctgtgtacctgcatggtagaacaacgcactctttggtatctggttgccttaatacgtgacctggttaattcagtttccagtttggatgggcacaagatagcgatttgctgtggcgttt

SEQ ID NO: 210813 - DNA, 2275 bp, Zea Mays
cttcatcttcctcgcaacgccgacgctgcaacttccgctccctccccgactcgcgctcggcacgcaggcaggcgactgcggtggcgctcaggctcgggctctcagcaacggcggggttgcaatattttccagcatagcttgctcacctacttctcaatttagaagacttcaatttctggatctgagcatcaaatcaagaccataccactttagtcagtcctgtctgatggcactggctgcagctccagccagtggtgattcacagagtggtcctcagaggaactatcaggttgttgtggctgccactcgtgacatgggcattggcaagggtggggtcatgccatggaagcttcttggtgatcttaaattcttcaaagaacttacactaactacaactgatcctgccaaaaagaatgcagttataatgggaaggaaaacatgggagagcattcctgttaagtcaaggccactgcctggtcgtttgaatgtcatacttactcgatctggtagttttgattttgcaacagtagagaatgttgttatatgtggaagtatgaagtctgccttagagctgctagcatcaactccatactgcttatcaattgagaaagtttttgtcataggaggtgggcaggtactgagagaatatttgaatggacctgcatgtgaggctatccatctgactgatattcagtcaagcattgagtgtgatactttcatccctccagttgacttttcagtgttccagccatggtattcatctttcccagtggtagagagcaacattaggcattcttttgtgacttttgttcgtgttagaaagtcagtggcagaaactcatgagtcaaatggcaaggaatcaactgagattgataccaagaatgacaaatttgaaatagagaatttctcttttctccccaagatagtatatgaccgccatgaggagtatcaatatctcaatcttgttgaagatattataaggttcggtgctcagaaaaatgacaggacaggaactggaacattgtcaaaatttgggtgtcagatgcgattcaacttaaggaaaaattttcctctgctgacaacaaagagggtgttttggcgtggtgttgtcgaagaactcctttggttcatcagtggctcaacaaatgcaaaggttttgcaagaaaagggtattcatatctgggatggcaatgcttcaagagagtatcttgaccgtattggcttggcacacagggaggaaggtgatctaggtccagtttatggatttcaatggcgacactttggtgccgaatatactgacatgcatgctgactatactggaaaaggctttgatcagctaatggatgtgattgacaagattaagaacaatcctgatgaccgccgaataattttatcggcgtggaatccttcagatctcaagaagatggctcttcctccttgccacatgtttgcacaattttatgtggagaacggggagctatcctgccagatgtatcaacgctctgcagacatggggcttggtgttccattcaacatcgcatcatattctcttttgacatatatgattgctcaagtttgtgatctttctccaggagattttgtccatgttataggggatgctcatgtctatagaaatcacgttcgagctctggaggaacagattcagaagatgcctaaaccatttccaattttgaagataaatccttcgaaaaaggatatagattctttcatggcgtcagacttcaagctggttggctatgatcctcaccagaagctagagatgaaaatggcagtgtaacggtggcttagctctggagcccccagccttggaacctcggtgggtgaaatcagtcgaacgaactggtactacataaaaaatgaaccggacatcgcactagcttgtttttggtgatggtgctgaatgttgtgcgggaggcgttttcccccgttattagtagcgatctgcgtgctatatatggtcgctgaagtcaaaattggctctcttttattttttatctactactactactcatttgcgagtgagagatggtctgggcacaccattcaattgcaacggcctactggtgtgttgccccccaatgagggctgtgacgattgcgccactacctcgtgagaaacatgatgtgaccgaaattgctgtgtacctgcatggtagaacaacgcactctttggtatctggttgccttaatacgtgacctggttaattcagtttccagtttggatgggcacaagatagcgatttgctgtggcgttt

SEQ ID NO: 210814 - DNA, 2345 bp, Zea Mays
ttcttcatcttcctcgcaacgccgacgctgcaacttccgctccctccccgactcgcgctcggcacgcaggcaggcgactgcggtggcgctcaggctcgggctctcagcaacggcggggcagtcccagactcagcggctccctctctccaatcgccttgcgccctcgctccgttcctctgctcaccggccgattctgcgttgcaatattttccagcatagcttgctcacctacttctcaatttagaagacttcaatttctggatctgagcatcaaatcaagaccataccactttagtcagtcctgtctgatggcactggctgcagctccagccagtggtgattcacagagtggtcctcagaggaactatcaggttgttgtggctgccactcgtgacatgggcattggcaagggtggggtcatgccatggaagcttcttggtgatcttaaattcttcaaagaacttacactaactacaactgatcctgccaaaaagaatgcagttataatgggaaggaaaacatgggagagcattcctgttaagtcaaggccactgcctggtcgtttgaatgtcatacttactcgatctggtagttttgattttgcaacagtagagaatgttgttatatgtggaagtatgaagtctgccttagagctgctagcatcaactccatactgcttatcaattgagaaagtttttgtcataggaggtgggcaggtactgagagaatatttgaatggacctgcatgtgaggctatccatctgactgatattcagtcaagcattgagtgtgatactttcatccctccagttgacttttcagtgttccagccatggtattcatctttcccagtggtagagagcaacattaggcattcttttgtgacttttgttcgtgttagaaagtcagtggcagaaactcatgagtcaaatggcaaggaatcaactgagattgataccaagaatgacaaatttgaaatagagaatttctcttttctccccaagatagtatatgaccgccatgaggagtatcaatatctcaatcttgttgaagatattataaggttcggtgctcagaaaaatgacaggacaggaactggaacattgtcaaaatttgggtgtcagatgcgattcaacttaaggaaaaattttcctctgctgacaacaaagagggtgttttggcgtggtgttgtcgaagaactcctttggttcatcagtggctcaacaaatgcaaaggttttgcaagaaaagggtattcatatctgggatggcaatgcttcaagagagtatcttgaccgtattggcttggcacacagggaggaaggtgatctaggtccagtttatggatttcaatggcgacactttggtgccgaatatactgacatgcatgctgactatactggaaaaggctttgatcagctaatggatgtgattgacaagattaagaacaatcctgatgaccgccgaataattttatcggcgtggaatccttcagatctcaagaagatggctcttcctccttgccacatgtttgcacaattttatgtggagaacggggagctatcctgccagatgtatcaacgctctgcagacatggggcttggtgttccattcaacatcgcatcatattctcttttgacatatatgattgctcaagtttgtggagattttgtccatgttataggggatgctcatgtctatagaaatcacgttcgagctctggaggaacagattcagaagatgcctaaaccatttccaattttgaagataaatccttcgaaaaaggatatagattctttcatggcgtcagacttcaagctggttggctatgatcctcaccagaagctagagatgaaaatggcagtgtaacggtggcttagctctggagcccccagccttggaacctcggtgggtgaaatcagtcgaacgaactggtactacataaaaaatgaaccggacatcgcactagcttgtttttggtgatggtgctgaatgttgtgcgggaggcgttttcccccgttattagtagcgatctgcgtgctatatatggtcgctgaagtcaaaattggctctcttttattttttatctactactactactcatttgcgagtgagagatggtctgggcacaccattcaattgcaacggcctactggtgtgttgccccccaatgagggctgtgacgattgcgccactacctcgtgagaaacatgatgtgaccgaaattgctgtgtacctgcatggtagaacaacgcactctttggtatctggttgccttaatacgtgacctggttaattcagtttccagtttggatgggcacaagatagcgatttgctgtggcgttt

SEQ ID NO: 210815 - DNA, 1311 bp, Zea Mays
cttaaatcgtttgcagtgggattatgttaccggaagaattctagcttggcattctaatttcaatgccagatcagagtccgtaaaagaaaaggtttcattccgtcgactaattcaaaaaaataggtgccttgttgcagtagaagggttttatgagtggaaaaagaatggatcaaaaaaacagccatactacatacatttccaagatcataggcctcttgtctttgcagccttgtatgatgcatggacaaattcagaaggagagatcacccatacattcactattttgactacacatgcctcaacttctctaaattggcttcatgatagaatgcctgttatcttaggcagtaaggactatgttgatgcttggttaaatgatgtttctgtaaaacttgaagaaattactgcaccttacgaaggagctgatctggtttggtatccagtgacatccgcattgggtaaagcatcatttgatggacctgagtgcatcaaagaggtacatatcggagctactgataagcctatttcaaaattcttcaccaagaaatcgactgcctacgatctatcagggaagtatgagaatatgtcacgggagcttgctcatgcttacaaagcagcgaaagtggaatgcgatggatcagtagaaaatcaaggaggggacggcaaccaacaccagtcccgagagaagcaaactactaattgtactataaaggatgaacctgtcaccttggaaccacaagttttcgagacaccgtggagcatcgagcatgaagatactatgactctggctggtgccactttggaaacacaacgtgatttgggattcaagagaaagatcgaggacactcaagtcgaagctagcatgaaaccctctcagcttaccaggaaggaaaaagctgtaaaagcagcttcggatgggcaggcatcgttgctttcatatttcgcaaggaagcagggtcgctcgatgaagtagtttgcggtagccgtgccatgtattcctgtgtaactcaaactttaccagtacctgtcctccgtgttcgggacaaactatttcggttttaattttgttttggctaccactaaaatgaaccagctagatttctgcggtcattaattttctgcggcccaacttagccgaggccaatgaaaaaagaactttatttccggtagtctggtccaatcactgaattaagaaccttgtttttggtggttatgttaagccgctgaacataagggtgacgataacgatcttgtttttggcaacttaagttaagccaccaaaaataaggtttttacttttttggcttaact

SEQ ID NO: 210816 - DNA, 1614 bp, Zea Mays
ccttagtgtactggagtgttcgaggcttcccctccccactagccacagtagcacctcagcccaggtccccgtcgcctccgctcaactgccgccgcagggcccgctgcaggcttccatgtgtggtagggcccggtgtaccctcagcccggccgaggttgccagggccttcggcttccccaccacctccgccaacgcgggcggcggtggagacggccccgctgtgccgacgctccatcttaaccggttccggccgtcgtacaatgtgttgcctggggcgtacctgcctgtgggcgccatgcgggcactaccaggttgcgcccacggaggaggaggttcggatggggaggggccggtgatccagtgcatgaagtgggggctggtgcccagcttcaccggcaaggccgagaaacccgactatttcaggatgttcaatgccagatcagagtccgtaaaagaaaaggtttcattccgtcgactaattcaaaaaaataggtgccttgttgcagtagaagggttttatgagtggaaaaagaatggatcaaaaaaacagccatactacatacatttccaagatcataggcctcttgtctttgcagccttgtatgatgcatggacaaattcagaagatagaatgcctgttatcttaggcagtaaggactatgttgatgcttggttaaatgatgtttctgtaaaacttgaagaaattactgcaccttacgaaggagctgatctggtttggtatccagtgacatccgcattgggtaaagcatcatttgatggacctgagtgcatcaaagaggtacatatcggagctactgataagcctatttcaaaattcttcaccaagaaatcgactgcctacgatctatcagggaagtatgagaatatgtcacgggagcttgctcatgcttacaaagcagcgaaagtggaatgcgatggatcagtagaaaatcaaggaggggacggcaaccaacaccagtcccgagagaagcaaactactaattgtactataaaggatgaacctgtcaccttggaaccacaagttttcgagacaccgtggagcatcgagcatgaagatactatgactctggctggtgccactttggaaacacaacgtgatttgggattcaagagaaagatcgaggacactcaagtcgaagctagcatgaaaccctctcagcttaccaggaaggaaaaagctgtaaaagcagcttcggatgggcaggcatcgttgctttcatatttcgcaaggaagcagggtcgctcgatgaagtagtttgcggtagccgtgccatgtattcctgtgtaactcaaactttaccagtacctgtcctccgtgttcgggacaaactatttcggttttaattttgttttggctaccactaaaatgaaccagctagatttctgcggtcattaattttctgcggcccaacttagccgaggccaatgaaaaaagaactttatttccggtagtctggtccaatcactgaattaagaaccttgtttttggtggttatgttaagccgctgaacataagggtgacgataacgatcttgtttttggcaacttaagttaagccaccaaaaataaggtttttacttttttggcttaact

SEQ ID NO: 210817 - DNA, 880 bp, Zea Mays
ctggagtgttcgaggcttcccctccccactagccacagtagcacctcagcccaggtccccgtcgcctccgctcaactgccgccgcagggcccgctgcaggcttccatgtgtggtagggcccggtgtaccctcagcccggccgaggttgccagggccttcggcttccccaccacctccgccaacgcgggcggcggtggagacggccccgctgtgccgacgctccatcttaaccggttccggccgtcgtacaatgtgttgcctggggcgtacctgcctgtgggcgccatgcgggcactaccaggttgcgcccacggaggaggaggttcggatggggaggggccggtgatccagtgcatgaagtgggggctggtgcccagcttcaccggcaaggccgagaaacccgactatttcaggatgttcaatgccagatcagagtccgtaaaagaaaaggtttcattccgtcgactaattcaaaaaaataggtgccttgttgcagtagaagggttttatgagtggaaaaagaatggatcaaaaaaacagccatactacatacatttccaagatcataggcctcttgtctttgcagccttgtatgatgcatggacaaattcagaaggagagatcacccatacattcactattttgactacacatgcctcaacttctctaaattggcttcatgatagaatgcctgttatcttaggcagtaaggactatgttgatgcttggttaaatgatgtttctgtaaaacttgaagaaattactgcaccttacgaaggagctgatctggtttggtatccagtgacatccgcattgggtaaagcatcatttgatggacctgagtgcatcaaagagatttttctacaatcatggtcatcga

SEQ ID NO: 210818 - DNA, 4194 bp, Zea Mays
cccacaccgctccatttctcccgcccccgtctgccctccgccccctaaaccctagccgtttcccatagccgctcgccccagcctcctctgcccagagacttttctttgcggccgaaatggatgactcggagaacaacgcaccctcgacgccggggtcccccgggttcagcaccgaccggctgccacccaacaccaccaccagccgcggcgccaccgacccgtcatcttactccgacgacgatggcgaagctgaggtcgatcctcacgtgctacccgatgacgacgaccccgccgctgtagcggctcccgacgaggacgaggagggggaggacctcttcaacgacaactacctcgatgattaccgaaggatggatgagcatgatcaatatgagtcagttggtttagatgattcactcgaggatgagaggaatcttgatgaaatcatggctgatcgaagggccgcggaagcggagcttgatgcaagggaagtgaggactggtgcaacagctgataggaagctgccacgaatgctccacgatcaggatacagatgatgatacgaatttcaggcgtcctaaaaggcacagggctagttttagacaaccaagtggaccaagaacaccaagaagtgatgatgatggtgatggtgccactcctagttcacctggaagatctcatcgtggaatgtcatctggtggtgatgtgcctatgactgatcagactgatgatgacccatatgaggatgaatttgatgaagaagatgagatgaacatgtaccgtgtccaaggtacattgagagagtgggtcacaagagatgaagtccgtcgctttattgcaaagaaatttaaagaatttcttctgacatatgttcatccgaagaacgatcaaggagagtttgagtatgttcggcttattaatgagatggttttagctaacaagtgtagcctggaaatagactacaagcagtttatttatatacatccaaacattgccatctggttggctgatgcgcctcaatcggtgcttgaagttatggaagaagttgccaaaaatgttgtttttgatcttcacaagaattataggaacatccaccaaaagatctatgttcgaatatcgaaccttcctgtctatgatcaaatacgcaatatcaggcaaatccatctgaacacaatgattcgaattggtggtgttgttacccgacgatctggtgtattccctcagctgcagcaggtgaagtatgactgtaacaaatgtggaactatcctgggccctttcttccaaaactcctacactgaggtgaaagttggatcatgccctgaatgtcaatccaaagggccattcacagtcaatgtcgagcagactatatataggaactaccagaaactcactcttcaggaaagcccaggaattgttcctgctggaaggcttcccagatacaaggaagtcatacttctgaatgatctgattgactgtgctcgtccaggagaggagattgaggtcactgggatatacacaaataattttgacctgtctttgaatacaaagaatggtttccctgtttttgccacagtggttgaggcaaactatgtggcaaaaaaacaggatttgttttctgcatacaaattaacggacgaggacaaagcagagattgagaagttgtcaaaggatccaaggattggagaaaggattatcaaatcaattgcaccatccatttacgggcatgaagatatcaagactgccattgcacttgctatgtttggtggacaagagaagaatgtgaagggaaaacatcgcctgagaggcgacatcaatgtcctcctcctgggtgatccaggcactgcaaaatcacagtttcttaagtatgtggagaaaacaggacacagagcagtatatacaactggaaaaggagcctctgctgttggtcttactgctgcagttcacaaagatccagtaacacgagaatggacacttgagggaggtgcactagttcttgctgataggggcatttgcctcattgatgagtttgacaagatgaatgatcaagatagggtaagtattcatgaagctatggagcaacagagtatcagtatatcaaaagcaggaatcgtcacatctcttcaagctagatgcagtgttattgctgcggcaaacccagtagggggaaggtatgattcatcaaagacattcactcagaatgtcgaattgacggatcccattatttcacgttttgacgtcctctgtgtggttaaggatattgtcgatccatttacagatgaaatgctcgcaaggtttgttgtagatagtcacgccagatcccagccgaagggggctaaccttgaagacagggtttcaactgatgtggatgatgatccactggctgctgcaaggcaagctgacccagatgtcctttcccaagacatgctgaagaaatacatgatgccgatctagacaagattagccatgtttatgctgaactccgccgtgaatcctctcatggccaaggggttcctattgcagtaaggcatatagagtcaatcatccggatgtcggaggcacatgcaaggatgcatctgaggagctacgtgtctcaggaagatgttgacatggccatccgtgtcttgcttgactcttttatttcgactcagaagttcggtgtgcagaaagcacttcaaaagaatttccggaagtacatgacattcaagaaggactacaacgagctgctcctgctgctcctgcgcacactggtcaaggacgccgtgcacttcgaagaaatcatggcaggatcagcctcacgtcttactcacgtcgaggtcaaattggaggacctgaggaacaaggcccaagaatacgagatctacgatctgaagccgttcttctccagcgcgtgcttcagggacaacggcttccttctggatgaagggcgtgggatcatcaggcatccactggcggagtaacaactgagaactgatcttcctcatgtctagaaccggcctttgtctgttacggccctgagatgaagagtgatgatatctgacctcatttgttataggcatacaattgacacttggctggtcgccttttggatttagtatctgttgtgtcttgtttgagagtttcgtactatatgcacttgctgccatttaggcgtgactgtatggtgtgtgaaatcattcgttagatagaatgatcggtgtggctgcaagcaacaaatagttagaaaaagaaacaaaaacgaactgcagccaaaagaccctgagggttattgaagatgatgaatgcatcagttgccatgccttagaagaagagtatgctaagcttttccatcaacccttgtctgacgaatatgtggctgccttagctgccctctttggctgttctgttcagttacaaccttttgtagatagaattgtagatcaactctccggatggaaatcatattcacgagagtgcaagaacattatgtgcttaatgggatgcttatgtatctttctatagttattaatattccctcttgggctatcaagactattgataaaaatcagaataagttttctttagggcttggtattcatcccaatactcatgggttgagggggattaagatgtaaattaaaccgatttatatctcatgccttgttcggttattctaattccatgtggattagaatgtatttcggttattctaattcatgtggattagaatgtattgagatgtattttaacttgctatgtatttaaaccgactcaataccattcaatccacatgtattaacggtgaaacgaacgagccctcaatccaccccaaccatatgtatcgaagtaaatataagagtatccaaacataaccttatatggtgaaatgaagtcgaaagggcactgcttcgttgcatgaggaagtgtttgtagacctctctagatggacagacttgcatctccggtctcaaagagcttagttggacattgtgtagtttacctatccaagtgtcaggcaaaaagcacgagctttcttcccggtggtgctgctctcggaagttgggaattgggcacacactttgttctagattgataaatggatttatgggtagaaaattgctaatcttgcacctagaatatttaaggcaattccgaagagaatttctaacaaaagaacgattcatgaagccttctcagatataagatggatttttgatattgc

SEQ ID NO: 210819 - DNA, 1749 bp, Zea Mays
ttcctcttaatgaacatcaaagtcccaaaggatctgaggcaatgtttgctgatttatgctacttctctgttaaatctgttcagcttacctttgtgttccttgttctgccatgtcttctactgggatacctagggcaagctgcatttcttatggagaacttagataaaagtcagcaggtcttctttttgtccattccaagtcaggcattttggccagtggtattcatagctactctggcagcactaattgctagtcgtgcaatgacaactgctatattctcaactataaagcaggcaacagctctgggctgtttcccacgcctcaagattatccacacctctagaaagttcatgggccaaatatacatcccggtgatgaactggttcttgctggtttcttgtctggcatttgtcgcagtatttgggagcataaatgagattggaaatgcatatggcatagcagaacttggggtcatgatgatgaccactgtcctggtcaccattataatgcttctgatatggcaggtcaacatcgtcatagttctatgctttctcaacctctttctggggctggagttatttttcttttcctcagttttgggaagtgcagcagatggaagttgggtgcttttggtatttgcagctgtattgtatttggtaatgtacatatggaactatggaaccaaattgaagtacgaaactgaagtcaagcaaaaactttcaatggatttattgatacagctaggctgcaatcttggtacagtgagggcgcctggtattggattgctctataatgaactggtcaggggtgttcctgcaatctttggtcacttcctcactacactgccagccatgcattcgatgatcatttttgtctgcatcaaatgggtcccagttccagttgtgcctcagaatgaaaggttcctcttccgtcgtgtgtgcccaaagaactaccatatgttccgctgtattgctaggtatgggtataaggatgtacgcaaggagaaccaccaagcattcgaacagcttctgatagaaagccttgaaaagttcatacgccgagaggcccaggaacgctccctggaacgctccctggagagcgaccataatgacgacaaagactctgaagaggagattgcttcttcatcatcaagagttattgacgagtcaggcggtgctgacaactcagccctgggatcaagcatgtcgttggaggagggatcaagcatggacaacgagctatctttcatccacaaggccaaggagtcgggcgtggtgtaccttcttgggcacggagacatcagggcccggaaagagtcgttcttcgtcaagaagctggtgatcaactatttctatgctttcctgaggaggaactgcaggaggggcatcgcgacactgagcataccccacacgaggctgatgcaggtggggatgcaatacatggtttagggttgcctagctaccttttctttttctatttcaagatgattactaactcgcggcagtagatggtgagatgcaagcgagagagagagatgtctgaagatgattttcctttgatagaggcaacactaaccgatctggtgttttaccgaaaggttgtgaaaactgaacccaagtatgatcatatcatatacataacaaggaaaccccgttgtgtgtgaagcaaggtaacaagcctgctgctgctcacacatattcatcctaccctgatgtgcctggtggtttctgcttggctgcttgtgctgag

SEQ ID NO: 210820 - DNA, 2786 bp, Zea Mays
ctagaacatcggcaggcgcgcgcctcctcccctccacgcctcgattcggatgaaggcggagagcggtggcgttgtccgccggagtctgcagaagacggagtcggcggagatgcggtgggtggtcccggggggcgccaatgaggacgtggagatcgagagctccgacgacggcagcgtggacacctccgccaccgcctcgggctcacggggcggcgggtgctccgacgaagacgaaggttacgagaacgatgagatgctgcgccagcttctcgtgcgcacgggcccgcgcgccgactccttcgacgtcgaggcgctcgatgtccccggcgtgtaccgtcaccaggaatttaccttaggcagcagtattgtgctgactcttcagacactaggcgttgtctttggggacgttggtactagtccactgtatacctttgatgtaatgttcaacaaatactcaattactgcaaaggaggatgttctcggagctctctcacttgtaatatacactctcattctgataccatttctgaagtatacactgattgttttgtggggaaacgatggcggagaaggagggacatttgctttatactcattaatatgcagaaatgcaaaggcaagcctgcttcctaaccaattaccttctgatactcgtatagcaaatttcaatctgaaggtgccttcagtagagctcgagagatctttgaagatcaaggagcgacttgagacttcatctatgctaaaaaagctgcttttgatgcttgttctttttggtacttcgatggtaatagcagatggtgttgtcacatcagcaatgtcaggttcatgtctttctgatgcattgttcattgtatatttgctcttcacctacttgggtgatctgcacattttctttcctagtaacaagattctacaaaagcttcgcttatctataaataacccaatcttgtttctcatattgaaatctgcagttatgtctgctgttaatggcttgaaggttggaattgctagtgttaacgaaggtgaagtggtcatgataactgttgcatttcttattgttctgttcagtctgcaacggtttggaacaagcaaagtagggcttgctgttgggccagctttattcgtatggttttgctgccttgctgggataggaatgtataacctcagagtatatggtccagaagtactccaggcattcaatcctgtttatatctactattattttgaaagaaatcccactgaagcttggatgtccctggggggctgtcttttatgtgcaacaggatctgaggcaatgtttgctgatttatgctacttctctgttaaatctgttcagcttacctttgtgttccttgttctgccatgtcttctactgggatacctagggcaagctgcatttcttatggagaacttagataaaagtcagcaggtcttctttttgtccattccaagtcaggcattttggccagtggtattcatagctactctggcagcactaattgctagtcgtgcaatgacaactgctatattctcaactataaagcaggcaacagctctgggctgtttcccacgcctcaagattatccacacctctagaaagttcatgggccaaatatacatcccggtgatgaactggttcttgctggtttcttgtctggcatttgtcgcagtatttgggagcataaatgagattggaaatgcatatggcatagcagaacttggggtcatgatgatgaccactgtcctggtcaccattataatgcttctgatatggcagctaggctgcaatcttggtacagtgagggcgcctggtattggattgctctataatgaactggtcaggggtgttcctgcaatctttggtcacttcctcactacactgccagccatgcattcgatgatcatttttgtctgcatcaaatgggtcccagttccagttgtgcctcagaatgaaaggttcctcttccgtcgtgtgtgcccaaagaactaccatatgttccgctgtattgctaggtatgggtataaggatgtacgcaaggagaaccaccaagcattcgaacagcttctgatagaaagccttgaaaagttcatacgccgagaggcccaggaacgctccctggaacgctccctggagagcgaccataatgacgacaaagactctgaagaggagattgcttcttcatcatcaagagttattgacgagtcaggcggtgctgacaactcagccctgggatcaagcatgtcgttggaggagggatcaagcatggacaacgagctatctttcatccacaaggccaaggagtcgggcgtggtgtaccttcttgggcacggagacatcagggcccggaaagagtcgttcttcgtcaagaagctggtgatcaactatttctatgctttcctgaggaggaactgcaggaggggcatcgcgacactgagcataccccacacgaggctgatgcaggtggggatgcaatacatggtttagggttgcctagctaccttttctttttctatttcaagatgattactaactcgcggcagtagatggtgagatgcaagcgagagagagagatgtctgaagatgattttcctttgatagaggcaacactaaccgatctggtgttttaccgaaaggttgtgaaaactgaacccaagtatgatcatatcatatacataacaaggaaaccccgttgtgtgtgaagcaaggtaacaagcctgctgctgctcacacatattcatcctaccctgatgtgcctggtggtttctgcttggctgcttgtgctgag

SEQ ID NO: 210821 - DNA, 2843 bp, Zea Mays
cttcccattccctttttgcctattccaccccgccacacctctccgcggcaccggccgtagcactagaacatcggcaggcgcgcgcctcctcccctccacgcctcgattcggatgaaggcggagagcggtggcgttgtccgccggagtctgcagaagacggagtcggcggagatgcggtgggtggtcccggggggcgccaatgaggacgtggagatcgagagctccgacgacggcagcgtggacacctccgccaccgcctcgggctcacggggcggcgggtgctccgacgaagacgaaggttacgagaacgatgagatgctgcgccagcttctcgtgcgcacgggcccgcgcgccgactccttcgacgtcgaggcgctcgatgtccccggcgtgtaccgtcaccaggaatttaccttaggcagcagtattgtgctgactcttcagacactaggcgttgtctttggggacgttggtactagtccactgtatacctttgatgtaatgttcaacaaatactcaattactgcaaaggaggatgttctcggagctctctcacttgtaatatacactctcattctgataccatttctgaagtatacactgattgttttgtggggaaacgatggcggagaaggagggacatttgctttatactcattaatatgcagaaatgcaaaggcaagcctgcttcctaaccaattaccttctgatactcgtatagcaaatttcaatctgaaggtgccttcagtagagctcgagagatctttgaagatcaaggagcgacttgagacttcatctatgctaaaaaagctgcttttgatgcttgttctttttggtacttcgatggtaatagcagatggtgttgtcacatcagcaatgtcagttatgtctgctgttaatggcttgaaggttggaattgctagtgttaacgaaggtgaagtggtcatgataactgttgcatttcttattgttctgttcagtctgcaacggtttggaacaagcaaagtagggcttgctgttgggccagctttattcgtatggttttgctgccttgctgggataggaatgtataacctcagagtatatggtccagaagtactccaggcattcaatcctgtttatatctactattattttgaaagaaatcccactgaagcttggatgtccctggggggctgtcttttatgtgcaacaggatctgaggcaatgtttgctgatttatgctacttctctgttaaatctgttcagcttacctttgtgttccttgttctgccatgtcttctactgggatacctagggcaagctgcatttcttatggagaacttagataaaagtcagcaggtcttctttttgtccattccaagtcaggcattttggccagtggtattcatagctactctggcagcactaattgctagtcgtgcaatgacaactgctatattctcaactataaagcaggcaacagctctgggctgtttcccacgcctcaagattatccacacctctagaaagttcatgggccaaatatacatcccggtgatgaactggttcttgctggtttcttgtctggcatttgtcgcagtatttgggagcataaatgagattggaaatgcatatggtcaacatcgtcatagttctatgctttctcaacctctttctggggctggagttatttttcttttcctcagttttgggaagtgcagcagatggaagttgggtgcttttggtatttgcagctgtattgtatttggtaatgtacatatggaactatggaaccaaattgaagtacgaaactgaagtcaagcaaaaactttcaatggatttattgatacagctaggctgcaatcttggtacagtgagggcgcctggtattggattgctctataatgaactggtcaggggtgttcctgcaatctttggtcacttcctcactacactgccagccatgcattcgatgatcatttttgtctgcatcaaatgggtcccagttccagttgtgcctcagaatgaaaggttcctcttccgtcgtgtgtgcccaaagaactaccatatgttccgctgtattgctaggtatgggtataaggatgtacgcaaggagaaccaccaagcattcgaacagcttctgatagaaagccttgaaaagttcatacgccgagaggcccaggaacgctccctggaacgctccctggagagcgaccataatgacgacaaagactctgaagaggagattgcttcttcatcatcaagagttattgacgagtcaggcggtgctgacaactcagccctgggatcaagcatgtcgttggaggagggatcaagcatggacaacgagctatctttcatccacaaggccaaggagtcgggcgtggtgtaccttcttgggcacggagacatcagggcccggaaagagtcgttcttcgtcaagaagctggtgatcaactatttctatgctttcctgaggaggaactgcaggaggggcatcgcgacactgagcataccccacacgaggctgatgcaggtggggatgcaatacatggtttagggttgcctagctaccttttctttttctatttcaagatgattactaactcgcggcagtagatggtgagatgcaagcgagagagagagatgtctgaagatgattttcctttgatagaggcaacactaaccgatctggtgttttaccgaaaggttgtgaaaactgaacccaagtatgatcatatcatatacataacaaggaaaccccgttgtgtgtgaagcaaggtaacaagcctgctgctgctcacacatattcatcctaccctgatgtgcctggtggtttctgcttggctgcttgtgctgag

SEQ ID NO: 210822 - DNA, 2893 bp, Zea Mays
ttctcctctgcagtcccaactctcctttcttcccattccctttttgcctattccaccccgccacacctctccgcggcaccggccgtagcactagaacatcggcaggcgcgcgcctcctcccctccacgcctcgattcggatgaaggcggagagcggtggcgttgtccgccggagtctgcagaagacggagtcggcggagatgcggtgggtggtcccggggggcgccaatgaggacgtggagatcgagagctccgacgacggcagcgtggacacctccgccaccgcctcgggctcacggggcggcgggtgctccgacgaagacgaaggttacgagaacgatgagatgctgcgccagcttctcgtgcgcacgggcccgcgcgccgactccttcgacgtcgaggcgctcgatgtccccggcgtgtaccgtcaccaggaatttaccttaggcagcagtattgtgctgactcttcagacactaggcgttgtctttggggacgttggtactagtccactgtatacctttgatgtaatgttcaacaaatactcaattactgcaaaggaggatgttctcggagctctctcacttgtaatatacactctcattctgataccatttctgaagtatacactgattgttttgtggggaaacgatggcggagaaggagggacatttgctttatactcattaatatgcagaaatgcaaaggcaagcctgcttcctaaccaattaccttctgatactcgtatagcaaatttcaatctgaaggtgccttcagtagagctcgagagatctttgaagatcaaggagcgacttgagacttcatctatgctaaaaaagctgcttttgatgcttgttctttttggtacttcgatggtaatagcagatggtgttgtcacatcagcaatgtcagttatgtctgctgttaatggcttgaaggttggaattgctagtgttaacgaaggtgaagtggtcatgataactgttgcatttcttattgttctgttcagtctgcaacggtttggaacaagcaaagtagggcttgctgttgggccagctttattcgtatggttttgctgccttgctgggataggaatgtataacctcagagtatatggtccagaagtactccaggcattcaatcctgtttatatctactattattttgaaagaaatcccactgaagcttggatgtccctggggggctgtcttttatgtgcaacaggatctgaggcaatgtttgctgatttatgctacttctctgttaaatctgttcagggcaagctgcatttcttatggagaacttagataaaagtcagcaggtcttctttttgtccattccaagtcaggcattttggccagtggtattcatagctactctggcagcactaattgctagtcgtgcaatgacaactgctatattctcaactataaagcaggcaacagctctgggctgtttcccacgcctcaagattatccacacctctagaaagttcatgggccaaatatacatcccggtgatgaactggttcttgctggtttcttgtctggcatttgtcgcagtatttgggagcataaatgagattggaaatgcatatggcatagcagaacttggggtcatgatgatgaccactgtcctggtcaccattataatgcttctgatatggcaggtcaacatcgtcatagttctatgctttctcaacctctttctggggctggagttatttttcttttcctcagttttgggaagtgcagcagatggaagttgggtgcttttggtatttgcagctgtattgtatttggtaatgtacatatggaactatggaaccaaattgaagtacgaaactgaagtcaagcaaaaactttcaatggatttattgatacagctaggctgcaatcttggtacagtgagggcgcctggtattggattgctctataatgaactggtcaggggtgttcctgcaatctttggtcacttcctcactacactgccagccatgcattcgatgatcatttttgtctgcatcaaatgggtcccagttccagttgtgcctcagaatgaaaggttcctcttccgtcgtgtgtgcccaaagaactaccatatgttccgctgtattgctaggtatgggtataaggatgtacgcaaggagaaccaccaagcattcgaacagcttctgatagaaagccttgaaaagttcatacgccgagaggcccaggaacgctccctggaacgctccctggagagcgaccataatgacgacaaagactctgaagaggagattgcttcttcatcatcaagagttattgacgagtcaggcggtgctgacaactcagccctgggatcaagcatgtcgttggaggagggatcaagcatggacaacgagctatctttcatccacaaggccaaggagtcgggcgtggtgtaccttcttgggcacggagacatcagggcccggaaagagtcgttcttcgtcaagaagctggtgatcaactatttctatgctttcctgaggaggaactgcaggaggggcatcgcgacactgagcataccccacacgaggctgatgcaggtggggatgcaatacatggtttagggttgcctagctaccttttctttttctatttcaagatgattactaactcgcggcagtagatggtgagatgcaagcgagagagagagatgtctgaagatgattttcctttgatagaggcaacactaaccgatctggtgttttaccgaaaggttgtgaaaactgaacccaagtatgatcatatcatatacataacaaggaaaccccgttgtgtgtgaagcaaggtaacaagcctgctgctgctcacacatattcatcctaccctgatgtgcctggtggtttctgcttggctgcttgtgctgag

SEQ ID NO: 210823 - DNA, 2912 bp, Zea Mays
gttccgtttctcctctgcagtcccaactctcctttcttcccattccctttttgcctattccaccccgccacacctctccgcggcaccggccgtagcactagaacatcggcaggcgcgcgcctcctcccctccacgcctcgattcggatgaaggcggagagcggtggcgttgtccgccggagtctgcagaagacggagtcggcggagatgcggtgggtggtcccggggggcgccaatgaggacgtggagatcgagagctccgacgacggcagcgtggacacctccgccaccgcctcgggctcacggggcggcgggtgctccgacgaagacgaaggttacgagaacgatgagatgctgcgccagcttctcgtgcgcacgggcccgcgcgccgactccttcgacgtcgaggcgctcgatgtccccggcgtgtaccgtcaccaggaatttaccttaggcagcagtattgtgctgactcttcagacactaggcgttgtctttggggacgttggtactagtccactgtatacctttgatgtaatgttcaacaaatactcaattactgcaaaggaggatgttctcggagctctctcacttgtaatatacactctcattctgataccatttctgaagtatacactgattgttttgtggggaaacgatggcggagaaggagggacatttgctttatactcattaatatgcagaaatgcaaaggcaagcctgcttcctaaccaattaccttctgatactcgtatagcaaatttcaatctgaaggtgccttcagtagagctcgagagatctttgaagatcaaggagcgacttgagacttcatctatgctaaaaaagctgcttttgatgcttgttctttttggtacttcgatgttatgtctgctgttaatggcttgaaggttggaattgctagtgttaacgaaggtgaagtggtcatgataactgttgcatttcttattgttctgttcagtctgcaacggtttggaacaagcaaagtagggcttgctgttgggccagctttattcgtatggttttgctgccttgctgggataggaatgtataacctcagagtatatggtccagaagtactccaggcattcaatcctgtttatatctactattattttgaaagaaatcccactgaagcttggatgtccctggggggctgtcttttatgtgcaacaggatctgaggcaatgtttgctgatttatgctacttctctgttaaatctgttcagcttacctttgtgttccttgttctgccatgtcttctactgggatacctagggcaagctgcatttcttatggagaacttagataaaagtcagcaggtcttctttttgtccattccaagtcaggcattttggccagtggtattcatagctactctggcagcactaattgctagtcgtgcaatgacaactgctatattctcaactataaagcaggcaacagctctgggctgtttcccacgcctcaagattatccacacctctagaaagttcatgggccaaatatacatcccggtgatgaactggttcttgctggtttcttgtctggcatttgtcgcagtatttgggagcataaatgagattggaaatgcatatggcatagcagaacttggggtcatgatgatgaccactgtcctggtcaccattataatgcttctgatatggcaggtcaacatcgtcatagttctatgctttctcaacctctttctggggctggagttatttttcttttcctcagttttgggaagtgcagcagatggaagttgggtgcttttggtatttgcagctgtattgtatttggtaatgtacatatggaactatggaaccaaattgaagtacgaaactgaagtcaagcaaaaactttcaatggatttattgatacagctaggctgcaatcttggtacagtgagggcgcctggtattggattgctctataatgaactggtcaggggtgttcctgcaatctttggtcacttcctcactacactgccagccatgcattcgatgatcatttttgtctgcatcaaatgggtcccagttccagttgtgcctcagaatgaaaggttcctcttccgtcgtgtgtgcccaaagaactaccatatgttccgctgtattgctaggtatgggtataaggatgtacgcaaggagaaccaccaagcattcgaacagcttctgatagaaagccttgaaaagttcatacgccgagaggcccaggaacgctccctggaacgctccctggagagcgaccataatgacgacaaagactctgaagaggagattgcttcttcatcatcaagagttattgacgagtcaggcggtgctgacaactcagccctgggatcaagcatgtcgttggaggagggatcaagcatggacaacgagctatctttcatccacaaggccaaggagtcgggcgtggtgtaccttcttgggcacggagacatcagggcccggaaagagtcgttcttcgtcaagaagctggtgatcaactatttctatgctttcctgaggaggaactgcaggaggggcatcgcgacactgagcataccccacacgaggctgatgcaggtggggatgcaatacatggtttagggttgcctagctaccttttctttttctatttcaagatgattactaactcgcggcagtagatggtgagatgcaagcgagagagagagatgtctgaagatgattttcctttgatagaggcaacactaaccgatctggtgttttaccgaaaggttgtgaaaactgaacccaagtatgatcatatcatatacataacaaggaaaccccgttgtgtgtgaagcaaggtaacaagcctgctgctgctcacacatattcatcctaccctgatgtgcctggtggtttctgcttggctgcttgtgctgag

SEQ ID NO: 210824 - DNA, 2761 bp, Zea Mays
tcagttccgtttctcctctgcagtcccaactctcctttcttcccattccctttttgcctattccaccccgccacacctctccgcggcaccggccgtagcactagaacatcggcaggcgcgcgcctcctcccctccacgcctcgattcggatgaaggcggagagcggtggcgttgtccgccggagtctgcagaagacggagtcggcggagatgcggtgggtggtcccggggggcgccaatgaggacgtggagatcgagagctccgacgacggcagcgtggacacctccgccaccgcctcgggctcacggggcggcgggtgctccgacgaagacgaaggttacgagaacgatgagatgctgcgccagcttctcgtgcgcacgggcccgcgcgccgactccttcgacgtcgaggcgctcgatgtccccggcgtgtaccgtcaccaggaatttaccttaggcagcagtattgtgctgactcttcagacactaggcgttgtctttggggacgttggtactagtccactgtatacctttgatgtaatgttcaacaaatactcaattactgcaaaggaggatgttctcggagctctctcacttgtaatatacactctcattctgataccatttctgaagtatacactgattgttttgtggggaaacgatggcggagaaggagggacatttgctttatactcattaatatgcagaaatgcaaagagctcgagagatctttgaagatcaaggagcgacttgagacttcatctatgctaaaaaagctgcttttgatgcttgttctttttggtacttcgatggtaatagcagatggtgttgtcacatcagcaatgtcagttatgtctgctgttaatggcttgaaggttggaattgctagtgttaacgaaggtgaagtggtcatgataactgttgcatttcttattgttctgttcagtctgcaacggtttggaacaagcaaagtagggcttgctgttgggccagctttattcgtatggttttgctgccttgctgggataggaatgtataacctcagagtatatggtccagaagtactccaggcattcaatcctgtttatatctactattattttgaaagaaatcccactgaagcttggatgtccctggggggctgtcttttatgtgcaacaggatctgaggcaatgtttgctgatttatgctacttctctgttaaatctgttcagcttacctttgtgttccttgttctgccatgtcttctactgggatacctagggcaagctgcatttcttatggagaacttagataaaagtcagcaggtcttctttttgtccattccaagtcaggcattttggccagtggtattcatagctactctggcagcactaattgctagtcgtgcaatgacaactgctatattctcaactataaagcaggcaacagctctgggctgtttcccacgcctcaagattatccacacctctagaaagttcatgggccaaatatacatcccggtgatgaactggttcttgctggtttcttgtctggcatttgtcgcagtatttgggagcataaatgagattggaaatgcatatggcatagcagaacttggggtcatgatgatgaccactgtcctggtcaccattataatgcttctgatatggcagctgtattgtatttggtaatgtacatatggaactatggaaccaaattgaagtacgaaactgaagtcaagcaaaaactttcaatggatttattgatacagctaggctgcaatcttggtacagtgagggcgcctggtattggattgctctataatgaactggtcaggggtgttcctgcaatctttggtcacttcctcactacactgccagccatgcattcgatgatcatttttgtctgcatcaaatgggtcccagttccagttgtgcctcagaatgaaaggttcctcttccgtcgtgtgtgcccaaagaactaccatatgttccgctgtattgctaggtatgggtataaggatgtacgcaaggagaaccaccaagcattcgaacagcttctgatagaaagccttgaaaagttcatacgccgagaggcccaggaacgctccctggaacgctccctggagagcgaccataatgacgacaaagactctgaagaggagattgcttcttcatcatcaagagttattgacgagtcaggcggtgctgacaactcagccctgggatcaagcatgtcgttggaggagggatcaagcatggacaacgagctatctttcatccacaaggccaaggagtcgggcgtggtgtaccttcttgggcacggagacatcagggcccggaaagagtcgttcttcgtcaagaagctggtgatcaactatttctatgctttcctgaggaggaactgcaggaggggcatcgcgacactgagcataccccacacgaggctgatgcaggtggggatgcaatacatggtttagggttgcctagctaccttttctttttctatttcaagatgattactaactcgcggcagtagatggtgagatgcaagcgagagagagagatgtctgaagatgattttcctttgatagaggcaacactaaccgatctggtgttttaccgaaaggttgtgaaaactgaacccaagtatgatcatatcatatacataacaaggaaaccccgttgtgtgtgaagcaaggtaacaagcctgctgctgctcacacatattcatcctaccctgatgtgcctggtggtttctgcttggctgcttgtgctgag

SEQ ID NO: 210825 - DNA, 2946 bp, Zea Mays
gtttcagttccgtttctcctctgcagtcccaactctcctttcttcccattccctttttgcctattccaccccgccacacctctccgcggcaccggccgtagcactagaacatcggcaggcgcgcgcctcctcccctccacgcctcgattcggatgaaggcggagagcggtggcgttgtccgccggagtctgcagaagacggagtcggcggagatgcggtgggtggtcccggggggcgccaatgaggacgtggagatcgagagctccgacgacggcagcgtggacacctccgccaccgcctcgggctcacggggcggcgggtgctccgacgaagacgaaggttacgagaacgatgagatgctgcgccagcttctcgtgcgcacgggcccgcgcgccgactccttcgacgtcgaggcgctcgatgtccccggcgtgtaccgtcaccaggaatttaccttaggcagcagtattgtgctgactcttcagacactaggcgttgtctttggggacgttggtactagtccactgtatacctttgatgtaatgttcaacaaatactcaattactgcaaaggaggatgttctcggagctctctcacttgtaatatacactctcattctgataccatttctgaagtatacactgattgttttgtggggaaacgatggcggagaaggagggacatttgctttatactcattaatatgcagaaatgcaaaggcaagcctgcttcctaaccaattaccttctgatactcgtatagcaaatttcaatctgaaggtgccttcagtagagctcgagagatctttgaagatcaaggagcgacttgagacttcatctatgctaaaaaagctgcttttgatgcttgttctttttggtacttcgatggtaatagcagatggtgttgtcacatcagcaatgtcagttatgtctgctgttaatggcttgaaggttggaattgctagtgttaacgaaggtgaagtggtcatgataactgttgcatttcttattgttctgttcagtctgcaacggtttggaacaagcaaagtagggcttgctgttgggccagctttattcgtatggttttgctgccttgctgggataggaatgtataacctcagagtatatggtccagaagtactccaggcattcaatcctgtttatatctactattattttgaaagaaatcccactgaagcttggatgtccctggggggctgtcttttatgtgcaacaggatctgaggcaatgtttgctgatttatgctacttctctgttaaatctgttcagcttacctttgtgttccttgttctgccatgtcttctactgggatacctagggcaagctgcatttcttatggagaacttagataaaagtcagcaggtcttctttttgtccattccaagtcaggcattttggccagtggtattcatagctactctggcagcactaattgctagtcgtgcaatgacaactgctatattctcaactataaagcaggcaacagctctgggctgtttcccacgcctcaagattatccacacctctagaaagttcatgggccaaatatacatcccggtgatgaactggttcttgctggtttcttgtctggcatttgtcgcagtatttgggagcataaatgagattggaaatgcatatgaacttggggtcatgatgatgaccactgtcctggtcaccattataatgcttctgatatggcaggtcaacatcgtcatagttctatgctttctcaacctctttctggggctggagttatttttcttttcctcagttttgggaagtgcagcagatggaagttgggtgcttttggtatttgcagctgtattgtatttggtaatgtacatatggaactatggaaccaaattgaagtacgaaactgaagtcaagcaaaaactttcaatggatttattgatacagctaggctgcaatcttggtacagtgagggcgcctggtattggattgctctataatgaactggtcaggggtgttcctgcaatctttggtcacttcctcactacactgccagccatgcattcgatgatcatttttgtctgcatcaaatgggtcccagttccagttgtgcctcagaatgaaaggttcctcttccgtcgtgtgtgcccaaagaactaccatatgttccgctgtattgctaggtatgggtataaggatgtacgcaaggagaaccaccaagcattcgaacagcttctgatagaaagccttgaaaagttcatacgccgagaggcccaggaacgctccctggaacgctccctggagagcgaccataatgacgacaaagactctgaagaggagattgcttcttcatcatcaagagttattgacgagtcaggcggtgctgacaactcagccctgggatcaagcatgtcgttggaggagggatcaagcatggacaacgagctatctttcatccacaaggccaaggagtcgggcgtggtgtaccttcttgggcacggagacatcagggcccggaaagagtcgttcttcgtcaagaagctggtgatcaactatttctatgctttcctgaggaggaactgcaggaggggcatcgcgacactgagcataccccacacgaggctgatgcaggtggggatgcaatacatggtttagggttgcctagctaccttttctttttctatttcaagatgattactaactcgcggcagtagatggtgagatgcaagcgagagagagagatgtctgaagatgattttcctttgatagaggcaacactaaccgatctggtgttttaccgaaaggttgtgaaaactgaacccaagtatgatcatatcatatacataacaaggaaaccccgttgtgtgtgaagcaaggtaacaagcctgctgctgctcacacatattcatcctaccctgatgtgcctggtggtttctgcttggctgcttgtgctgag

SEQ ID NO: 210826 - DNA, 2853 bp, Zea Mays
tataacaaccaccaccagtgctatagttgcattgcatttccttgccactctctatttcccccagtgctagctctctctctctctctctctctcaaatactgcccatgcggcttgccctcctcgtttgatgaggccaatggccagcaatggcatggcgtccgcaccctcgcccttcttccctccaaacttcctcctccaaatgcagcagacaccctccgatcatgagcatcaagaacagcatcaccaccaccaccaccacaagcaccacctcgctgctcctccccttcatcctcaccacaaccccttcctcccctcttctcaatgcccctcgctccaggacttcagaggtatggcgccaataatgctggggaagcgtccgatgtacggggcggacgtgcaggtcgtcggaggcgaggaggtgaacggctgcggcggcgtgaacgaggacgagctgtcggacgacgggtcccaggccggcggggagaagaagcggcggctgaacgtggagcaggtgcggacgctggagaagaacttcgagctcgggaacaagctggagcccgagcgcaagctgcagctggcgcgcgcgctgggcctgcagccgcggcaggtggccatctggttccagaaccggcgggcgcggtggaagacgaagcagctggagaaggactacgacgcgctgaagcgccagctggacgccgtcaaggccgacaacgacgccctcctctcccacaacaagaagctccaagccgaggtctgtgtgtgatagcgtacacgcatgcgatccgatccgatcatctctcgtgctcgatcgtctcgatctctggcgcggcgtcctccgatcctcgccggcgccgggtagccactcgcggccgtcccggatctaggctagctgcgtgcgcttgccgggtgcgtcgcccctgcgtgcgcgaactgtgatccgcatccgcatcgcgatgttgatctgggcgtgggcgtgggtcggtcgtccatggctggcttcccagctcaatgattggtgggtggcggctcagcagcttagccgcacagcacagctcagctgggatccatgtgggtttcagtgcacgcagcagaaaaggttgttggatgcgtggccctcccggccctgggcgccgctgcctttttcacctgccttgactcatttgcctgcgcgcgtacacgtactatactaccaccgcctggccaggccctgccctgccctgcctgcctttgtggaatcttgctgctggagcaactgcaaaggcagagagagagagagagagagagagagagagagagagagcttttggaaaggtcagcagcagaatatgcaggcagagctgagtgacctgcgtcgagtcttgaacgaggaagatgctgctgctggcgcagtcaatggcttcatcatgcccgttcagatcccggtcctctcgtctcgtctctgtgcctcgtcacagaccatactacacactttctgtgcgccttagcttttagcttttctcgtcggatttgcactgcaaatgacgtgcgcattgtactacgtacgttgcacagcttttgccacagccagtactcgtatgattgggatccgagtgcttgcaaatgtactgcttccttcagtactcattgttttgttttttttttctacccgacgctacgatactcaagctgggacttgggaccatgccatgccgtgcagcagtaccatgaatctcgcatcaagcctgtactagcagctagtagctgctagctaggctagctgcagtgaaccagtgctcactgattagacgatcatctctccggaactcgattgacatcaacacagacaatgccccattgatataatatgccgcattgtgtgcatttacgcttacagccaaaaactgatcggttccgatgcagatactgtctctgaagggcagggaggcagggggctcgtcggagctgatcaacctcaacaaggagacggaggcgtcctgcagcaaccgcagcgagaacagctccgagatcaacctcgacatctcgcgcgcgccggcgtccgaggcccccctggaccccacaccgccgcccggcgccggcggcggcggcatgatccctttctacccgccttccgtcggcggccgtcctgcttctgctgctggcgtggacatcgaccagctcctgcacacctccgcccccaagctggagcagcacggcagcggcggcgccgtcgtcgtccaggccgcggaaaccgccagcttcggcaacctcctgtgcggcgtcgacgagccgccgccgttctggccgtgggccgaccaccagcacttccactgatagatcgcctcctcttgtccccgccacaagaaataataattctcaatgccacaattgcgatcaacgttcgatgcagccagatggaacagcggaggatcgattcttggcgagtggagcagcgagggagagagagagagagagagagcgagtaagcaaggttgtgtatgatctgatcgatcggcgaggtcgtagctgcgagatatgcgatggagctagtagctgatcatggtggaaagtggggtttgtaagcgcaataagcggagatgcggtgtaatttaattaggtaggttttggtttgagttttgatagtatctttatttttgcgtcttcattttttttttggtcttcgcgttttgttcgcttttttttttgttcacacatatataaatttgtgaattgtgatgaagcggtgttgcaagtttgttttttttttctcttttagcatcagcaaagcgtcgtgttactctatttatttctctaaaaaattggagtgggttgtttctcgacatgtgaccaatgatgcagtttcagacaatgtctccg

SEQ ID NO: 210827 - DNA, 1798 bp, Zea Mays
atttggcccaaaactaacttgcaaaattggccgtatcaggccctacgcgtctaccgcaagtagggccaaggacgacaaagaagaaacgaatccgaaacctctccaagaatccatcgcagccgccatcatgtccgccgccggtggccgaacccttggccggagcagcttctcccgcgccacatctaaactggtggcgtcctcatccggctctgctggcgttaagattggcccgaacggtgcttctttcgtctcctcgggcattcccgacctcgacaggattttgggtggtggattccttcttggctcagttgtaatgatcatggaggacactgatgcgccacaccacctcttgcttcttcggtgcttcatgtctcagggtgttgtgcacaaacaacccctgctcttttcaggagctatgaaagagcctgtgttgttccttggtacactacctgctccagtttcatcttcaaaggaggatggacgacacagagcaatgggtcctgcagcaagtagtgatggacgagcaaatgatgagggtttgaggatagcttggcagtacaagaaatactttggggatgacaagacttcgcgagctgaacataaagacaataaacaggaattcagcaatgattttgatttgaggaagcccttggaaaggcatttacttaatggacagaatattgaatgtgtaagcactcaagatgctgacacactcagcagcctccaggattgttgttctgctttcgtatccaagcttccaaggtgagaaaagatggtgggagttcaactgctgggagaattgctatacaatcactctgtgcaccgcagtgcagatactttgaaaaggactgggacatggtctcatttatcagatcactgaaggccatggtgcgctcatctaactctgttgctgttgtaacatttccgagtacagttctgtcaaattcgttctgtaagagatggcagcacctggcggatacactgctgtccatcaaagcaattccagatgaggacaaagacttggcaaaactcctcacaggatatcaagatatggttggttttttgcatgtccacaaggtggcacaacctaacagtcaggtccctgtgatcttagaggcatccacgctctctctaaagctgcgaaagaggaggtccctggtcttagaacggttgaatcaggctccagtcgatgggtcaagtgggccttcgtctgctgcatcaagcagttgctcatcgcaaggttcacagcttgatttctaattggtatggctggatttccttgagaggagctcagaagtgctgtgtactagttactcgtggcagaatgcagcttttggaggtttaggttttagataggagtcagtttgatggttcactgttaaccatcctccctcatgtaaccccactttcaacagtattagaaccgtcgaaacttgtatatttttcgggtagttgtccaagtttgttgaactgccttgaacaggttacaaaagtgtggggttttcttgttttgtctgttccaaatgatcatgttttttgcgtagaacggaaatggttgagttgctgatgcaactgaagaattgttggtcttcacgaagatggagctctgtcagacaatgcagcaatcttgctatgttaatgtcaaagatgcagaaggcaattgtaacaacgggaagtagatttttgtaatactggcatcggcattcttgagcttcatggaaatggcagcgccaagcacacaattgcatttgtggcattataatgccgagcgctctgaagaaatggcaacgtcctccgc

SEQ ID NO: 210828 - DNA, 1213 bp, Zea Mays
cgggaagcctacgacactggacaataaacaggaattcagcaatgattttgatttgaggaagcccttggaaaggcatttacttaatggacagaatattgaatgtgtaagcactcaagatgctgacacactcagcagcctccaggattgttgttctgctttcgtatccaagcttccaaggtgagaaaagatggtgggagttcaactgctgggagaattgctatacaatcactctgtgcaccgcagtgcagatactttgaaaaggactgggacatggtctcatttatcagatcactgaaggccatggtgcgctcatctaactctgttgctgttgtaacatttccgagtacagttctgtcaaattcgttctgtaagagatggcagcacctggcggatacactgctgtccatcaaagcaattccagatgaggacaaagacttggcaaaactcctcacaggatatcaagatatggttggttttttgcatgtccacaaggtggcacaacctaacagtcaggtccctgtgatcttagaggcatccacgctctctctaaagctgcgaaagaggaggtccctggtcttagaacggttgaatcaggctccagtcgatgggtcaagtgggccttcgtctgctgcatcaagcagttgctcatcgcaaggttcacagcttgatttctaattggtatggctggatttccttgagaggagctcagaagtgctgtgtactagttactcgtggcagaatgcagcttttggaggtttaggttttagataggagtcagtttgatggttcactgttaaccatcctccctcatgtaaccccactttcaacagtattagaaccgtcgaaacttgtatatttttcgggtagttgtccaagtttgttgaactgccttgaacaggttacaaaagtgtggggttttcttgttttgtctgttccaaatgatcatgttttttgcgtagaacggaaatggttgagttgctgatgcaactgaagaattgttggtcttcacgaagatggagctctgtcagacaatgcagcaatcttgctatgttaatgtcaaagatgcagaaggcaattgtaacaacgggaagtagatttttgtaatactggcatcggcattcttgagcttcatggaaatggcagcgccaagcacacaattgcatttgtggcattataatgccgagcgctctgaagaaatggcaacgtcctccgc

SEQ ID NO: 210829 - DNA, 1208 bp, Zea Mays
cgggaagcctacgacactggacaataaacaggaattcagcaatgattttgatttgaggaagcccttggaaaggcatttacttaatggacagaatattgaatgtgtaagcactcaagatgctgacacactcagcagcctccaggattgttgttctgctttcgtatccaagcttccaagaaaagatggtgggagttcaactgctgggagaattgctatacaatcactctgtgcaccgcagtgcagatactttgaaaaggactgggacatggtctcatttatcagatcactgaaggccatggtgcgctcatctaactctgttgctgttgtaacatttccgagtacagttctgtcaaattcgttctgtaagagatggcagcacctggcggatacactgctgtccatcaaagcaattccagatgaggacaaagacttggcaaaactcctcacaggatatcaagatatggttggttttttgcatgtccacaaggtggcacaacctaacagtcaggtccctgtgatcttagaggcatccacgctctctctaaagctgcgaaagaggaggtccctggtcttagaacggttgaatcaggctccagtcgatgggtcaagtgggccttcgtctgctgcatcaagcagttgctcatcgcaaggttcacagcttgatttctaattggtatggctggatttccttgagaggagctcagaagtgctgtgtactagttactcgtggcagaatgcagcttttggaggtttaggttttagataggagtcagtttgatggttcactgttaaccatcctccctcatgtaaccccactttcaacagtattagaaccgtcgaaacttgtatatttttcgggtagttgtccaagtttgttgaactgccttgaacaggttacaaaagtgtggggttttcttgttttgtctgttccaaatgatcatgttttttgcgtagaacggaaatggttgagttgctgatgcaactgaagaattgttggtcttcacgaagatggagctctgtcagacaatgcagcaatcttgctatgttaatgtcaaagatgcagaaggcaattgtaacaacgggaagtagatttttgtaatactggcatcggcattcttgagcttcatggaaatggcagcgccaagcacacaattgcatttgtggcattataatgccgagcgctctgaagaaatggcaacgtcctccgc

SEQ ID NO: 210830 - DNA, 5814 bp, Zea Mays
ccccgcgtcgctcgcagcagccccgccccgacaaatcccccattcccaaatcccccctgccccccgccgaaatcaacgccgccggctccgcatcctcgacccgctcccgcctccgttcggctgccgtacggaatctcaggtaccccgtcgccgaggccgccccctgtctctcgcggccccgccgggattctagggtttcggtcgggccggcccaagggagtctgcaaacagcgcgggtcaggctcccccgcgccgatcgccgcgagctgcccccgcgcgggcggccgtgggcaccgcttccactcgctagccttcctggtacatgcggccgctgccacactggtgctcctgctcaatcgggaagccccgcgcctcggattccgtgcagggtagacaatttcctgctaccgcgctgctgcgtgtgggatgacctgagcctccgcctgccgccaagatgaatgtggggcaggctgcccacctgtccgggcagatgtctgggcagacagcgcagatgaatcaggtccctgccaccggtgtcggcattggcgttggcactgccgatgggctaccgcagcaccagccaatgcaggagatggcggcgttctcgggaacggaccagcagtttgtcatgtttcggaccacaatgcgcgaaaagatatttaactatataggaaggaaacagtcatcggctgagtggcggaagcggttgccagaactggcaaagcgacttgaggagatcttgtacagaaaattcccaaacaagactgactactacaatatgatgaagggaccagttgagccgcaattgcagtttgctattaagaccttgagcgctcagaaccaacacaatcaacaaaacccacaaatggcaaggcaaatagcatcatcctctagctatggtactatgattcctacccctggtatgacgcaaggcaccaatgcaagttctaggattccttatgtcacagaaaacaatggcctttcatcgtctggtgcaggcatggttcctcagaatgctaacatgggtgcctcgatgcaaggtccaatgtctaatggcttccaacatttaaatgccagcattccacaaaattctaccacaaataacatacaatctacaatgggttcagttggtgtccagcgacaactacctcatatgattccaactccaggatttagtaatcaacagaatgtaccttcaaatcctgactattcaaatggaactggatatttcaatggtgagccagctgtggcatcacatatgcagcaccagaaccaatttcctagcaaccaaattcagcatattgggggccacaataattctggaatacattcaagcatgctggacagctcatctgcatacggtttatcagatggacacatgaatggtggaataggagtgcatgggtcaaatatgcagctaacaaacaggaccacggcaccacaaacatatatgaacatatccccttacggcaattcgtccaaaccgatgcagcagcaattcaatcagcatcctcagcagagaataccaacatcagttgaaatgactggttctggcagcttctatgctactggctctacccctttaaccacagcaaatagtcagagcatgaatgttgcaaatttgcagtctagatcaagaatgaatcagatgttggtttccaatcagttaaacattcagtccattcagcaacagccccagataaaaaatgaggttttggatcaaacagaaaaggtgaattttcagtcaccacagttgactcatgatcaactactacgccaacacccaatgccgcaacatcaggtgcaacctaattcccagtttgttcaaaatcagtatcatataaatcaacagcagccaaattcacagcatcagcaggctatgctaaggaacaattcctttaaacagtctcaaatggcttccacccattcaatgcaactggcagaacaggggtcactgctacacactgaactggtatcttcacaaactagtgatcctgctgatcttccaagcttccagggtcaataccagcaaagaaatgctcttgacaatgttaaaggagggcagatgcttggtcatctatctagctctcaaaattttcatccttctgtctcacatggttctcagcaattgttgccctctaaccagcagcttgatgacggttctaatgctgtaagctatgtgctgaaaggatcgcaggcagagcaaatgctgcgtcctcaatggcagccacaaacaatggaaaaggctcctgttactactaattcaacactcgaaaagcaaatacaagaagatttttgtcaaagagcaatgtcgcaagatggagcacagcaaccattttcatcagattggcgtctttctaattgcactgcagcttctattgatcctgcattgccgaagcctgcagctggagggtttgaacaggtcaatggaaatatacattacctccgtcagataaagtggttgctgctactgtttcatgcaaaaacatgcacataccctgttggaagttgtaagttccatggttgtgttcaggtgcaggagcttttgaagcattttcagaactgccaaagtaaagattgttcatacaggagctgcagtaagtcaaaaatgatgtctcaccattataaaacttgtgtcgatgaacaatgtcctgtgtgcagcgttgtaaggaagtttttgcgccaatcaactgaacaggcatctaagcaaaaagctctcgagtctagaaaacttgctcaacaaaatgtgcctcagagaatcatgaacgggatagaaggtgatagaatggatgttgacccaatgtcagttgaagcatttgatgatcaaccattcgttccaaaacgcttgaagacgcatcctccatcacccagtggcctagagaatgatatctctgtagtctccaattatcatgtaaactcaggctttgcattgcaggaaacacagcctgagcagcttgaccacaataacaggacatcatatctgaaacgagaggtagatgcaaaggctgacatgcgagctcctcaaaagcccataaaaattagttatggtattgatggaaatgtgactgcatcaaggcataatgtgattcctggtgttcccagtgagattaattctcatatcaagcaagaaaacttgttggttgacaaagagacaagtgaaaccgcccttgaggttaagaatgaaacaaatgatccaactgatgcgactgtgtctaaatcaggaaaaccaaaaataaaaggtgtttcaatgacggaattattcactccagaacaaataatggaacatattgacagtctaaggctgtgggttggtcagagcaaggctaaagctgaaaagaatcaagctattggtcattctgagaacgagaactcttgccagctctgtagagtagagaaacttacttttgaacctccaccaatatattgttctccttgtggagctcggataaagcgaaacgcgccatactacactgtgggtactggtgatacacgtcattatttctgtatcccttgttacaatgagtctcgtggtgagactattgaggttgaaggtcaaacatttccgaaggcaaggttagagaaaaaaagaaatgatgaggaaacggaagaatggtgggttcaatgtgacaaatgtgaatgttggcaacatcaaatttgtgctttatttaatggaagaaggaacgatggaggacaagctgaatatacttgccccaattgctatgttgaggaggtcaaatgtgggctacgcaaacctttaccacagagtgctgttcttggggcaaaagatttgccgagaactgttcttagtgatcatatagaagatcggctatttaaacgacttaagcaggagaaacaggaccgtgcagctgctgctggcaaaaatattgatgagattcctggagcggaaggacttgttgtcagagttgtttcatcagtggataagaagctggaggttaaaccacgttttttagaaatttttcaagaagacaactaccctacagagttcccttacaagtccaaggctgttctcttgttccagaaaatagaaggtgtggaagtatgtctatttggaatgtatgttcaagaatttggtgctgaatgctctttcccgaaccagcgtcgtgtttatttgtcatacttggattctgttaagtacttcagacctgagattaaaacagtatctggagaagccttgcgtacatttgtgtatcatgaaattctgataggatatcttgaatactgtaaactgcggggattcacaagttgttacatatgggcttgtccacctttgaagggtgaagattacatcttatattgccatcctgagattcaaaagactccgaaatctgataaactgcgtgagtggtatctatctatgcttcggaaagcttctaaggaggaaattgttgttgagctcacaaatctatatgaccatttcttccttactatgggggaatgcaaggctaaggtgactgcttctcgcttgccatatttcgatggagattattggccaggagctgcagaagatatgatcaatcaactccgacaagaagaagacgaccgcaaactccagaaaaagagtaaaacaaagaagattattacaaaaagagctcttaaagctgctggccacaccgatctcagcgggaatgcttccaaggatgctatgttgatgcaaaagcttggtgaaaccatatatcctatgaaggaagatttcattatggtccatttacagtattcgtgtagtcactgttgtacccttatggtgtctggaagacgttgggtttgtcatcaatgcagaagcttttacatctgcgacaagtgttatgatgcagaacagcaacttgacgacagggagaggcacccgagtaataatagagacacacatatgctccatccggttgatattcttggggtgcccaaagataccaaagatagagatgacatcttggaaagtgagttctttgacaccagacaggcattccttagtctttgccaaggaaatcattatcagtatgacacacttcgacgcgcaaagcattcatcaatgatggtgttgtaccacctacacaatccaactgcaccagcatttgtcactacgtgcaatgtctgcagtcatgatattgaaactggtcaaggctggcggtgcgagatttgtccagattttgatgtgtgcaactcttgtttccaaaaaggagtggttactcatcctcacaagttaacgaaccatccatcagctgctgaccgtgatgctcaaaacgcagaagctcggcaaatgcgtgtccagcagctaagaaagatgcttgatcttctggtacatgcgtcgacatgccgctctggtagttgccagtatcccaactgccgaaaagtcaaggggctattccgtcatgggatgcagtgcaaaacgcgtgcttcaggagggtgtgtcctttgcaagaaaatgtggtacatgcttcaactccatgcccgagcttgcaaggattcagactgcaatgtgccgcggtgcagggatctgaaggagcatcttagaaggttgcaacagcagtctgattccaggaggagggctgctgtgaatgaaatgatgaggcaaagagcggcggaggtcgctgcaaacgaatagttgcctctgtacagcactgttgctccatagattttctttctagtgcgggtggcacaggagggcgacaagttgtggtatgtatactcttctgctatcagtttttctggtttttttgacgaaacgaatggattttggttcggtcgtccggaggatggaggatgcagttgaaagggatgtgttgatcctgtttgtattag

SEQ ID NO: 210831 - DNA, 1593 bp, Zea Mays
ccaaggagtctgtctcgtgctcctcgtagtcttcctacccacccctccacccccccccccccccctttgcccccaatccctagccctgcccctctcctccagcgccgcgcgccggctctatgcgcccgccgcccccggagatgcatatcacacgccgccgttaccgctgggtgaaggagtgggtcccgcaagatctggtcgtcaccggaggcccctgcacgctctacaagtgggtgcgagaggatagactggcagctttgaaggctaaggataaggagcagggggcagcatctgcaatgcctgaaccaaactctgaggttctcttcctgtgcagctacgaaggatgtgggaagacatttttttgatgtaggggctcttaagaagcacgctcatgtccatggggagaggcaatatatctgccactatgagaactgtggcaagaaattcttagatagctctaagttgaagagacattttcttatccatactggagagaagaattttgtgtgcccacatgaaggttgtgggagggcattttcgttggattttaatttaaaggcacacatgaaaacacattctgcagataactatcatgtgtgccagtacccagaatgtggccgaagatttacacaagaatcaaaactgagagctcatatcagggcacaacatgagaaagctgttggcttgcagaatccaggtgcgtcatcaatgaaccacagtgcaattggaggtccgcaccagccccctaggccagcgaaggtctcagcagcacctccagctccctcagctgagcgcccttacgtctgcccctacgatggttgtgacaaggcatacatccatgagtacaagttgaacctccatctgaaaaaagagcatcccaaccactaccaggatggtggtccaaatggtgctgccgccccttcaaagcgcagcatctcgaagagttcccacaggagcaagctggacatcacctctaggatgccaccggccaacatccccaagcacagagggtatgcaacaccattgccagctgtggtgagcctccctgaggagcagcagttgctaaggaaagtggtgtacgaggatgacagcgaggagactgaagaagagggggataacaatggcgaggacagatggaactacaagagagctgctagcagcgacgacgaggaaaccgaagacgaagaatgagctgctagcagggattcatttttttttcttctgtagctgtgcatataccataatctatagactggtggttatagatttcaatacatgtacatttttaaaatacggctggcctatagtagacaagaggttgttgctgccatgccccttctcaactacacaggccatgagttcagaaaggataatggatcattgctcccgtctgcctgtgtttgtgccttttggtttgttgtcataaatgagttctcagttatcgtagccctgattgagtggatgtcaacagatctcgtcaaccgtacatttgtatgagcatgccatgtttactttgagaaatttatgcatccaccggtttcagaatatggaagtgtgcgatagtgtgttcatggaagacaaaggtggtttgag

SEQ ID NO: 210832 - DNA, 1434 bp, Zea Mays
tttgcccccaatccctagccctgcccctctcctccagcgccgcgcgccggctctatgcgcccgccgcccccggagatgcatatcacacgccgccgttaccgctgggtgaaggagtgggtcccgcaagatctggtcgtcaccggaggcccctgcacgctctacaagtgggtgcgagctacgaaggatgtgggaagacatttttttgatgtaggggctcttaagaagcacgctcatgtccatggggagaggcaatatatctgccactatgagaactgtggcaagaaattcttagatagctctaagttgaagagacattttcttatccatactggagagaagaattttgtgtgcccacatgaaggttgtgggagggcattttcgttggattttaatttaaaggcacacatgaaaacacattctgcagataactatcatgtgtgccagtacccagaatgtggccgaagatttacacaagaatcaaaactgagagctcatatcagggcacaacatgagaaagctgttggcttgcagaatccaggtgcgtcatcaatgaaccacagtgcaattggaggtccgcaccagccccctaggccagcgaaggtctcagcagcacctccagctccctcagctgagcgcccttacgtctgcccctacgatggttgtgacaaggcatacatccatgagtacaagttgaacctccatctgaaaaaagagcatcccaaccactaccaggatggtggtccaaatggtgctgccgccccttcaaagcgcagcatctcgaagagttcccacaggagcaagctggacatcacctctaggatgccaccggccaacatccccaagcacagagggtatgcaacaccattgccagctgtggtgagcctccctgaggagcagcagttgctaaggaaagtggtgtacgaggatgacagcgaggagactgaagaagagggggataacaatggcgaggacagatggaactacaagagagctgctagcagcgacgacgaggaaaccgaagacgaagaatgagctgctagcagggattcatttttttttcttctgtagctgtgcatataccataatctatagactggtggttatagatttcaatacatgtacatttttaaaatacggctggcctatagtagacaagaggttgttgctgccatgccccttctcaactacacaggccatgagttcagaaaggataatggatcattgctcccgtctgcctgtgtttgtgccttttggtttgttgtcataaatgagttctcagttatcgtagccctgattgagtggatgtcaacagatctcgtcaaccgtacatttgtatgagcatgccatgtttactttgagaaatttatgcatccaccggtttcagaatatggaagtgtgcgatagtgtgttcatggaagacaaaggtggtttgag

SEQ ID NO: 210833 - DNA, 2087 bp, Zea Mays
ctcggtcgcgtctccctccctcgtgtcacccacccattttcgtcggcctcctcttccccccgcctcgccagcccgaattaggagctacgacgaatctaccgggccgagctcgccagctggcctccccgagggcgaggccctatcggctgccgttcccccattgacagggagctcagccccgccaccgccgcggctgcggcgtgtggacgtaaccggagctcctcgcagccgctgataagatccgaagggttcctaggctttttgtggcgggaggcgactggttccgtcgggtggtccggtgagcatggcggggcccaagtttgggtcgttcaaggcagaaaagggggactcagcggcggctgcaggcgcggcggcgcagaggagggacccatacgaggtgctcggggtggggcgtaatgctactgagcaggagatcaagagtgccttccgccgcatggcactcaagtaccatccagataagaattcagacgaccctgttgcctcagagaagtttcaagaggccacattctcctataatatcctgtcagatccagacaagaggcgccagtatgacgcatcagggtttgaggccattgaagcagatagtcaggaactggagctggacctatcaagtctcaatactgtaaatacagtgtttgctgctctgtttagcaaactaggtgttccaatcaagaccactgtctcggcaacagttttagaggaggcattgaacgggtcagtagagatttctcagcttcagctgggcaaatctctatgtaggaagaaaagcagtcagctcacttttattctgtggacataacagataaagaagccaaaatgggcttagtttgtagagttcattcaacttctaaaagtaaatttaagttgctgtattttgagcttgaggacaatggtggattaagccttgctttacaggaagatagtgcaaaaactggaaaagttacttctgcgggcatgttctttctaggctttcctgtgtatcggtttgaacaaaataattcagctgctgctgcgaaggatcctgacagtgctttctttaaaagattggatggctttcaaccttgtgaagtaaatgaactgaaagcaggaagccattattttgctgtatatggtgacaatttctttaaaagtgcaagctatactattgaggttgtatctgctgaacccttctctgctcaaaaagagaagctacgaagtgtggaggcaaagataattgcaaaacgatctgagctgtctaaatttgagtctgagtatcgcgaggttttggcaaagtttactgagatgactagcagatatgctcaagaaatgcaaacgattgatgaccttctaaaggaaaggaatgcaattcatgcatcctataccaacaacccaactctgcagcggagttccagtagcagcaaagggaaatcaccctctaaagggtccagaagtgaggatgaccaaactgtaaagaaggaaaagaaatccaagagccagccaatggagggatccaaaagcgatgatgagggtcccgaaaacaaaaaggaagaaacgcctaaagatcggattcgaaggaagaagtggttcaacattcatttgaaagtggacaagagaaggccctgctgataactgcgatatatcatgtactcctcaagatctctgctccaagtacaaggaaaaaattcccatttgacgtccaggaagatgcatcttgtcgatcattcccatgatcaagcccattctatttcctgaaaagtcaggaacctcgccagcttcaaaaatggtgtatgtaccacttagttttggacccctagtcggatactgttgtatttatatcaagttggacggttatgtacaatagataccttaatagtgtgatgtccagaatggcagaatccaattcagatttgttcaatttgtttgatgttgtccgtgtcaaactttactacccaacttgactcagccatccgatctgaactactgatcctgtattccatgaggcaatctagcaatgtgcgatgctggttaaaacttgtgcgtcgtacttcatgaaggaacaaggtttcgatgattcttgctgtttcaaa

SEQ ID NO: 210834 - DNA, 3874 bp, Zea Mays
ctcctttccccctgccttgcctggagcctgccccatcctctccctccctctctctctctctctctcttgatcggttccagttaacactcgcagcctccccttctcgagtcgccagtggccacgccgggacgggcgcgcttttcccctgccgcgccaaagcaggaaacaaagcaacggccaggaaggagtcacgcgcgaggcgaaaagcgggcgggtggaagaagcgtgggcgcctgggttaacgctcccgcagcgagtgatctgagagcggtagaggccggccggaaccgcggaagaggagaggccgggggatccgacgatggcggggaacgagtggatcaatgggtacctggaggcgatcctcgacagccgcacctcgtcgggcggcggcggaggcggcggcggcggggacccaaggtcgccggtggcgggggcgtcgccgacgaagggggcgagcccccgcggcccgcacatgaacttcaacccctcgcactacttcgtcgaggaggtggtcaagggcgtcgacgagagcgacctccaccggacgtggatcaaggtcgtagccacgcgcaacgcccgggagcgcagcaccaggctcgagaacatgtgctggcggatctggcacctcgcgcgcaagaagaaacagctggagttggagggcatccagagaatctcggcacgccggaaggaacaggagcaggtgcgtcgtgaggcgacggaggacctggccgacgatctgtcagaaggcgagaaaggggacaccctcgctgagcttgtgccggttgaggcggccaagaagaagttccagaggaacttctctgaccttaccgtctggtctgacgacaataatgagaagaagctttacattgtgctcatcagtgttcatggtcttgttcgtggcgaaaacatggaactaggtcgtgattctgacaccggtggccaggtgaaatatgttgtcgaacttgcaagagcaatgtcaatgatgcctggagtgtacagggtggacctcttcactcgtcaagtgtcatctcctgacgtggactggagctatggtgagccgaccgagatgttatgctccggttccaacgatggagaggggatgggtgagagtgccggagcctacattgtgcgcataccgtgtggaccacgggataaatacctcaagaaggaagcactgtggccttacctccaagagtttgtcgatggagctcttgcgcatatccttaacatgtccaaggctctgggagaacaggttggaaatgggaggccagtactgccttacgtgatacatggacactatgccgacgctggagatgttgctgctctcctttccggtgcgctcaatgtacccatggtgctcactggtcactcacttgggaggaacaagctggagcaactcctgaagcaagggcgcatgtccaaggaggagatcgattcaacatacaagatcatgaggcgtatcgagggtgaggagctggccctggatgcgtcagagcttgtcatcaccagcacaaggcaggagattgatgaacagtggggattgtacgacggatttgatgtcaagcttgagaaagtgttgagggcacgggcgaggcgtggggttagctgccatggtcgtttcatgcctaggatggtggtgattcctccaggaatggatttcagcaatgttgtggttcatgaagacattgatggggatggtgacagcaaagatgatatcgttggtttggagggtgcttcaccgaagtcaatgcccccaatttgggccgaggtgatgcggttcctaaccaatcctcacaagccgatgatcctggcgctgtcgaggccagacccgaagaagaacatcactaccctcgtcaaagcctttggagagtgccccccactcagggaacttgcaaaccttactctaatcatgggaaacagagatgacatcgacgatatgtctgctggcaatgccagtgtcctcaccacagttctgaagctgatagacaagtatgatctgtatggaagcgtagcgtttcctaagcatcacaatcaggctgatgtcccggagatctaccgcctcgcggccaaaatgaagggtgtcttcatcaaccctgctctcgttgagccgttcggtctcaccctgatcgaggctgcagcacacggacttccaatagtcgctaccaagaatggtggtccggtcgacattacaactgcactgagcaacggactgctcgttgacccgcacgaccagaacgccatcgctcaagcactgctgaagctcgtagcagataagaacctgtggcaggaatgccggagaaacgggctgcgaaacatccacctttactcatggccggagcactgccgcacttacctcaccagggttgctgggtgccggttaaggaacccgaggtggctgaaggacacaccagcagatgccggagctgatgaggaggagttcctggaggattccatggacgctcaggacctgtcactccgtctgtccatcgacggtgagaagagctcgctgaacaccaacgacccattgtcgtcggacccgcaggatcaggtgcagaagatcatgaacaagatcaatcagtcgtcagcacttccgccgtccatgtcctcagtcgcagacggtgccaagaacgcaaccgaggccacgggcagcaccttgaacaagtacccactcctgcgccggcgccggcgcctgttcgtcatcgccgtggactgctaccaagacgacggccgtgctagcaagaagatgctgcaggtgatccaggaagttttcagagcagtccgatcggactcccagatgtccaagatctcagggttcgcgctgtccactgcgatgccgttgtccgaaacactccagcttctgcagctcggcaagatcccagcgaccgacttcgacaccctcatctgtggcagtggcagcgaggtctactatcctggcacagtgaactgcgtcgacgctgaaggaaagctgcgcccagaccaggactatctgatgcacatcagccaccgctggtcccatgacggcgcgaagcagaccatagcgaagctcatggccactcaggacggttcaggcgacactgtcgagctggacccggcgtctagtaatgcacactgcttcacgttccttatcaaagatcccaaaaaggtgaaaacggtcgatgagatgagggagaggctgaggatgcgtggtctccggtgccacatcatgtactgcaggaactcgacaaggcttcaggttgtccctctgctagcatcaaggtcacaggcactcaggtatctttttgtgcgctggggcctatatgtggggaacatgtatctgatcactggggaacatggcgacaccgatcatgaggagatgctatctggattacacaagactgtgatcgtccggggtgtcaccgagaaaggttcggaagggctgctgaggagcccaggaagctacaagaaggacgacgtcgtgccgtctgagacccccttggctgcgtacacgactggtgagatgaaggccgatgagatcatgcgagctctgaaacaagtctccaagacttccagcggcatgtgaattagctgctgggaaaggtcgatctctaatatattcttcttgttcataactcaaacggcagacacattttctccttttcttcactagtactacataaataacttgtgaacagtaccgagggtgtatatattgcagtgacaaataactaggacactgctaattctactgctggctcaccactgtcttggtgagatgtagccctacaagattgtatactgtgtatttctctagtcgcagctaggcatactttgttttttaaaaaaagaacttcagtttactgcatactcaaggaaacgaaatgacagtaaaagtcag

SEQ ID NO: 210835 - DNA, 3265 bp, Zea Mays
cccttttgtgtgacgtgcttcccgttagttagcatgcctggagttggagggcatccagagaatctcggcacgccggaaggaacaggagcaggtgcgtcgtgaggcgacggaggacctggccgacgatctgtcagaaggcgagaaaggggacaccctcgctgagcttgtgccggttgaggcggccaagaagaagttccagaggaacttctctgaccttaccgtctggtctgacgacaataatgagaagaagctttacattgtgctcatcagtgttcatggtcttgttcgtggcgaaaacatggaactaggtcgtgattctgacaccggtggccaggtgaaatatgttgtcgaacttgcaagagcaatgtcaatgatgcctggagtgtacagggtggacctcttcactcgtcaagtgtcatctcctgacgtggactggagctatggtgagccgaccgagatgttatgctccggttccaacgatggagaggggatgggtgagagtgccggagcctacattgtgcgcataccgtgtggaccacgggataaatacctcaagaaggaagcactgtggccttacctccaagagtttgtcgatggagctcttgcgcatatccttaacatgtccaaggctctgggagaacaggttggaaatgggaggccagtactgccttacgtgatacatggacactatgccgacgctggagatgttgctgctctcctttccggtgcgctcaatgtacccatggtgctcactggtcactcacttgggaggaacaagctggagcaactcctgaagcaagggcgcatgtccaaggaggagatcgattcaacatacaagatcatgaggcgtatcgagggtgaggagctggccctggatgcgtcagagcttgtcatcaccagcacaaggcaggagattgatgaacagtggggattgtacgacggatttgatgtcaagcttgagaaagtgttgagggcacgggcgaggcgtggggttagctgccatggtcgtttcatgcctaggatggtggtgattcctccaggaatggatttcagcaatgttgtggttcatgaagacattgatggggatggtgacagcaaagatgatatcgttggtttggagggtgcttcaccgaagtcaatgcccccaatttgggccgaggtgatgcggttcctaaccaatcctcacaagccgatgatcctggcgctgtcgaggccagacccgaagaagaacatcactaccctcgtcaaagcctttggagagtgccccccactcagggaacttgcaaaccttactctaatcatgggaaacagagatgacatcgacgatatgtctgctggcaatgccagtgtcctcaccacagttctgaagctgatagacaagtatgatctgtatggaagcgtagcgtttcctaagcatcacaatcaggctgatgtcccggagatctaccgcctcgcggccaaaatgaagggtgtcttcatcaaccctgctctcgttgagccgttcggtctcaccctgatcgaggctgcagcacacggacttccaatagtcgctaccaagaatggtggtccggtcgacattacaactgcactgagcaacggactgctcgttgacccgcacgaccagaacgccatcgctcaagcactgctgaagctcgtagcagataagaacctgtggcaggaatgccggagaaacgggctgcgaaacatccacctttactcatggccggagcactgccgcacttacctcaccagggttgctgggtgccggttaaggaacccgaggtggctgaaggacacaccagcagatgccggagctgatgaggaggagttcctggaggattccatggacgctcaggacctgtcactccgtctgtccatcgacggtgagaagagctcgctgaacaccaacgacccattgtcgtcggacccgcaggatcaggtgcagaagatcatgaacaagatcaatcagtcgtcagcacttccgccgtccatgtcctcagtcgcagacggtgccaagaacgcaaccgaggccacgggcagcaccttgaacaagtacccactcctgcgccggcgccggcgcctgttcgtcatcgccgtggactgctaccaagacgacggccgtgctagcaagaagatgctgcaggtgatccaggaagttttcagagcagtccgatcggactcccagatgtccaagatctcagggttcgcgctgtccactgcgatgccgttgtccgaaacactccagcttctgcagctcggcaagatcccagcgaccgacttcgacaccctcatctgtggcagtggcagcgaggtctactatcctggcacagtgaactgcgtcgacgctgaaggaaagctgcgcccagaccaggactatctgatgcacatcagccaccgctggtcccatgacggcgcgaagcagaccatagcgaagctcatggccactcaggacggttcaggcgacactgtcgagctggacccggcgtctagtaatgcacactgcttcacgttccttatcaaagatcccaaaaaggtgaaaacggtcgatgagatgagggagaggctgaggatgcgtggtctccggtgccacatcatgtactgcaggaactcgacaaggcttcaggttgtccctctgctagcatcaaggtcacaggcactcaggtatctttttgtgcgctggggcctatatgtggggaacatgtatctgatcactggggaacatggcgacaccgatcatgaggagatgctatctggattacacaagactgtgatcgtccggggtgtcaccgagaaaggttcggaagggctgctgaggagcccaggaagctacaagaaggacgacgtcgtgccgtctgagacccccttggctgcgtacacgactggtgagatgaaggccgatgagatcatgcgagctctgaaacaagtctccaagacttccagcggcatgtgaattagctgctgggaaaggtcgatctctaatatattcttcttgttcataactcaaacggcagacacattttctccttttcttcactagtactacataaataacttgtgaacagtaccgagggtgtatatattgcagtgacaaataactaggacactgctaattctactgctggctcaccactgtcttggtgagatgtagccctacaagattgtatactgtgtatttctctagtcgcagctaggcatactttgttttttaaaaaaagaacttcagtttactgcatactcaaggaaacgaaatgacagtaaaagtcag

SEQ ID NO: 210836 - DNA, 1851 bp, Zea Mays
ctccacggcccacgcccacgcccaccgccccatccaccccgaaaccctagcggatcgtcgccatggccgcggccgcgctccttcgccgcatccccgccgcgcgggccccggccacggccttcatggcggcgcgtccggtctccgattccacggcggcgctcaccatcgagacatctgtccctttcacctcccacctcgtcgacccgccctcgcgcgatgtcaccaccacccccgccgagctcgtcaccttcttccgcgacatgtccctcatgcgccgcatggagatcgccgccgactccctctataaggccaagctcatccgcgggttctgccacctctacgacggccaggaggccgtcgccgtcggcatggaggccgccatcacccgctccgattccatcatcaccgcctaccgcgaccactgtacctaccttgcccgaggaggtgacctcgtctccgccttctccgagctgatgggccgcgaggccggctgctcccgcgggaagggtggatccatgcatttctataagaaggatgccaatttctatggcgggcacggcatcgtcggcgcgcaggtgcccctcggatgcggcctagccttcgctcagaagtacaagaaggaggagacggccacgtttgcgctctatggtgacggtgcggctaaccagggacagctctttgaggctctcaacatttcggccctctggaagctgcccgccatattggtttgcgagaacaaccattatggtatgggaacagcggaatggagggcagcgaagagtcctgcttactacaagcgtggcgactatgtgcctggattgaaggttgatggaatggatgttcttgctgtgaagcaagcgtgcaaatttgcaaaagatcatgctgttgcaaatggcccaattgtccttgagatggatacctacaggtaccatggccactctatgtcagatccaggaagcacttaccgcaccagggatgagatttcaggtgtcaggaacgggacccaattgaaagggttagaaagttgcttttggctcacgacttggcaactgctgctgagctcaaggatatggagaaagaaatcaggaaacaagtagatgacgccattgcaaaagcaaaggaaagttctatgcctgatacttctgagctcttcacaaatgtttataagaagggattcaacgtggagtcatttgggcccgacaggaaggagttgagagctactcttccgtaggttgggagaatggcagtcctcaatatgatatgatatccaggagaaataaacattgatgaagaaggcctcagacattgctggaattcttttgttggcaaatgaacctatgtagagatccgttgtcaggaggatctgcttagggcttgttcggttagccttcaatccatgtggattgagtgggattggatgggtttgaatcccacgcaagtcaaacttcttcataattttttccaaacccattcaatccatgtgtattgggaataagcgaacaaggccttatttgttttgcttcccttttccatttctacaattcagctttaactgctgctggttggcttcttattgaagctaatatcgtctgcaattgcttcggtccaaggaaatcgaagcaggagattataaatttgctcacgcctctcgtctatacctgccactcttagctttagttcggtaatggtacatgtaggactgcgtcgttacacttcgactggtcgattaattttatttaataaatgtggtgcatggatcggacagtgtgtaactcagaatatggtgcatgcaattgccgtgtttggtttctagaccctaactttagtctctccattttattctattttagt

SEQ ID NO: 210837 - DNA, 1871 bp, Zea Mays
cctactcatgtgggagcctctgattcgtgggagcaaactgcagaatcgaatcagtgcttctccaccacctcttgaagctgcatctctaccacgtgggatggttactatgcgctgtgatatcactacttgcagctcttcccatgtgtcactcctcgtttctggtagcgcacagacttgtttcgatgaccagcttctagagagccacataaaaaatgaaattattgagaaaagccagttagtccgggctctctcaaatagtgaggacaagttaccatcaagtgagcctttaacttccatgtctacggcttgtggggcttctacctttgaagtttggatgtcccttcctaagtgggcagcacaggttctgaagcatctagcgccagatatatcatacaggagtttggttgcacttggtattggttgtataaatggtactcctgttgcttcatttgagaggcgagatgcagaccgtcttcttttcttttgcacaagccagtgcaaagatttggctaatgaaaacggtccatattttcatctgccaagatggtcagcctcccttaccaaggacagaacaaagttgggttcagaatcaaaacaaaatctgttgggtgcaaatggagttttggaagacaagaagcatatgatggaagggccttcctcattttcagccgtcaaggctaaattaaagcctgcaactatgaggccaattcctcactctcaaaagcaacaaatgcatccttttatgtgtttacctgaaacttcctttcatgaaactagtattgtgaagccaagcttgacagttgcgccaactgtgaagcacaattcagtttcttatgccccaaccacgcacagaaaatcaacatcagggccatctcatactccttcagtcattcagttgaatcctctgcctatgaagaaacatggatgtgataggttgtctatacaagtatgctctgaggaggacttcttgaaggatgtcatgcagtttttaatccagaggggccacaatcgacttgtacctcacggaggactagctgaatttcctgatgcagtccttaacgccaagcgccttgacctttataacctgtacaaagaggtggtgtctagaggtggattttatgtgggtaacggcataaactggaagggtcaagtcttctcaaagatgcgtaaccatactgcaacaaacagaatgactggtgtaggtaacacattaaaaaggcattacgagacatacttgttggaatatgagttagcacatgatgatgtggatggcgaatgctgcttgctttgtcacagtagcgcacctggagattgggtgaactgcggtttatgtggcgaatgggctcactttggttgcgacagacgacaagggctaggcactttcaaggattacgctaagacagacggtttggaatacatctgcccccactgtagcttagcaaactacaagaagccaccactaccaccaaaagtagctaatggtttctcaaatacagcatatgtaccacgaagtgtttaatttcttgtttttttcttttcctttggtcccgtgtttgtgggaagaagtcattagagtagggaatagcctgatggaaagatgggcaaggccttcagggtaggtatcgaaggtatcatctcgctaatttagtggctatgagttttttatagatgtacaattgataacacattcaagttcctaagtagttttttagtggttatgaggtttatatagcatgcatttgaatgcgggtgttacttgtttatattaatctccactgtgtttttaatttcgctgtctggttccccgaaacacttgatggaacaacatgaagaagccctgaagctgctggtgcaatgatgcacgcttaagt

SEQ ID NO: 210838 - DNA, 976 bp, Zea Mays
caccactagtacactagagggtagaggcacgggccgcgacggccgatcaggtgagtagccggccggcagcggaaaccgaaggcacggccacagcaccaccgcgcggcctcgagagtcgaaaccatcaggccatgttcggttggtcagggattggccgggattgtggcgcaatccacgtggatcatccccggctggaaactttcccgattcacattttaattgtcttcggttcatccaccaggcgaggggagggcgacgcgtgcggctagcgaggcgatggttgcgcgacacgctgacggcgacgcctgcgaccatcgatcatccattgttcatctccatccccttcggtggccaattttctctccgggagaaagctggcgcgggttggaggtgggaagaaagagaaagaagatgttgttgcgccttcgattggattgggttggccttggagcgcgtactgccgccgcatgtattcgctgttccggccctgattctatggtgcaccactgtgctgtgcgccgccccagccctcgaggatttagcaaactgctcagatctgttctcgctttgcttcatcagtgaacactgaacacggtctaatatgcattttgggcttcttttgagtcatgttgttggtgtggaaccgtggaagtaggatgtggactgcaaggatggctagtttactctttactggcattgacagtttacttgtcgttcttcagtcatttggtggcatgtatcatcaagcttctgtcctttctatacattgttatgaacgttgctatgccttttatttcgaatgctgatgcaatctacgagtttctatccttgtatgtgtgcatagacattgttatgaatgctgctaatgtcttttattttgaatgcttatgcaatctattgagttgtatgtgtgtaaagacattgttatgtgtacggttttctatgtcatattcttttgcataaaagcccagttgta

SEQ ID NO: 210839 - DNA, 4002 bp, Zea Mays
ctataaaacacactcccgagtccctctatagcccaaaccaattccaaaactgcaggcctctccaaaattcgaacaccctcgcctggaaccttctacgagccagctccgagcggttgccgtcccataatctgagagacggtgccgtgggtttgcggcgcctgggtcgccagtaaagtgcgggccgagatggagtcctcgtcgtcgggcggcgggctggcgcggcggcggagtagcggcggctggggcagcttcagcggcgacacggacccgttcgacatccccgcgaagggcgcacccctcgagcggcttaggaagtggcggcaagcagcccttgtgctgaatgcatcaaggcgctttaggtacacactcgatttgaaaaaggaggaacaaaatgaggaaatcaggagaaaaattcgtgcaaaggcatatgttataacggctgcttttcgtttcaaagaggctggccgagtccatgttcggtctgaagaaacaaaagtaccgattgctgatggtgcacttggctttggaatcaaagaagacgagattacagcactgacaagggatcacaactactctggtctgcagcaatatggaggggtttctggtgtagcacatatgctaaaaaccgattcggagaagggcattagtggagatgactcagatttgatagcaaggaaaaatacatttggttcaaacacatatcctcgtaagaaaggaagaagttttttggctttcgtatgggatgcttgtaaagacctgacgctaatcatcctcatggttgctgctgctgtttcactggcattgggcataacaacagagggcataaaagaaggctggtatgatggagcgagcattgcctttgctgttcttctagttgtatttgttacagctatcagcgactacaagcaatcactacaatttcaaaatctgaatgaagaaaaacagaacattcgtttggaggttgttagaggtggaaggcgaatcacagtatcaatatatgatttggttgttggagatgttgtccctctcaaaattggtgaccaggtccctgctgatggtatccttatcaatggccactctctttccatagatgaatcaagcatgacgggagaaagtaaaattgtacacaaagatcaaaagtcgccatttctaatgtcaggttgcaaagttgccgatggctatggcacaatgctggtaactgctgttggagtcaacactgaatgggggttgctaatggcaagcatatctgaagattcgggtgaagagacaccactccaggttcgtttgaatggtgtcgctactttcattggaatggttggactttctgttgcccttgcagttctggttgtacttttggccaggtacttcactgggcatacttataatcctgacggatctgtgcaatatgtgaaagggaagatgggtgtaggccagacgatacgtggagtagttagaatattcacagtggctgtaggtcactattgtggtcgtggctgttccagaaggactaccattagctgtcacactgacgcttgctttctcaatgcgcaaaatgatgaaggacaaggctctggtcaggaggctttctgcatgtgaaacgatgggttctgccacaacaatctgcagtgacaagactggcaccttaactttaaatcagatgactgttgttgaggcatattttggtggaaagaagatggactcaccagataatgcacaaatgttatctgctgatgtcacatcactgattgttgaaggaattgcacagaacacttctggaagcatatttgagcccgagggtggtcaagaaccggaggtgactggatcacctacagaaaaggctatattgtcttgggggctaaagctgggtatgaaattcaatgaaacaagattgaagtcatctattcttcatgtatttcctttcaactcagagaaaaagcgaggtggggttgcagtgcacctggatggccctgaagtccatatacactggaaaggagcagctgaaatcattttggattcatgcacaagctggcttgacactgatggttcgaagcactcaatgactcctgaaaaaattgctgaattcaagaaattcattgaagatatggctgtggctagcctccgctgtgttgcctttgcctatataactcatgagatggatgatgttccaaacgaagatcagagggcagagtggaaactgcctgaagataacctcattatgcttggaattgtgggaataaaggatccctgccgtccaggagttcgagattctgttcgtttatgtcaggcagctggcattaaggtgcgcatggttactggtgataatcttcaaactgcgagagccattgccctggaatgcgggatacttgatgatcccaatgtgttggagcctgtcatcattgaaggaaaagcattccgggtgctgtcagacttagaaagggaggaagctgctgaaaaaatatctgtgatggggaggtcttcaccaaatgataaacttttacttgttaaggcactgagggcaagaggtcatgttgttgctgttactggagatggcacaaatgatgccccagcactgcatgaggcagatattggtctatcaatgggcattcagggaactgaagttgccaaggagagttctgatattattatcttggatgacaatttcgcatcagtcgtgagggttgtcagatggggtcgttcggtgtatgcaaacatacagaagtttatacaattccaactaacggtcaacgtcgcagctctgataatcaatgtagttgctgccgtcagttctggaaatgtgccgttgaatgctgttcagttgctgtgggttaacctaattatggatactttgggtgcccttgcattggcgacagaaccacctacaaaccatcttatggagagacccccagtagggagaagggagccattgattacaaatatcatgtggagaaacttaattatcatggctttgtttcaagtttcagttctcctcactctcaacttcaagggaataagcctcctgcagttgaaaaatgatgatccagcacatgcagataaagtgaaaaataccttcattttcaacacatttgttctctgccaggtgttcaacgaattcaattcgcgtaaaccagatgagctgaatatattcaagggcatttcagggaaccatctgtttattggcatcatagctataacagttgtactccaggcgcttatcgttgagttccttggcaagtttgcctcaacggtaaggctaagttggcagttgtggttggtatcgataggtcttgctttcttcggctggccgctggcattcgtggggaagcttattcctgttcctaaacgtccattgggagaattctttgcatgctgctgtatctgcaaggggagcaaacaagcccctgatgacgcaacctctaatgataaggaagacaacaagcccgagccttgagatgtcagcaagattgatggttgctaacaatgaccttgtgctgtttcttaccgggttttgacgtgttggatttgtgattaccactgattgctattgtacttcaaacaggaaggctggaaatgcaactcggcttctcatgagaccttgtcatttgctgtagttcgttcgcaactgtatattgtagcttggaagactctgtgccgtggtgcgtgtatttgagaaatttctatgcaaagtgagctggcgataacattggatggcgcagcaaagcatcgcgcgcagtgtttcctaggcatcatccagtgcggctcgtggatgcttttcgtgggtggagctgcctgtgttcgtgccatagcatttgacgagtgggcgcccgctgtcggctttgtgccttgaagcctccgatgcagagaaaacaaggtgagttggaacccgagacgtgtctgaccagcatggcccgtagaaaagtttgccccggccggctaaaatttcccgtgctcgtactttagccgtgcacttgtgcgtccatgtccgtacgtaccgttacgtgaagc

SEQ ID NO: 210840 - DNA, 3978 bp, Zea Mays
ctataaaacacactcccgagtccctctatagcccaaaccaattccaaaactgcaggcctctccaaaattcgaacaccctcgcctggaaccttctacgagccagctccgagcggttgccgtcccataatctgagagacggtgccgtgggtttgcggcgcctgggtcgccagtaaagtgcgggccgagatggagtcctcgtcgtcgggcggcgggctggcgcggcggcggagtagcggcggctggggcagcttcagcggcgacacggacccgttcgacatccccgcgaagggcgcacccctcgagcggcttaggaagtggcggcaagcagcccttgtgctgaatgcatcaaggcgctttaggtacacactcgatttgaaaaaggaggaacaaaatgaggaaatcaggagaaaaattcgtgcaaaggcatatgttataacggctgcttttcgtttcaaagaggctggccgagtccatgttcggtctgaagaaacaaaagtaccgattgctgatggtgcacttggctttggaatcaaagaagacgagattacagcactgacaagggatcacaactactctggtctgcagcaatatggaggggtttctggtgtagcacatatgctaaaaaccgattcggagaagggcattagtggagatgactcagatttgatagcaaggaaaaatacatttggttcaaacacatatcctcgtaagaaaggaagaagttttttggctttcgtatgggatgcttgtaaagacctgacgctaatcatcctcatggttgctgctgctgtttcactggcattgggcataacaacagagggcataaaagaaggctggtatgatggagcgagcattgcctttgctgttcttctagttgtatttgttacagctatcagcgactacaagcaatcactacaatttcaaaatctgaatgaagaaaaacagaacattcgtttggaggttgttagaggtggaaggcgaatcacagtatcaatatatgatttggttgttggagatgttgtccctctcaaaattggtgaccaggtccctgctgatggtatccttatcaatggccactctctttccatagatgaatcaagcatgacgggagaaagtaaaattgtacacaaagatcaaaagtcgccatttctaatgtcaggttgcaaagttgccgatggctatggcacaatgctggtaactgctgttggagtcaacactgaatgggggttgctaatggcaagcatatctgaagattcgggtgaagagacaccactccaggttcgtttgaatggtgtcgctactttcattggaatggttggactttctgttgcccttgcagttctggttgtacttttggccaggtacttcactgggcatacttataatcctgacggatctgtgcaatatgtgaaagggaagatgggtgtaggccagacgatacgtggagtagttagaatattcacagtggctgtcactattgtggtcgtggctgttccagaaggactaccattagctgtcacactgacgcttgctttctcaatgcgcaaaatgatgaaggacaaggctctggtcaggaggctttctgcatgtgaaacgatgggttctgccacaacaatctgcagtgacaagactggcaccttaactttaaatcagatgactgttgttgaggcatattttggtggaaagaagatggactcaccagataatgcacaaatgttatctgctgatgtcacatcactgattgttgaaggaattgcacagaacacttctggaagcatatttgagcccgagggtggtcaagaaccggaggtgactggatcacctacagaaaaggctatattgtcttgggggctaaagctgggtatgaaattcaatgaaacaagattgaagtcatctattcttcatgtatttcctttcaactcagagaaaaagcgaggatggccctgaagtccatatacactggaaaggagcagctgaaatcattttggattcatgcacaagctggcttgacactgatggttcgaagcactcaatgactcctgaaaaaattgctgaattcaagaaattcattgaagatatggctgtggctagcctccgctgtgttgcctttgcctatataactcatgagatggatgatgttccaaacgaagatcagagggcagagtggaaactgcctgaagataacctcattatgcttggaattgtgggaataaaggatccctgccgtccaggagttcgagattctgttcgtttatgtcaggcagctggcattaaggtgcgcatggttactggtgataatcttcaaactgcgagagccattgccctggaatgcgggatacttgatgatcccaatgtgttggagcctgtcatcattgaaggaaaagcattccgggtgctgtcagacttagaaagggaggaagctgctgaaaaaatatctgtgatggggaggtcttcaccaaatgataaacttttacttgttaaggcactgagggcaagaggtcatgttgttgctgttactggagatggcacaaatgatgccccagcactgcatgaggcagatattggtctatcaatgggcattcagggaactgaagttgccaaggagagttctgatattattatcttggatgacaatttcgcatcagtcgtgagggttgtcagatggggtcgttcggtgtatgcaaacatacagaagtttatacaattccaactaacggtcaacgtcgcagctctgataatcaatgtagttgctgccgtcagttctggaaatgtgccgttgaatgctgttcagttgctgtgggttaacctaattatggatactttgggtgcccttgcattggcgacagaaccacctacaaaccatcttatggagagacccccagtagggagaagggagccattgattacaaatatcatgtggagaaacttaattatcatggctttgtttcaagtttcagttctcctcactctcaacttcaagggaataagcctcctgcagttgaaaaatgatgatccagcacatgcagataaagtgaaaaataccttcattttcaacacatttgttctctgccaggtgttcaacgaattcaattcgcgtaaaccagatgagctgaatatattcaagggcatttcagggaaccatctgtttattggcatcatagctataacagttgtactccaggcgcttatcgttgagttccttggcaagtttgcctcaacggtaaggctaagttggcagttgtggttggtatcgataggtcttgctttcttcggctggccgctggcattcgtggggaagcttattcctgttcctaaacgtccattgggagaattctttgcatgctgctgtatctgcaaggggagcaaacaagcccctgatgacgcaacctctaatgataaggaagacaacaagcccgagccttgagatgtcagcaagattgatggttgctaacaatgaccttgtgctgtttcttaccgggttttgacgtgttggatttgtgattaccactgattgctattgtacttcaaacaggaaggctggaaatgcaactcggcttctcatgagaccttgtcatttgctgtagttcgttcgcaactgtatattgtagcttggaagactctgtgccgtggtgcgtgtatttgagaaatttctatgcaaagtgagctggcgataacattggatggcgcagcaaagcatcgcgcgcagtgtttcctaggcatcatccagtgcggctcgtggatgcttttcgtgggtggagctgcctgtgttcgtgccatagcatttgacgagtgggcgcccgctgtcggctttgtgccttgaagcctccgatgcagagaaaacaaggtgagttggaacccgagacgtgtctgaccagcatggcccgtagaaaagtttgccccggccggctaaaatttcccgtgctcgtactttagccgtgcacttgtgcgtccatgtccgtacgtaccgttacgtgaagc

SEQ ID NO: 210841 - DNA, 3905 bp, Zea Mays
tgcaggcctctccaaaattcgaacaccctcgcctggaaccttctacgagccagctccgagcggttgccgtcccataatctgagagacggtgccgtgggtttgcggcgcctgggtcgccagtaaagtgcgggccgagatggagtcctcgtcgtcgggcggcgggctggcgcggcggcggagtagcggcggctggggcagcttcagcggcgacacggacccgttcgacatccccgcgaagggcgcacccctcgagcggcttaggaagtggcggcaagcagcccttgtgctgaatgcatcaaggcgctttaggtacacactcgatttgaaaaaggaggaacaaaatgaggaaatcaggagaaaaattcgtgcaaaggcatatgttataacggctgcttttcgtttcaaagaggctggccgagtccatgttcggtctgaagaaacaaaagtaccgattgctgatggtgcacttggctttggaatcaaagaagacgagattacagcactgacaagggatcacaactactctggtctgcagcaatatggaggggtttctggtgtagcacatatgctaaaaaccgattcggagaagggcattagtggagatgactcagatttgatagcaaggaaaaatacatttggttcaaacacatatcctcgctttcgtatgggatgcttgtaaagacctgacgctaatcatcctcatggttgctgctgctgtttcactggcattgggcataacaacagagggcataaaagaaggctggtatgatggagcgagcattgcctttgctgttcttctagttgtatttgttacagctatcagcgactacaagcaatcactacaatttcaaaatctgaatgaagaaaaacagaacattcgtttggaggttgttagaggtggaaggcgaatcacagtatcaatatatgatttggttgttggagatgttgtccctctcaaaattggtgaccaggtccctgctgatggtatccttatcaatggccactctctttccatagatgaatcaagcatgacgggagaaagtaaaattgtacacaaagatcaaaagtcgccatttctaatgtcaggttgcaaagttgccgatggctatggcacaatgctggtaactgctgttggagtcaacactgaatgggggttgctaatggcaagcatatctgaagattcgggtgaagagacaccactccaggttcgtttgaatggtgtcgctactttcattggaatggttggactttctgttgcccttgcagttctggttgtacttttggccaggtacttcactgggcatacttataatcctgacggatctgtgcaatatgtgaaagggaagatgggtgtaggccagacgatacgtggagtagttagaatattcacagtggctgtcactattgtggtcgtggctgttccagaaggactaccattagctgtcacactgacgcttgctttctcaatgcgcaaaatgatgaaggacaaggctctggtcaggaggctttctgcatgtgaaacgatgggttctgccacaacaatctgcagtgacaagactggcaccttaactttaaatcagatgactgttgttgaggcatattttggtggaaagaagatggactcaccagataatgcacaaatgttatctgctgatgtcacatcactgattgttgaaggaattgcacagaacacttctggaagcatatttgagcccgagggtggtcaagaaccggaggtgactggatcacctacagaaaaggctatattgtcttgggggctaaagctgggtatgaaattcaatgaaacaagattgaagtcatctattcttcatgtatttcctttcaactcagagaaaaagcgaggatggccctgaagtccatatacactggaaaggagcagctgaaatcattttggattcatgcacaagctggcttgacactgatggttcgaagcactcaatgactcctgaaaaaattgctgaattcaagaaattcattgaagatatggctgtggctagcctccgctgtgttgcctttgcctatataactcatgagatggatgatgttccaaacgaagatcagagggcagagtggaaactgcctgaagataacctcattatgcttggaattgtgggaataaaggatccctgccgtccaggagttcgagattctgttcgtttatgtcaggcagctggcattaaggtgcgcatggttactggtgataatcttcaaactgcgagagccattgccctggaatgcgggatacttgatgatcccaatgtgttggagcctgtcatcattgaaggaaaagcattccgggtgctgtcagacttagaaagggaggaagctgctgaaaaaatatctgtgatggggaggtcttcaccaaatgataaacttttacttgttaaggcactgagggcaagaggtcatgttgttgctgttactggagatggcacaaatgatgccccagcactgcatgaggcagatattggtctatcaatgggcattcagggaactgaagttgccaaggagagttctgatattattatcttggatgacaatttcgcatcagtcgtgagggttgtcagatggggtcgttcggtgtatgcaaacatacagaagtttatacaattccaactaacggtcaacgtcgcagctctgataatcaatgtagttgctgccgtcagttctggaaatgtgccgttgaatgctgttcagttgctgtgggttaacctaattatggatactttgggtgcccttgcattggcgacagaaccacctacaaaccatcttatggagagacccccagtagggagaagggagccattgattacaaatatcatgtggagaaacttaattatcatggctttgtttcaagtttcagttctcctcactctcaacttcaagggaataagcctcctgcagttgaaaaatgatgatccagcacatgcagataaagtgaaaaataccttcattttcaacacatttgttctctgccaggtgttcaacgaattcaattcgcgtaaaccagatgagctgaatatattcaagggcatttcagggaaccatctgtttattggcatcatagctataacagttgtactccaggcgcttatcgttgagttccttggcaagtttgcctcaacggtaaggctaagttggcagttgtggttggtatcgataggtcttgctttcttcggctggccgctggcattcgtggggaagcttattcctgttcctaaacgtccattgggagaattctttgcatgctgctgtatctgcaaggggagcaaacaagcccctgatgacgcaacctctaatgataaggaagacaacaagcccgagccttgagatgtcagcaagattgatggttgctaacaatgaccttgtgctgtttcttaccgggttttgacgtgttggatttgtgattaccactgattgctattgtacttcaaacaggaaggctggaaatgcaactcggcttctcatgagaccttgtcatttgctgtagttcgttcgcaactgtatattgtagcttggaagactctgtgccgtggtgcgtgtatttgagaaatttctatgcaaagtgagctggcgataacattggatggcgcagcaaagcatcgcgcgcagtgtttcctaggcatcatccagtgcggctcgtggatgcttttcgtgggtggagctgcctgtgttcgtgccatagcatttgacgagtgggcgcccgctgtcggctttgtgccttgaagcctccgatgcagagaaaacaaggtgagttggaacccgagacgtgtctgaccagcatggcccgtagaaaagtttgccccggccggctaaaatttcccgtgctcgtactttagccgtgcacttgtgcgtccatgtccgtacgtaccgttacgtgaagc

SEQ ID NO: 210842 - DNA, 3891 bp, Zea Mays
tgcaggcctctccaaaattcgaacaccctcgcctggaaccttctacgagccagctccgagcggttgccgtcccataatctgagagacggtgccgtgggtttgcggcgcctgggtcgccagtaaagtgcgggccgagatggagtcctcgtcgtcgggcggcgggctggcgcggcggcggagtagcggcggctggggcagcttcagcggcgacacggacccgttcgacatccccgcgaagggcgcacccctcgagcggcttaggaagtggcggcaagcagcccttgtgctgaatgcatcaaggcgctttaggtacacactcgatttgaaaaaggaggaacaaaatgaggaaatcaggagaaaaattcgtgcaaaggcatatgttataacggctgcttttcgtttcaaagaggctggccgagtccatgttcggtctgaagaaacaaaagtaccgattgctgatggtgcacttggctttggaatcaaagaagacgagattacagcactgacaagggatcacaactactctggtctgcagcaatatggaggggtttctggtgtagcacatatgctaaaaaccgattcggagaagggcattagtggagatgactcagatttgatagcaaggaaaaatacatttggttcaaacacatatcctcgtaagaaaggaagaagttttttggctttcgtatgggatgcttgtaaagacctgacgctaatcatcctcatggttgctgctgctgtttcactggcattgggcataacaacagagggcataaaagaaggctggtatgatggagcgagcattgcctttgctgttcttctagttgtatttgttacagctatcagcgactacaagcaatcactacaatttcaaaatctgaatgaagaaaaacagaacattcgtttggaggttgttagaggtggaaggcgaatcacagtatcaatatatgatttggttgttggagatgttgtccctctcaaaattggtgaccaggtccctgctgatggtatccttatcaatggccactctctttccatagatgaatcaagcatgacgggagaaagtaaaattgtacacaaagatcaaaagtcgccatttctaatgtcaggttgcaaagttgccgatggctatggcacaatgctggtaactgctgttggagtcaacactgaatgggggttgctaatggcaagcatatctgaagattcgggtgaagagacaccactccaggttcgtttgaatggtgtcgctactttcattggaatggttggactttctgttgcccttgcagttctggttgtacttttggccaggtacttcactgggcatacttataatcctgacggatctgtgcaatatgtgaaagggaagatgggtgtaggccagacgatacgtggagtagttagaatattcacagtggctgtcactattgtggtcgtggctgttccagaaggactaccattagctgtcacactgacgcttgctttctcaatgcgcaaaatgatgaaggacaaggctctggtcaggaggctttctgcatgtgaaacgatgggttctgccacaacaatctgcagtgacaagactggcaccttaactttaaatcagatgactgttgttgaggcatattttggtggaaagaagatggactcaccagataatgcacaaatgttatctgctgatgtcacatcactgattgttgaaggaattgcacagaacacttctggaagcatatttgagcccgagggtggtcaagaaccggaggtgactggatcacctacagaaaaggctatattgtcttgggggctaaagctgggtatgaaattcaatgaaacaagattgaagtcatctattcttcatgtatttcctttcaactcagagaaaaagcgaggtggggttgcagtgcacctggatggccctgaagtccatatacactggaaaggagcagctgaaatcattttggattcatgcacaagctggcttgacactgatgatatggctgtggctagcctccgctgtgttgcctttgcctatataactcatgagatggatgatgttccaaacgaagatcagagggcagagtggaaactgcctgaagataacctcattatgcttggaattgtgggaataaaggatccctgccgtccaggagttcgagattctgttcgtttatgtcaggcagctggcattaaggtgcgcatggttactggtgataatcttcaaactgcgagagccattgccctggaatgcgggatacttgatgatcccaatgtgttggagcctgtcatcattgaaggaaaagcattccgggtgctgtcagacttagaaagggaggaagctgctgaaaaaatatctgtgatggggaggtcttcaccaaatgataaacttttacttgttaaggcactgagggcaagaggtcatgttgttgctgttactggagatggcacaaatgatgccccagcactgcatgaggcagatattggtctatcaatgggcattcagggaactgaagttgccaaggagagttctgatattattatcttggatgacaatttcgcatcagtcgtgagggttgtcagatggggtcgttcggtgtatgcaaacatacagaagtttatacaattccaactaacggtcaacgtcgcagctctgataatcaatgtagttgctgccgtcagttctggaaatgtgccgttgaatgctgttcagttgctgtgggttaacctaattatggatactttgggtgcccttgcattggcgacagaaccacctacaaaccatcttatggagagacccccagtagggagaagggagccattgattacaaatatcatgtggagaaacttaattatcatggctttgtttcaagtttcagttctcctcactctcaacttcaagggaataagcctcctgcagttgaaaaatgatgatccagcacatgcagataaagtgaaaaataccttcattttcaacacatttgttctctgccaggtgttcaacgaattcaattcgcgtaaaccagatgagctgaatatattcaagggcatttcagggaaccatctgtttattggcatcatagctataacagttgtactccaggcgcttatcgttgagttccttggcaagtttgcctcaacggtaaggctaagttggcagttgtggttggtatcgataggtcttgctttcttcggctggccgctggcattcgtggggaagcttattcctgttcctaaacgtccattgggagaattctttgcatgctgctgtatctgcaaggggagcaaacaagcccctgatgacgcaacctctaatgataaggaagacaacaagcccgagccttgagatgtcagcaagattgatggttgctaacaatgaccttgtgctgtttcttaccgggttttgacgtgttggatttgtgattaccactgattgctattgtacttcaaacaggaaggctggaaatgcaactcggcttctcatgagaccttgtcatttgctgtagttcgttcgcaactgtatattgtagcttggaagactctgtgccgtggtgcgtgtatttgagaaatttctatgcaaagtgagctggcgataacattggatggcgcagcaaagcatcgcgcgcagtgtttcctaggcatcatccagtgcggctcgtggatgcttttcgtgggtggagctgcctgtgttcgtgccatagcatttgacgagtgggcgcccgctgtcggctttgtgccttgaagcctccgatgcagagaaaacaaggtgagttggaacccgagacgtgtctgaccagcatggcccgtagaaaagtttgccccggccggctaaaatttcccgtgctcgtactttagccgtgcacttgtgcgtccatgtccgtacgtaccgttacgtgaagc

SEQ ID NO: 210843 - DNA, 3633 bp, Zea Mays
tgttggagaagattttcttcaatttgtgctaccctagcatattaccaagcagcccttgtgctgaatgcatcaaggcgctttaggtacacactcgatttgaaaaaggaggaacaaaatgaggaaatcaggagaaaaattcgtgcaaaggcatatgttataacggctgcttttcgtttcaaagaggctggccgagtccatgttcggtctgaagaaacaaaagtaccgattgctgatggtgcacttggctttggaatcaaagaagacgagattacagcactgacaagggatcacaactactctggtctgcagcaatatggaggggtttctggtgtagcacatatgctaaaaaccgattcggagaagggcattagtggagatgactcagatttgatagcaaggaaaaatacatttggttcaaacacatatcctcgtaagaaaggaagaagttttttggctttcgtatgggatgcttgtaaagacctgacgctaatcatcctcatggttgctgctgctgtttcactggcattgggcataacaacagagggcataaaagaaggctggtatgatggagcgagcattgcctttgctgttcttctagttgtatttgttacagctatcagcgactacaagcaatcactacaatttcaaaatctgaatgaagaaaaacagaacattcgtttggaggttgttagaggtggaaggcgaatcacagtatcaatatatgatttggttgttggagatgttgtccctctcaaaattggtgaccaggtccctgctgatggtatccttatcaatggccactctctttccatagatgaatcaagcatgacgggagaaagtaaaattgtacacaaagatcaaaagtcgccatttctaatgtcaggttgcaaagttgccgatggctatggcacaatgctggtaactgctgttggagtcaacactgaatgggggttgctaatggcaagcatatctgaagattcgggtgaagagacaccactccaggttcgtttgaatggtgtcgctactttcattggaatggttggactttctgttgcccttgcagttctggttgtacttttggccaggtacttcactgggcatacttataatcctgacggatctgtgcaatatgtgaaagggaagatgggtgtaggccagacgatacgtggagtagttagaatattcacagtggctgtcactattgtggtcgtggctgttccagaaggactaccattagctgtcacactgacgcttgctttctcaatgcgcaaaatgatgaaggacaaggctctggtcaggaggctttctgcatgtgaaacgatgggttctgccacaacaatctgcagtgacaagactggcaccttaactttaaatcagatgactgttgttgaggcatattttggtggaaagaagatggactcaccagataatgcacaaatgttatctgctgatgtcacatcactgattgttgaaggaattgcacagaacacttctggaagcatatttgagcccgagggtggtcaagaaccggaggtgactggatcacctacagaaaaggctatattgtcttgggggctaaagctgggtatgaaattcaatgaaacaagattgaagtcatctattcttcatgtatttcctttcaactcagagaaaaagcgaggtggggttgcagtgcacctggatggccctgaagtccatatacactggaaaggagcagctgaaatcattttggattcatgcacaagctggcttgacactgatggttcgaagcactcaatgactcctgaaaaaattgctgaattcaagaaattcattgaagatatggctgtggctagcctccgctgtgttgcctttgcctatataactcatgagatggatgatgttccaaacgaagatcagagggcagagtggaaactgcctgaagataacctcattatgcttggaattgtgggaataaaggatccctgccgtccaggagttcgagattctgttcgtttatgtcaggcagctggcattaaggtgcgcatggttactggtgataatcttcaaactgcgagagccattgccctggaatgcgggatacttgatgatcccaatgtgttggagcctgtcatcattgaaggaaaagcattccgggtgctgtcagacttagaaagggaggaagctgctgaaaaaatatctgtgatggggaggtcttcaccaaatgataaacttttacttgttaaggcactgagggcaagaggtcatgttgttgctgttactggagatggcacaaatgatgccccagcactgcatgaggcagatattggtctatcaatgggcattcagggaactgaagttgccaaggagagttctgatattattatcttggatgacaatttcgcatcagtcgtgagggttgtcagatggggtcgttcggtgtatgcaaacatacagaagtttatacaattccaactaacggtcaacgtcgcagctctgataatcaatgtagttgctgccgtcagttctggaaatgtgccgttgaatgctgttcagttgctgtgggttaacctaattatggatactttgggtgcccttgcattggcgacagaaccacctacaaaccatcttatggagagacccccagtagggagaagggagccattgattacaaatatcatgtggagaaacttaattatcatggctttgtttcaagtttcagttctcctcactctcaacttcaagggaataagcctcctgcagttgaaaaatgatgatccagcacatgcagataaagtgaaaaataccttcattttcaacacatttgttctctgccaggtgttcaacgaattcaattcgcgtaaaccagatgagctgaatatattcaagggcatttcagggaaccatctgtttattggcatcatagctataacagttgtactccaggcgcttatcgttgagttccttggcaagtttgcctcaacggtaaggctaagttggcagttgtggttggtatcgataggtcttgctttcttcggctggccgctggcattcgtggggaagcttattcctgttcctaaacgtccattgggagaattctttgcatgctgctgtatctgcaaggggagcaaacaagcccctgatgacgcaacctctaatgataaggaagacaacaagcccgagccttgagatgtcagcaagattgatggaaggctggaaatgcaactcggcttctcatgagaccttgtcatttgctgtagttcgttcgcaactgtatattgtagcttggaagactctgtgccgtggtgcgtgtatttgagaaatttctatgcaaagtgagctggcgataacattggatggcgcagcaaagcatcgcgcgcagtgtttcctaggcatcatccagtgcggctcgtggatgcttttcgtgggtggagctgcctgtgttcgtgccatagcatttgacgagtgggcgcccgctgtcggctttgtgccttgaagcctccgatgcagagaaaacaaggtgagttggaacccgagacgtgtctgaccagcatggcccgtagaaaagtttgccccggccggctaaaatttcccgtgctcgtactttagccgtgcacttgtgcgtccatgtccgtacgtaccgttacgtgaagc

SEQ ID NO: 210844 - DNA, 1249 bp, Zea Mays
cgaccatgttgaacatactcaacaaatcgtgcaggaaggagattcagctgacagagaaaaggcgcacacaattaataagaaatctatcccctgccgactgccgaccgccggccgtttgccgacgagccgagacccgcgagggcgcgcgcgcaggaacatgcaggatcagacgacgacgagctcgctgctctccagcagcgagcgctcctccagctcggcgccggagacgggggagaccagggaagaagcgatggagagcgacgaggagatcaggagggtgccggaggttggcctggagctgctgaccagcccgtcgacgtccggcagggaggcgaccgctgccgcggccgctgccgggacgtcgtccgcgtcgcaggcggccagcgccagccgccgcggccgcagcccggccgacaaggagcaccgccgcctcaaaaggcacgggaaaggaagaaggcgtacctgagcgagctggaggtgagggtgaaggagctggagaagaggaactcggagctggaggagaagctgtccacgctgcagaacgagaaccagatgcttagacagatactgaagaacaccactgtcaacaacagaagaggcccaggtagcagcagtgctggtggagacagccaatagctgtcgtctatacaactcctcctagaacccggttgcacttcgaagaaactaattaattaaagcaaggaaataccgcttgagagagctagtagaaagattgaactggtcatgcaagctcgttatttagttacaatcatatatagccagcctcccttcacagggaccctgtgctgcatatatacgcacgtgttcagtgattcagtccgttctgcaactttgtctagctgtatgcatgcaatcgcgttgccaacttgtaattcgattcgccttcgtgtgtagactgtacgcaaggcggagtggacgcagtgcacaagtccgtggtgcaacaactgtaatgtaataactaggcttgtctgaattctgaatttgtgtgtcttctgtactgtacggttgtgcaaacgtgcagattcgctgatgacacattttatttagcttgaccaatacatcgacatgtcctctcccatatgctagaattttagaagatataaatattagttactatttagtaacccattcattttaaactatgagatgtttttttttgtttttttaagatgtacattgtttggggagccttcgcgccgaagttctacaagagtgtgtttggtttgaa

SEQ ID NO: 210845 - DNA, 959 bp, Zea Mays
ctccccccttccgtcttgttcacttttcaatctcccacgtcgccccatgggccatggcaaggctgcttcgggtgtccctcgctctctctctcgctttccctctctagacttcaatacttttcccctgtccgtgggcaagcccatcatgacgtgagggagggggaggcgatgcccagtctactctagcctgggtcttgagagagaggggagacgagggtgggagtaatacaacagagccaagccgagggaggagagagggagagagagggggagcagggaacccaaagagacaaggcaaggaagcagagagaaactccaagattgggggcgactggtcgctattccagtcgtgcctacaatcagagtgcttgtgacattcacaaaatttgaagagctacagccgctagatgagttcaccacaccaccctcaagtcctgacaacagcaagagcccagcagtgcagccttcttcaagttcctggattcagtggatcaaggcgccctacctccagaacttgtcgacggcacctggcccaagcagccgcgtggaggacatccaggacccattcgccattccttccaattacgtgtggacaacacctgaagagaagaaaaagaagacacaagaaaacaagaacaagtcgaagaaaggcaggagcggcgcatagatagtacgtaggtgatagcattggtgggggggggggggagttaaagttatgctgtgagtgggtgaaaagggctatactcttcaggatctaacaggagggatgattggaagatttggagatttcggctgctctgacgtcgaatattgagaagcgaccgcttgtcttctttcattgtgataacagatctgctgtcaacattctttcgtttaacccatcgtttgggtcctgattatcattgcaatctactgtattggtagattttgaggtgtggcgccttctgatatgattgttt

SEQ ID NO: 210846 - DNA, 3179 bp, Zea Mays
ctacgctatctgtatatacaagacggaagcgcgaccccgaaaaaaaaatgtcctccatctccatcctgcacagatcctgcctccgcctaggtctttcatctggggatatgggctaccgccttcctccaaaagaaatacaggacattgttgatgcaccaccacttcctgtcttgtcattctctccaaacaaagataaaattctgtttctgaagcgtcgagcactgccaccactatcagacattgcaaagcctgaggagaagcttgctggtctaaggattgatggaaattctaatactaggagccgaatgtctttctacactggaataagtatccataagctgttagacgatgggactttgggcccagagaaagaggtgcatggatatccagtaggtgcaaggattaattttgtcacctggtcacaagacggccgtcatatatccttcagtattcgagtcgatgaggaagacagcaaaagtggaaagctgagagtgtggattgctgatgtggagtctggagaagcaaggccactttttaaatcgcctgaaatatacctaaatgctatttttgacagctttgtatgggttaatgattgtacactgctagtctgcactattcctgcgacacgtggagatccaccacataagccatcagttccatctggcccgaaaattcaatctaatgagtcaaagaatgtagtccaagcgagaactttccaagatcttctgaaagatgaatatgatgcaaaactatttgattactatgcaacctcacagcttgtgttggcctctttggatggaacagtgaagccaattggccctccagctatatatacatctgttgatccatcaccggatgataaatacataatgctttcttctatccaccgcccatattcctacattgtaccttgtgggaggtttccaaagaaagttgagttgtggactgtagatggaaagtttattagggaactttgtgatttgcccctggctgaggacattccaattacgatgagcagtgtacgcaagggtaagcgctcaattaattggaggccagacaaaccttcgatgctgtactgggtggagacacaagatggtggagatgcaaaagtagaagtctcccctcgtgacatagtttacatggaaaatgctgagcctataaatggtgaacacccagagattctgcataaacttgaccttcgctatgctggcacctcttggtgtgatgaatctcttgctttagtgtatgaatcttggtttaaaactcggaaaatcagaacatgggtgctctctcctgataaaaaagatgtcagcccacgcgttttattcgaccggtcttcagaagatgtatactctgaccctggctcaccaatgatgcgaagaactgtgatgggaacatatgtcatcgcaaagatcaagaaagaagacggaaatatttatgtcttgttgaatgggatgggtgccacaccagaaggaaatattccattcctcgatttgtttgatataaatactgggagtaaagagcgtatatgggagagcgacagggaaaagtactatgaaactgttgttgcactgatgtcagacaaaactgacggggaactgctccttgatcagttaaagatacttacgtcgaaagaatcaaaaacagaaaacacacaatattacttgcagacttggccagaaaagaatcaagttaagataacaaatttcccccacccatatcctcagcttgcttcattgtataaggaaatgataagataccagcgaaaggatggagttcaacttacagcaaacttatacctgcccccagggtatgattcatcaaaagatggacctttgccatgtctagtttggtcctaccctggtgaatttaaaagcaaagatgctgctggtcaagttcgtggttcccctaatgaatttccagggattggtgctacatctcctcttctttggttagctagagggtttgtgattctgtctggtccgacaatcccaattatcggtgaaggcgatgaagaggccaatgacagatatgtggaacaactagtaacgagtgcagaggctgcagttgaggaagttgtcaaaagaggggtggctcaccctgataaaattgctgtcggtggtcattcatatggtgcattcatgacagctaatctgctggctcacgctcctcatcttttctgctgtggaatcgctcgctctggagcttacaacaggactctaactccatttggttttcagaacgaggatagaacactctgggaggcaacaaacacatatgtcgagatgagccctttcatgtctgcaaacaaaatcaagaaaccaattttacttatccatggagagcaggacaacaattctgggacattgacaatgcagtcagaccgattcttcaatgccttgaaaggtcatggtgcactgtctcgtttggtaatacttccttttgagagccatgggtactctgccagggagagtatcatgcacgtcctctgggagaccgataggtggttgcagaactactgtgtaaatggtactagcaaggttgactcagtgtcagaggctgacagtaaaaacaaaacattgtcagctagtggtggcagtgcagcccgtgaaggtctaaaccctgaggaactctcatcattaccaagatcgcttctgtgatcaacttcagttggtgttcatgaaacattccctggacagcaagcctaaagggaaaaaatagtgtatcgttgcacttctaccttaaccgactaccagggatgccttgattggcctcatatttgtttcgattgctgcaggtgatcatgttactggcatgcaggagccccctacccccccccccccccccacccccaccccacaaatataagaaaggcctagtctctggtggccactgcactcagatatatttgggtcaatttgtattctattggtaatggccaatggaagtcattcttgcgattaatatcatgtacagaaatatagccttttgcagttttgatcccaactcttgcacttggcagcgaactgatacgttggttttctttgacagcaatctaaaataaaataataactaatgagattatcatatgctccaatgtctcgcatcgtcacattttacctgttaccattatttactgcagctgttgtactgacattcgttgcccatttgagaggcgc

SEQ ID NO: 210847 - DNA, 3320 bp, Zea Mays
tacgctatctgtatatacaagacggaagcgcgaccccgaaaaaaaaatgtcctccatctccatcctgcacagatcctgcctccgcctaggtctgctgccgttctcaccactgcgtgctcgcgccaccactctacgccttccccttcctcttcctcagccgcggcggcatctccacctgccccgccggagcgccatgagctctgccgcgtccaggctgtcgcacatcgcggctgccaccggcggcgggggcggcgcggccggggagtcgaatgagtcgccgccggccgcatccgccgcgacccaggaagacgatggtctttcatctggggatatgggctaccgccttcctccaaaagaaatacaggacattgttgatgcaccaccacttcctgtcttgtcattctctccaaacaaagataaaattctgtttctgaagcgtcgagcactgccaccactatcagacattgcaaagcctgaggagaagcttgctggtctaaggattgatggaaattctaatactaggagccgaatgtctttctacactggaataagtatccataagctgttagacgatgggactttgggcccagagaaagaggtgcatggatatccagtaggtgcaaggattaattttgtcacctggtcacaagacggccgtcatatatccttcagtattcgagtcgatgaggaagacagcaaaagtggaaagctgagagtgtggattgctgatgtggagtctggagaagcaaggccactttttaaatcgcctgaaatatacctaaatgctatttttgacagctttgtatgggttaatgattgtacactgctagtctgcactattcctgcgacacgtggagatccaccacataagccatcagttccatctggcccgaaaattcaatctaatgagtcaaagaatgtagtccaagcgagaactttccaagatcttctgaaagatgaatatgatgcaaaactatttgattactatgcaacctcacagcttgtgttggcctctttggatggaacagtgaagccaattggccctccagctatatatacatctgttgatccatcaccggatgataaatacataatgctttcttctatccaccgcccatattcctacattgtaccttgtgggaggtttccaaagaaagttgagttgtggactgtagatggaaagtttattagggaactttgtgatttgcccctggctgaggacattccaattacgatgagcagtgtacgcaagggtaagcgctcaattaattggaggccagacaaaccttcgatgctgtactgggtggagacacaagatggtggagatgcaaaagtagaagtctcccctcgtgacatagtttacatggaaaatgctgagcctataaatggtgaacacccagagattctgcataaacttgaccttcgctatgctggcacctcttggtgtgatgaatctcttgctttagtgtatgaatcttggtttaaaactcggaaaatcagaacatgggtgctctctcctgataaaaaagatgtcagcccacgcgttttattcgaccggtcttcagaagatgtatactctgaccctggctcaccaatgatgcgaagaactgtgatgggaacatatgtcatcgcaaagatcaagaaagaagacggaaatatttatgtcttgttgaatgggatgggtgccacaccagaaggaaatattccattcctcgatttgtttgatataaatactgggagtaaagagcgtatatgggagagcgacagggaaaagtactatgaaactgttgttgcactgatgtcagacaaaactgacggggaactgctccttgatcagttaaagatacttacgtcgaaagaatcaaaaacagaaaacacacaatattacttgcagacttggccagaaaagaatcaagttaagataacaaatttcccccacccatatcctcagcttgcttcattgtataaggaaatgataagataccagcgaaaggatggagttcaacttacagcaaacttatacctgcccccagggtatgattcatcaaaagatggacctttgccatgtctagtttggtcctaccctggtgaatttaaaagcaaagatgctgctggtcaagttcgtggttcccctaatgaatttccagggattggtgctacatctcctcttctttggttagctagagggtttgtgattctgtctggtccgacaatcccaattatcggtgaaggcgatgaagaggccaatgacagatatgtggaacaactagtaacgagtgcagaggctgcagttgaggaagttgtcaaaagaggggtggctcaccctgataaaattgctgtcggtggtcattcatatggtgcattcatgacagctaatctgctggctcacgctcctcatcttttctgctgtggaatcgctcgctctggagcttacaacaggactctaactccatttggttttcagaacgaggatagaacactctgggaggcaacaaacacatatgtcgagatgagccctttcatgtctgcaaacaaaatcaagaaaccaattttacttatccatggagagcaggacaacaattctgggacattgacaatgcagtcagaccgattcttcaatgccttgaaaggtcatggtgcactgtctcgtttggtaatacttccttttgagagccatgggtactctgccagggagagtatcatgcacgtcctctgggagaccgatagctagtggtggcagtgcagcccgtgaaggtctaaaccctgaggaactctcatcattaccaagatcgcttctgtgatcaacttcagttggtgttcatgaaacattccctggacagcaagcctaaagggaaaaaatagtgtatcgttgcacttctaccttaaccgactaccagggatgccttgattggcctcatatttgtttcgattgctgcaggtgatcatgttactggcatgcaggagccccctacccccccccccccccccacccccaccccacaaatataagaaaggcctagtctctggtggccactgcactcagatatatttgggtcaatttgtattctattggtaatggccaatggaagtcattcttgcgattaatatcatgtacagaaatatagccttttgcagttttgatcccaactcttgcacttggcagcgaactgatacgttggttttctttgacagcaatctaaaataaaataataactaatgagattatcatatgctccaatgtctcgcatcgtcacattttacctgttaccattatttactgcagctgttgtactgacattcgttgcccatttgagaggcgc

SEQ ID NO: 210848 - DNA, 3212 bp, Zea Mays
tacgctatctgtatatacaagacggaagcgcgaccccgaaaaaaaaatgtcctccatctccatcctgcacagatcctgcctccgcctaggtctgctgccgttctcaccactgcgtgctcgcgccaccactctacgccttccccttcctcttcctcagccgcggcggcatctccacctgccccgccggagcgccatgagctctgccgcgtccaggctgtcgcacatcgcggctgccaccggcggcgggggcggcgcggccggggagtcgaatgagtcgccgccggccgcatccgccgcgacccaggaagacgatggtctttcatctggggatatgggctaccgccttcctccaaaagaaatacaggacattgttgatgcaccaccacttcctgtcttgtcattctctccaaacaaagataaaattctgtttctgaagcgtcgagcactgccaccactatcagacattgcaaagcctgaggagaagcttgctggtctaaggattgatggaaattctaatactaggagccgaatgtctttctacactggaataagtatccataagctgttagacgatgggactttgggcccagagaaagaggtgcatggatatccagtaggtgcaaggattaattttgtcacctggtcacaagacggccgtcatatatccttcagtattcgagtcgatgaggaagacagcaaaagtggaaagctgagagtgtggattgctgatgtggagtctggagaagcaaggccactttttaaatcgcctgaaatatacctaaatgctatttttgacagctttgtatgggttaatgattgtacactgctagtctgcactattcctgcgacacgtggagatccaccacataagccatcagttccatctggcccgaaaattcaatctaatgagtcaaagaatgtagtccaagcgagaactttccaagatcttctgaaagatgaatatgatgcaaaactatttgattactatgcaacctcacagcttgtgttggcctctttggatggaacagtgaagccaattggccctccagctatatatacatctgttgatccatcaccggatgataaatacataatgctttcttctatccaccgcccatattcctacattgtaccttgtgggaggtttccaaagaaagttgagttgtggactgtagatggaaagtttattagggaactttgtgatttgcccctggctgaggacattccaattacgatgagcagtgtacgcaagggtaagcgctcaattaattggaggccagacaaaccttcgatgctgtactgggtggagacacaagatggtggagatgcaaaagtagaagtctcccctcgtgacatagtttacatggaaaatgctgagcctataaatggtgaacacccagagattctgcataaacttgaccttcgctatgctggcacctcttggtgtgatgaatctcttgctttagtgtatgaatcttggtttaaaactcggaaaatcagaacatgggtgctctctcctgataaaaaagatgtcagcccacgcgttttattcgaccggtcttcagaagatgtatactctgaccctggctcaccaatgatgcgaagaactgtgatgggaacatatgtcatcgcaaagatcaagaaagaagacggaaatatttatgtcttgttgaatgggatgggtgccacaccagaaggaaatattccattcctcgatttgtttgatataaatactgggagtaaagagcgtatatgggagagcgacagggaaaagtactatgaaactgttgttgcactgatgtcagacaaaactgacggggaactgctccttgatcagttaaagatacttacgtcgaaagaatcaaaaacagaaaacacacaatattacttgcagacttggccagaaaagaatcaagttaagataacaaatttcccccacccatatcctcagcttgcttcattgtataaggaaatgataagataccagcgaaaggatggagttcaacttacagcaaacttatacctgcccccagggtatgattcatcaaaagatggacctttgccatgtctagtttggtcctaccctggtgaatttaaaagcaaagatgctgctggtcaagttcgtggttcccctaatgaatttccagggattggtgctacatctcctcttctttggttagctagagggtttgtgattctgtctggtccgacaatcccaattatcggtgaaggcgatgaagaggccaatgacagatatgtggaacaactagtaacgagtgcagaggctgcagttgaggaagttgtcaaaagaggggtggctcaccctgataaaattgctgtcggtggtcattcatatggtgcattcatgacagctaatctgctggctcacgctcctcatcttttctgctgtggaatcgctcgctctggagcttacaacaggactctaactccatttggttttcagaacgaggatagaacactctgggaggcaacaaacacatatgtcgagatgagccctttcatgtctgcaaacaaaatcaagaaaccaattttacttatccatggagagcaggacaacaattctgggacattgacaatgcagtcagaccgattcttcaatgccttgaaaggtcatggtgcactgtctcgtttggtaatacttccttttgagagccatgggtactctgccagggagagtatcatgcacgtcctctgggagaccgataggtggttgcagaactactgtgtaaatggtactagcaaggttgactcagtgtcagaggctgacagtaaaaacaaaacattgtcagctagtggtggcagtgcagcccgtgaaggtctaaaccctgaggaactctcatcattaccaagatcgcttctgtgggtgggctgaacaagttccatggccagcatgcgctcagggagcgagcgaggaagctcgaccagggcatcctgattataaggtttctttcttctgaaacattgctttgttttcttgtttgatcatacacaaggatgttatgttagttatgtagaccagtggacgatccaggattcaatacctgactacctgtggaaccaagcacattagttttaaatgaattaacacaaatattacatgattagcatatatataattgtgtattctgtgaaccccctaggctttacatggatccactgcgacctctctgtgtatgtccatgtgtttgttt

SEQ ID NO: 210849 - DNA, 389 bp, Zea Mays
aagacgctgcagatgcagtcgtcgagctaacaagcagccggacaaggtgaaatgttcccgttaacatcccttgaggcctacactaggcagcacaccaaatggggcgaccgccctgccgccggggagcattcaatcgtcggcggcacaccatcccccattcttcccgttccccaacgtgaagtggcaccatggtcgccactcgccacgcgctcgccgcaggagcaggagcagcgactgcgggccagccagcctccggttgggtagctgttctgcgcaacagcccgagggcgcggatggaggagggaccaaacaggagcggaggggaaggcaggcggtacaactgatgagcggcctctgaagtgagggaaattaactcccggtgagatgca

SEQ ID NO: 210850 - DNA, 5343 bp, Zea Mays
ctgaattgtactgggagggttcaagtattgactgatgatgggtgaccagtggtggtggcatggctgcggaggcgttctgtagtttttttacctcttgcttatgtgcatgctatgtggactgatgctattattcttcaaacagtaccataagctttggtggtgtggtgctgaataccaaccttatgttgtttttgttttccagagggatcaattggatccaagggtgcgattgatgtgaatagtttatctgtttccacagaaatagcaggaaggccatctgatttaatgatcaaatcttgtacttgcactggaaggttatcatcttcttcagctcataatcttacagacacatatatttcaatgacctgcaaaagctgtactggtgaatcaacagaagacagaggtgggccatcgtgtagcggcaagcttaacaatatgggtttggagctcccaaggcctatagatcttgaggttaaatggatgactgtaaaaaaaaggcaaagggacaccaggagagcaagggcttcctttggcgaagacacaagcagggatggaattggatctttctgtttatctggctgtgctacaaatcaagagatggcgcaagacgctccagtctctgaatctgagaagtttggagtatccattcttggtagacgctttagtgatcccatggaaaatgttcctataaaaaagagaagatttcatatggatttttctccatcacctccattcactccattgctagtggatccatatgaaaagataccgggaagctcttctaaagctgtcagatcatatgagaaacattataagcttaagacgcaacaaattgagtataaggtgggaaacaaaggtcgttttggtgacgatgatttttctggtattgatatactagcttctgctgcctgtgaaagtgagatgagtggtggaatattagatggggagtgctcaacgttagctcacctcccagaagaaaggaaactggagaatactactggtagcagcaaattgagtctattacataacatggaggatacgttaaatattcctggtacttcacattgcatatatgatatgcctcttgggtcttctagatctgctccagatatgaagtccttatttgttgccacaccaactatcttagaaaatcttgttgaatcggcatctgctcccaaggttaattgttcattatattctgcactgaacaatgcaaacgaaatagagattgtttctgatgctaagtctacaagtgttgcaattgcaaacagttcagacaatccagaaaaaactataggatgtttaaaggatacagttgtgcaaaccaaccatgccaatgcgactaatgccaagtctacaagtgttgcaattgcaaacagttcagacaatccagaaaaaactataggatgttcacaggatacagttgtgcaaaccaaccatgccaatgcgactcgtgattctaggctgcactgggatcttaatgttgccatggaggcatggggcactgattgcggtgctgttgaggatcctttagttgctactgtaagtgatcatgatgatgccagaaatgacatgaacaaaccagggacatctcatcattttgagtcaagagatggtagtgtagttgatcactctgttgacactcatatggatgatgcactgaaacacgtgtctgctaatacaaaggatacatgtgattctcctgctgacagtccgtctcacccttcgcgcaacttgcagctattggaatctggatatgtagggagtgatgcccttgctgaaacaatggatttgcctgaccagaagaatagcaggttcgcttcagctatggattcacatattagatctgatccagaaccagctcttatcatggagcattttgcttcagcttcacatgtggagaaaatcaatggttcgcatcccgaacctgttcaatgtgatggtttgtctaatatgtcttctgtgaatgtccatattggaagtaattcactccaaacaagtgaattgggcaccacattaaagcctttggctagcatattagtttctgaggaaagcaaaaaccttccaacagtaggcacttcccataaaaaggttactgactttggctggagtgataataagcttgaagaagcttctgaacaaagcatatctgaatctaagaaccaggagcttttggatgttgattcagaaactagtaagaagggtgaacatgacactggtatattttatgccaacgaaaggacaaaatatgcagaaaatctcattcatccagaggacaaccatggatcttctaattgtgatatggctcatgtacatgaagaaaatggtgctgttgcaatgattaattctaaagactctttaattacttgtgccaacagtagcactgtagagacatattacatttcagatgcagctcctcaggttcctgttcccagttcagaatgccacaaactggaatgttttactgatgcgggcagcactgtggattcaaaatctgcagcgcacagctaccagaatggttgcgaaaatgagcttgggaaggtcatatcaaatgttcgttcagatcaatgctatgaaactgacacatcacatattagcaaaaatctagctggggttgaaaaagtttatgtcgaggaggacgattctcaatatgaggatggggaacttagagaatctggtgattgttattgggtggatgatggttatgaagatgttaaacatgccaactggcattatcaggtatcagattacaagaatgaagaagctactcctggcctcacgtctctccatactgattctgttgcaaataatgtggttattcctgttgctaatgacaatggaccacaatctagaaaggaggacattgctgtttcacctgtgtcatctaagtgttcatggttaacaaactgcttagatggtggatctatagctgatggaaagtctcaaagtattcatttgagaggtgatactaacatgtatgggtcaaacccaagccgtgtagcagttagatctgctacaacagtaagccagtctgaaaggtgcaacgatgccctaggtgatatgttaaatatcagaatgaagaacacaggttgggatatgatgcctgaagatcaaaagcactctcaacatgatgcaagggatgtgactgattcgtctaatcggtgtgttttgagctcagatgcggctagagacgatgattcactgcaaaaaaagggactattgaatagagatcttcaaggagtggaacggcaaaaatcatttgacagaccccagaggaatgaattgagcaggctcaaaatctggaagggcaatggactctcatggatcgcatgacatgtatggcacatcccgtcatgttcagacaagcgctcgggtggagtgggtggaaagttcaaaacgtcctcgttctactcggcacaaatcacctgaatattataattatggcacatcaggtccaaggaatgctgcagaagctgctgtggcaaagatgcagagcagtggctttgttgttgcacgtgatggcactttagtaagagctgttgatgctgcaaatgctggtcagatgcccagaaggatgcgaaatcctttaagtagctcatgccacctgatttctggatggggttccccagttgacagggatgaagcctgtgggatgtccagaggccccgtgcatgctaggaaagcatctccagagcgtcactttggtgcaaatagtaaccggtccagtcgatatggttctgaaatggagaaaaatcatactactgatgcaaatttgagttctgtccattgctcgctgtccagtagacaacgaggcaccccgacatctagagcatcacttaacctttcccgtgctcacagcagatctccttctgggtccaggtctcgatccccacatgattgggcacctaggaacagaggcaagatcatggcaaatggaggttcaactttatggaagcatagtagatctccacctaatcacatgactaaaggtgaaattggtagaatggcttcacctcggagacaacctggatatgatgatcgagctatgtgttacagtccactatcaagaaacaacacatactccaagaatgcttcgacatgggttgatggaaggaatggttcagcagtggatatttctgatgatcataataaaaggtattcaaggagaagctcacctctgagaattacctcacggaatgacagatttgatgtcatggactcccaaggacgaccaaggtctggagaattctaccgtccgacacaaggaagacttctttatggttacaatagggaaaataagcatggcagaaatggtgaagatggaagggaatgcactgatagatatgcgaataattctgtcaagcgatatgaccggagtggtgcagtaaagcaatttagaaatgatactggtgataaatttcggactcgtatttctgctcccagatcgccagatctccaaaggggggtgagtcctcggagatttgacagaagctttgagaggtagctgactagctggctgtgaatttgccttatagaactaaaatggaaaataaagacctgtctggatgattgagccaggaaatgttgcaaaaccttgatggagttcaatcataggggttgatggaggactcttggcagcactgtttttttttctgcttctgctgcatatattcaaggcacagaaatgttggaccatgcacttctgtacggggaattcagattaacttcataattttcctgtttcagtctgtaaatatttatgttggtagcagaattacaatcactcctttcagctttattatagctgttcttttttttaatttctgatactttatcatgtttgtcccttttgttttttcaatgggtattgtccctgtacgaggtccattttaacatgatgaatcaattaaattttgagctcaaacacttgtgtgctttttatacttatgtttttcatctggcattttgtatcatcttgttgccagtgtaaaatgttttatttgttgttgaatatacaataatttacagtggcctgtgaccatgttagacaacttttggatcagctgaggtgaataattttcttctttactctacattttctttcaatgccacaaaattgactttgatgtcttcttttcaggagaaaggtcagcttactgcttttgtacatcaaagaggataccacggtattttggccataattagttttgttccatttacgagtatttataataacaactgctttctggagtactggaggaagtctctgaccatctatattcctgccgttgcaaggattagcatgccatttttaaaaaaaatgtatacaagggaataaggaac

SEQ ID NO: 210851 - DNA, 5640 bp, Zea Mays
attctacccgattccagatctacctgttttgctggaaccagttgtttccaaaaggagagaaattggtgctctctagtgcggaggccgatggctgacggcaagaggctgttaacttgatttggcaaggagctgttgtggtagttcgtcagtactgggttcaactcagacagagggaccttggttttggtttagcttctggctttcattgcacgctgcaggataagattgcttgtttgtatgcgctgggctggaacctggaattcggaacttctttctgaattgtactgggagggttcaagtattgactgatgatgggtgaccagtggtggtggcatggctgcggaggcgttctgtagtttttttacctcttgcttatgtgcatgctatgtggactgatgctattattcttcaaacagtaccataagctttggtggtgtggtgctgaataccaaccttatgttgtttttgttttccagagggatcaattggatccaagggtgcgattgatgtgaatagtttatctgtttccacagaaatagcaggaaggccatctgatttaatgatcaaatcttgtacttgcactggaaggttatcatcttcttcagctcataatcttacagacacatatatttcaatgacctgcaaaagctgtactggtgaatcaacagaagacagaggtgggccatcgtgtagcggcaagcttaacaatatgggtttggagctcccaaggcctatagatcttgaggttaaatggatgactgtaaaaaaaaggcaaagggacaccaggagagcaagggcttcctttggcgaagacacaagcagggatggaattggatctttctgtttatctggctgtgctacaaatcaagagatggcgcaagacgctccagtctctgaatctgagaagtttggagtatccattcttggtagacgctttagtgatcccatggaaaatgttcctataaaaaagagaagatttcatatggatttttctccatcacctccattcactccattgctagtggatccatatgaaaagataccgggaagctcttctaaagctgtcagatcatatgagaaacattataagcttaagacgcaacaaattgagtataaggtgggaaacaaaggtcgttttggtgacgatgatttttctggtattgatatactagcttctgctgcctgtgaaagtgagatgagtggtggaatattagatggggagtgctcaacgttagctcacctcccagaagaaaggaaactggagaatactactggtagcagcaaattgagtctattacataacatggaggatacgttaaatattcctggtacttcacattgcatatatgatatgcctcttgggtcttctagatctgctccagatatgaagtccttatttgttgccacaccaactatcttagaaaatcttgttgaatcggcatctgctcccaaggttaattgttcattatattctgcactgaacaatgcaaacgaaatagagattgtttctgatgctaagtctacaagtgttgcaattgcaaacagttcagacaatccagaaaaaactataggatgtttaaaggatacagttgtgcaaaccaaccatgccaatgcgactaatgccaagtctacaagtgttgcaattgcaaacagttcagacaatccagaaaaaactataggatgttcacaggatacagttgtgcaaaccaaccatgccaatgcgactcgtgattctaggctgcactgggatcttaatgttgccatggaggcatggggcactgattgcggtgctgttgaggatcctttagttgctactgtaagtgatcatgatgatgccagaaatgacatgaacaaaccagggacatctcatcattttgagtcaagagatggtagtgtagttgatcactctgttgacactcatatggatgatgcactgaaacacgtgtctgctaatacaaaggatacatgtgattctcctgctgacagtccgtctcacccttcgcgcaacttgcagctattggaatctggatatgtagggagtgatgcccttgctgaaacaatggatttgcctgaccagaagaatagcaggttcgcttcagctatggattcacatattagatctgatccagaaccagctcttatcatggagcattttgcttcagcttcacatgtggagaaaatcaatggttcgcatcccgaacctgttcaatgtgatggtttgtctaatatgtcttctgtgaatgtccatattggaagtaattcactccaaacaagtgaattgggcaccacattaaagcctttggctagcatattagtttctgaggaaagcaaaaaccttccaacagtaggcacttcccataaaaaggttactgactttggctggagtgataataagcttgaagaagcttctgaacaaagcatatctgaatctaagaaccaggagcttttggatgttgattcagaaactagtaagaagggtgaacatgacactggtatattttatgccaacgaaaggacaaaatatgcagaaaatctcattcatccagaggacaaccatggatcttctaattgtgatatggctcatgtacatgaagaaaatggtgctgttgcaatgattaattctaaagactctttaattacttgtgccaacagtagcactgtagagacatattacatttcagatgcagctcctcaggttcctgttcccagttcagaatgccacaaactggaatgttttactgatgcgggcagcactgtggattcaaaatctgcagcgcacagctaccagaatggttgcgaaaatgagcttgggaaggtcatatcaaatgttcgttcagatcaatgctatgaaactgacacatcacatattagcaaaaatctagctggggttgaaaaagtttatgtcgaggaggacgattctcaatatgaggatggggaacttagagaatctggtgattgttattgggtggatgatggttatgaagatgttaaacatgccaactggcattatcaggtatcagattacaagaatgaagaagctactcctggcctcacgtctctccatactgattctgttgcaaataatgtggttattcctgttgctaatgacaatggaccacaatctagaaaggaggacattgctgtttcacctgtgtcatctaagtgttcatggttaacaaactgcttagatggtggatctatagctgatggaaagtctcaaagtattcatttgagaggtgatactaacatgtatgggtcaaacccaagccgtgtagcagttagatctgctacaacagtaagccagtctgaaaggtgcaacgatgccctaggtgatatgttaaatatcagaatgaagaacacaggttgggatatgatgcctgaagatcaaaagcactctcaacatgatgcaagggatgtgactgattcgtctaatcggtgtgttttgagctcagatgcggctagagacgatgattcactgcaaaaaaagggactattgaatagagatcttcaaggagtggaacggcaaaaatcatttgacagaccccagaggaatgaattgagcagatctgacgatggttatggctcaggctcaaaatctggaagggcaatggactctcatggatcgcatgacatgtatggcacatcccgtcatgttcagacaagcgctcgggtggagtgggtggaaagttcaaaacgtcctcgttctactcggcacaaatcacctgaatattataattatggcacatcaggtccaaggaatgctgcagaagctgctgtggcaaagatgcagagcagtggctttgttgttgcacgtgatggcactttagtaagagctgttgatgctgcaaatgctggtcagatgcccagaaggatgcgaaatcctttaagtagctcatgccacctgatttctggatggggttccccagttgacagggatgaagcctgtgggatgtccagaggccccgtgcatgctaggaaagcatctccagagcgtcactttggtgcaaatagtaaccggtccagtcgatatggttctgaaatggagaaaaatcatactactgatgcaaatttgagttctgtccattgctcgctgtccagtagacaacgaggcaccccgacatctagagcatcacttaacctttcccgtgctcacagcagatctccttctgggtccaggtctcgatccccacatgattgggcacctaggaacagaggcaagatcatggcaaatggaggttcaactttatggaagcatagtagatctccacctaatcacatgactaaaggtgaaattggtagaatggcttcacctcggagacaacctggatatgatgatcgagctatgtgttacagtccactatcaagaaacaacacatactccaagaatgcttcgacatgggttgatggaaggaatggttcagcagtggatatttctgatgatcataataaaaggtattcaaggagaagctcacctctgagaattacctcacggaatgacagatttgatgtcatggactcccaaggacgaccaaggtctggagaattctaccgtccgacacaaggaagacttctttatggttacaatagggaaaataagcatggcagaaatggtgaagatggaagggaatgcactgatagatatgcgaataattctgtcaagcgatatgaccggagtggtgcagtaaagcaatttagaaatgatactggtgataaatttcggactcgtatttctgctcccagatcgccagatctccaaaggggggtgagtcctcggagatttgacagaagctttgagaggtagctgactagctggctgtgaatttgccttatagaactaaaatggaaaataaagacctgtctggatgattgagccaggaaatgttgcaaaaccttgatggagttcaatcataggggttgatggaggactcttggcagcactgtttttttttctgcttctgctgcatatattcaaggcacagaaatgttggaccatgcacttctgtacggggaattcagattaacttcataattttcctgtttcagtctgtaaatatttatgttggtagcagaattacaatcactcctttcagctttattatagctgttcttttttttaatttctgatactttatcatgtttgtcccttttgttttttcaatgggtattgtccctgtacgaggtccattttaacatgatgaatcaattaaattttgagctcaaacacttgtgtgctttttatacttatgtttttcatctggcattttgtatcatcttgttgccagtgtaaaatgttttatttgttgttgaatatacaataatttacagtggcctgtgaccatgttagacaacttttggatcagctgaggtgaataattttcttctttactctacattttctttcaatgccacaaaattgactttgatgtcttcttttcaggagaaaggtcagcttactgcttttgtacatcaaagaggataccacggtattttggccataattagttttgttccatttacgagtatttataataacaactgctttctggagtactggaggaagtctctgaccatctatattcctgccgttgcaaggattagcatgccatttttaaaaaaaatgtatacaagggaataaggaac

SEQ ID NO: 210852 - DNA, 5199 bp, Zea Mays
ggattctggactgctgagcgcggatttctcctcagagggatcaattggatccaagggtgcgattgatgtgaatagtttatctgtttccacagaaatagcaggaaggccatctgatttaatgatcaaatcttgtacttgcactggaaggttatcatcttcttcagctcataatcttacagacacatatatttcaatgacctgcaaaagctgtactggtgaatcaacagaagacagaggtgggccatcgtgtagcggcaagcttaacaatatgggtttggagctcccaaggcctatagatcttgaggttaaatggatgactgtaaaaaaaaggcaaagggacaccaggagagcaagggcttcctttggcgaagacacaagcagggatggaattggatctttctgtttatctggctgtgctacaaatcaagagatggcgcaagacgctccagtctctgaatctgagaagtttggagtatccattcttggtagacgctttagtgatcccatggaaaatgttcctataaaaaagagaagatttcatatggatttttctccatcacctccattcactccattgctagtggatccatatgaaaagataccgggaagctcttctaaagctgtcagatcatatgagaaacattataagcttaagacgcaacaaattgagtataaggtgggaaacaaaggtcgttttggtgacgatgatttttctggtattgatatactagcttctgctgcctgtgaaagtgagatgagtggtggaatattagatggggagtgctcaacgttagctcacctcccagaagaaaggaaactggagaatactactggtagcagcaaattgagtctattacataacatggaggatacgttaaatattcctggtacttcacattgcatatatgatatgcctcttgggtcttctagatctgctccagatatgaagtccttatttgttgccacaccaactatcttagaaaatcttgttgaatcggcatctgctcccaaggttaattgttcattatattctgcactgaacaatgcaaacgaaatagagattgtttctgatgctaagtctacaagtgttgcaattgcaaacagttcagacaatccagaaaaaactataggatgtttaaaggatacagttgtgcaaaccaaccatgccaatgcgactaatgccaagtctacaagtgttgcaattgcaaacagttcagacaatccagaaaaaactataggatgttcacaggatacagttgtgcaaaccaaccatgccaatgcgactcgtgattctaggctgcactgggatcttaatgttgccatggaggcatggggcactgattgcggtgctgttgaggatcctttagttgctactgtaagtgatcatgatgatgccagaaatgacatgaacaaaccagggacatctcatcattttgagtcaagagatggtagtgtagttgatcactctgttgacactcatatggatgatgcactgaaacacgtgtctgctaatacaaaggatacatgtgattctcctgctgacagtccgtctcacccttcgcgcaacttgcagctattggaatctggatatgtagggagtgatgcccttgctgaaacaatggatttgcctgaccagaagaatagcaggttcgcttcagctatggattcacatattagatctgatccagaaccagctcttatcatggagcattttgcttcagcttcacatgtggagaaaatcaatggttcgcatcccgaacctgttcaatgtgatggtttgtctaatatgtcttctgtgaatgtccatattggaagtaattcactccaaacaagtgaattgggcaccacattaaagcctttggctagcatattagtttctgaggaaagcaaaaaccttccaacagtaggcacttcccataaaaaggttactgactttggctggagtgataataagcttgaagaagcttctgaacaaagcatatctgaatctaagaaccaggagcttttggatgttgattcagaaactagtaagaagggtgaacatgacactggtatattttatgccaacgaaaggacaaaatatgcagaaaatctcattcatccagaggacaaccatggatcttctaattgtgatatggctcatgtacatgaagaaaatggtgctgttgcaatgattaattctaaagactctttaattacttgtgccaacagtagcactgtagagacatattacatttcagatgcagctcctcaggttcctgttcccagttcagaatgccacaaactggaatgttttactgatgcgggcagcactgtggattcaaaatctgcagcgcacagctaccagaatggttgcgaaaatgagcttgggaaggtcatatcaaatgttcgttcagatcaatgctatgaaactgacacatcacatattagcaaaaatctagctggggttgaaaaagtttatgtcgaggaggacgattctcaatatgaggatggggaacttagagaatctggtgattgttattgggtggatgatggttatgaagatgttaaacatgccaactggcattatcaggtatcagattacaagaatgaagaagctactcctggcctcacgtctctccatactgattctgttgcaaataatgtggttattcctgttgctaatgacaatggaccacaatctagaaaggaggacattgctgtttcacctgtgtcatctaagtgttcatggttaacaaactgcttagatggtggatctatagctgatggaaagtctcaaagtattcatttgagaggtgatactaacatgtatgggtcaaacccaagccgtgtagcagttagatctgctacaacagtaagccagtctgaaaggtgcaacgatgccctaggtgatatgttaaatatcagaatgaagaacacaggttgggatatgatgcctgaagatcaaaagcactctcaacatgatgcaagggatgtgactgattcgtctaatcggtgtgttttgagctcagatgcggctagagacgatgattcactgcaaaaaaagggactattgaatagagatcttcaaggagtggaacggcaaaaatcatttgacagaccccagaggaatgaattgagcagatctgacgatggttatggctcaggctcaaaatctggaagggcaatggactctcatggatcgcatgacatgtatggcacatcccgtcatgttcagacaagcgctcgggtggagtgggtggaaagttcaaaacgtcctcgttctactcggcacaaatcacctgaatattataattatggcacatcaggtccaaggaatgctgcagaagctgctgtggcaaagatgcagagcagtggctttgttgttgcacgtgatggcactttagtaagagctgttgatgctgcaaatgctggtcagatgcccagaaggatgcgaaatcctttaagtagctcatgccacctgatttctggatggggttccccagttgacagggatgaagcctgtgggatgtccagaggccccgtgcatgctaggaaagcatctccagagcgtcactttggtgcaaatagtaaccggtccagtcgatatggttctgaaatggagaaaaatcatactactgatgcaaatttgagttctgtccattgctcgctgtccagtagacaacgaggcaccccgacatctagagcatcacttaacctttcccgtgctcacagcagatctccttctgggtccaggtctcgatccccacatgattgggcacctaggaacagaggcaagatcatggcaaatggaggttcaactttatggaagcatagtagatctccacctaatcacatgactaaaggtgaaattggtagaatggcttcacctcggagacaacctggatatgatgatcgagctatgtgttacagtccactatcaagaaacaacacatactccaagaatgcttcgacatgggttgatggaaggaatggttcagcagtggatatttctgatgatcataataaaaggtattcaaggagaagctcacctctgagaattacctcacggaatgacagatttgatgtcatggactcccaaggacgaccaaggtctggagaattctaccgtccgacacaaggaagacttctttatggttacaatagggaaaataagcatggcagaaatggtgaagatggaagggaatgcactgatagatatgcgaataattctgtcaagcgatatgaccggagtggtgcagtaaagcaatttagaaatgatactggtgataaatttcggactcgtatttctgctcccagatcgccagatctccaaaggggggtgagtcctcggagatttgacagaagctttgagaggtagctgactagctggctgtgaatttgccttatagaactaaaatggaaaataaagacctgtctggatgattgagccaggaaatgttgcaaaaccttgatggagttcaatcataggggttgatggaggactcttggcagcactgtttttttttctgcttctgctgcatatattcaaggcacagaaatgttggaccatgcacttctgtacggggaattcagattaacttcataattttcctgtttcagtctgtaaatatttatgttggtagcagaattacaatcactcctttcagctttattatagctgttcttttttttaatttctgatactttatcatgtttgtcccttttgttttttcaatgggtattgtccctgtacgaggtccattttaacatgatgaatcaattaaattttgagctcaaacacttgtgtgctttttatacttatgtttttcatctggcattttgtatcatcttgttgccagtgtaaaatgttttatttgttgttgaatatacaataatttacagtggcctgtgaccatgttagacaacttttggatcagctgaggtgaataattttcttctttactctacattttctttcaatgccacaaaattgactttgatgtcttcttttcaggagaaaggtcagcttactgcttttgtacatcaaagaggataccacggtattttggccataattagttttgttccatttacgagtatttataataacaactgctttctggagtactggaggaagtctctgaccatctatattcctgccgttgcaaggattagcatgccatttttaaaaaaaatgtatacaagggaataaggaac

SEQ ID NO: 210853 - DNA, 5535 bp, Zea Mays
tggtcttctccccccacccgctggcggcgaagtagcacgaggaaggggtccaataaaaaaaaaaatcgccaccggcggcgacggcgaggcggcatcagcggatacagcagcgggagccgcggcaggggacaggcgttgccgatcgatcggcctggcctggcgcggcagaggtcaaaagcgaaaaggaggagccgcaggaatttcttggcaccgaggcgcacgcaaggaatccagcgagtgagggatgggacggcagttttcggattcttcctgctgagtcctaggaactcacgcgcacgagcgtggtcaggagggagaggcttacgcggacgcggcggcgctggttttgatgaggaaagctggagcaaaagagggatcaattggatccaagggtgcgattgatgtgaatagtttatctgtttccacagaaatagcaggaaggccatctgatttaatgatcaaatcttgtacttgcactggaaggttatcatcttcttcagctcataatcttacagacacatatatttcaatgacctgcaaaagctgtactggtgaatcaacagaagacagaggtgggccatcgtgtagcggcaagcttaacaatatgggtttggagctcccaaggcctatagatcttgaggttaaatggatgactgtaaaaaaaaggcaaagggacaccaggagagcaagggcttcctttggcgaagacacaagcagggatggaattggatctttctgtttatctggctgtgctacaaatcaagagatggcgcaagacgctccagtctctgaatctgagaagtttggagtatccattcttggtagacgctttagtgatcccatggaaaatgttcctataaaaaagagaagatttcatatggatttttctccatcacctccattcactccattgctagtggatccatatgaaaagataccgggaagctcttctaaagctgtcagatcatatgagaaacattataagcttaagacgcaacaaattgagtataaggtgggaaacaaaggtcgttttggtgacgatgatttttctggtattgatatactagcttctgctgcctgtgaaagtgagatgagtggtggaatattagatggggagtgctcaacgttagctcacctcccagaagaaaggaaactggagaatactactggtagcagcaaattgagtctattacataacatggaggatacgttaaatattcctggtacttcacattgcatatatgatatgcctcttgggtcttctagatctgctccagatatgaagtccttatttgttgccacaccaactatcttagaaaatcttgttgaatcggcatctgctcccaaggttaattgttcattatattctgcactgaacaatgcaaacgaaatagagattgtttctgatgctaagtctacaagtgttgcaattgcaaacagttcagacaatccagaaaaaactataggatgtttaaaggatacagttgtgcaaaccaaccatgccaatgcgactaatgccaagtctacaagtgttgcaattgcaaacagttcagacaatccagaaaaaactataggatgttcacaggatacagttgtgcaaaccaaccatgccaatgcgactcgtgattctaggctgcactgggatcttaatgttgccatggaggcatggggcactgattgcggtgctgttgaggatcctttagttgctactgtaagtgatcatgatgatgccagaaatgacatgaacaaaccagggacatctcatcattttgagtcaagagatggtagtgtagttgatcactctgttgacactcatatggatgatgcactgaaacacgtgtctgctaatacaaaggatacatgtgattctcctgctgacagtccgtctcacccttcgcgcaacttgcagctattggaatctggatatgtagggagtgatgcccttgctgaaacaatggatttgcctgaccagaagaatagcaggttcgcttcagctatggattcacatattagatctgatccagaaccagctcttatcatggagcattttgcttcagcttcacatgtggagaaaatcaatggttcgcatcccgaacctgttcaatgtgatggtttgtctaatatgtcttctgtgaatgtccatattggaagtaattcactccaaacaagtgaattgggcaccacattaaagcctttggctagcatattagtttctgaggaaagcaaaaaccttccaacagtaggcacttcccataaaaaggttactgactttggctggagtgataataagcttgaagaagcttctgaacaaagcatatctgaatctaagaaccaggagcttttggatgttgattcagaaactagtaagaagggtgaacatgacactggtatattttatgccaacgaaaggacaaaatatgcagaaaatctcattcatccagaggacaaccatggatcttctaattgtgatatggctcatgtacatgaagaaaatggtgctgttgcaatgattaattctaaagactctttaattacttgtgccaacagtagcactgtagagacatattacatttcagatgcagctcctcaggttcctgttcccagttcagaatgccacaaactggaatgttttactgatgcgggcagcactgtggattcaaaatctgcagcgcacagctaccagaatggttgcgaaaatgagcttgggaaggtcatatcaaatgttcgttcagatcaatgctatgaaactgacacatcacatattagcaaaaatctagctggggttgaaaaagtttatgtcgaggaggacgattctcaatatgaggatggggaacttagagaatctggtgattgttattgggtggatgatggttatgaagatgttaaacatgccaactggcattatcaggtatcagattacaagaatgaagaagctactcctggcctcacgtctctccatactgattctgttgcaaataatgtggttattcctgttgctaatgacaatggaccacaatctagaaaggaggacattgctgtttcacctgtgtcatctaagtgttcatggttaacaaactgcttagatggtggatctatagctgatggaaagtctcaaagtattcatttgagaggtgatactaacatgtatgggtcaaacccaagccgtgtagcagttagatctgctacaacagtaagccagtctgaaaggtgcaacgatgccctaggtgatatgttaaatatcagaatgaagaacacaggttgggatatgatgcctgaagatcaaaagcactctcaacatgatgcaagggatgtgactgattcgtctaatcggtgtgttttgagctcagatgcggctagagacgatgattcactgcaaaaaaagggactattgaatagagatcttcaaggagtggaacggcaaaaatcatttgacagaccccagaggaatgaattgagcagatctgacgatggttatggctcaggctcaaaatctggaagggcaatggactctcatggatcgcatgacatgtatggcacatcccgtcatgttcagacaagcgctcgggtggagtgggtggaaagttcaaaacgtcctcgttctactcggcacaaatcacctgaatattataattatggcacatcaggtccaaggaatgctgcagaagctgctgtggcaaagatgcagagcagtggctttgttgttgcacgtgatggcactttagtaagagctgttgatgctgcaaatgctggtcagatgcccagaaggatgcgaaatcctttaagtagctcatgccacctgatttctggatggggttccccagttgacagggatgaagcctgtgggatgtccagaggccccgtgcatgctaggaaagcatctccagagcgtcactttggtgcaaatagtaaccggtccagtcgatatggttctgaaatggagaaaaatcatactactgatgcaaatttgagttctgtccattgctcgctgtccagtagacaacgaggcaccccgacatctagagcatcacttaacctttcccgtgctcacagcagatctccttctgggtccaggtctcgatccccacatgattgggcacctaggaacagaggcaagatcatggcaaatggaggttcaactttatggaagcatagtagatctccacctaatcacatgactaaaggtgaaattggtagaatggcttcacctcggagacaacctggatatgatgatcgagctatgtgttacagtccactatcaagaaacaacacatactccaagaatgcttcgacatgggttgatggaaggaatggttcagcagtggatatttctgatgatcataataaaaggtattcaaggagaagctcacctctgagaattacctcacggaatgacagatttgatgtcatggactcccaaggacgaccaaggtctggagaattctaccgtccgacacaaggaagacttctttatggttacaatagggaaaataagcatggcagaaatggtgaagatggaagggaatgcactgatagatatgcgaataattctgtcaagcgatatgaccggagtggtgcagtaaagcaatttagaaatgatactggtgataaatttcggactcgtatttctgctcccagatcgccagatctccaaaggggggtgagtcctcggagatttgacagaagctttgagaggtagctgactagctggctgtgaatttgccttatagaactaaaatggaaaataaagacctgtctggatgattgagccaggaaatgttgcaaaaccttgatggagttcaatcataggggttgatggaggactcttggcagcactgtttttttttctgcttctgctgcatatattcaaggcacagaaatgttggaccatgcacttctgtacggggaattcagattaacttcataattttcctgtttcagtctgtaaatatttatgttggtagcagaattacaatcactcctttcagctttattatagctgttcttttttttaatttctgatactttatcatgtttgtcccttttgttttttcaatgggtattgtccctgtacgaggtccattttaacatgatgaatcaattaaattttgagctcaaacacttgtgtgctttttatacttatgtttttcatctggcattttgtatcatcttgttgccagtgtaaaatgttttatttgttgttgaatatacaataatttacagtggcctgtgaccatgttagacaacttttggatcagctgaggtgaataattttcttctttactctacattttctttcaatgccacaaaattgactttgatgtcttcttttcaggagaaaggtcagcttactgcttttgtacatcaaagaggataccacggtattttggccataattagttttgttccatttacgagtatttataataacaactgctttctggagtactggaggaagtctctgaccatctatattcctgccgttgcaaggattagcatgccatttttaaaaaaaatgtatacaagggaataaggaac

SEQ ID NO: 210854 - DNA, 4224 bp, Zea Mays
ttctgctcggtgccccctctcctctacagctctactctcccctcccgcggaggcgtggacggcatggagttgggggagcccggggcccgtggatgccgtggtcccgtgcgattactcaatgatgggaacagagtgcatcatggccacactcggcggggatcctgaaccctcaattccacctggattcggaccttttgttgccctcgcgctacagggcatccaaaacaatgccaaatcagctgatgctcattctagttctgctcaagcagcacactgcatggagaaagatgttgaagttctggaacacggttcggcgcatggttggagtgacactcctgctagtacttcagggacccatagttgcaggaggtcacttcgtaacaggcctccaatagactatagccagttcgaccttatctcggacgaagaatctgatgttgaatcagcagaaaagggagtgggattagtgagacacagacgacaattaccgaaaggagtacttcggggatgcgcacaatgtgctgattgtcaaaaggttgttgcaaggtggaatccatctggtgcaaggaggcctgttcttgaggaagctcctgttttctatccatccgaagaggaattcaaggacaccttaaaatacattgagagtatacggtctacagcagaaccatatggaatttgtcgtattgtcccgccgccttcatggaaacctccatgccttcttaaagagaagaacatatgggaatgctcaaaattttgtactcgggtacagaaggttgacaagctccaaaaccgtaaatcatccaagaagggcagaagaggtgggcaaaaccaagagaggtttggatttgaacctggacctgagttcacacttcagacatttaagaagtatgcagatgatttccgtgaacaatattttaagaaagaagtgcccgcggactcaccaccatcagtagaagacattgaaggcgagtattggcgtatagtcgaaaagcctactgaagagatagaggtagtatatggtgctgatttggagactggaacttttggtagcggcttcccaaagtcttctcccgaagtaaaatctgatgttgagcataagtacttagagtctggttggaacctaaacaacttgcctagactacaaggttcagtactatcttttgagggcggtgacatctctggtgttttggtcccttggatgtatgtcggaatgtgcttttcatcattctgctggcatgttgaagaccatcatttgtactcactgaactacatgcattggggtgctccaaagatgtggtatggagttccaggaaaggatgctgtaaatttggaggcagcaatgaggaaacacctacctgacttgtttgaggaacaacctgatttgcttcacaacctggttactcaattttcaacatcattgcttaaatctgaaggagtaccagtctaccgatgtgttcagcatgagggagagtttgtcctaacgttccctcgggcataccatgctggtttcaactgtggcttcaattgtgcagaagctgttaatgtggcaccaattgattggttaccaattggacaggatgcagtcgagctttatcgtaagcaagctcggaaaattactgtttcccatgataagctgttgctaggggctgctagagaagcaataagagctcattgggatattctgttccttaagagaaatactgctgataacttgaggtggaaaagcatgtgtggacttgacagcactatatgcaaatcgcttaaggcaagaatcgatttggagttggcgcaaagacaaaatatatgctctccatctcaatctagaaaaatggatgctgaatttgattctactgatagagagtgtgcattgtgctattatgatctgcatctttctgcttctggctgtccatgttgcccagggaaatatacctgccttgtacatgcaaagcagctttgctcatgtgactgggacaaaagatttttccttttccgttatgatatcaatgagttaaatatgttggctgatgctttaggtgggaagttaagtgcaattcacagatggggtgtctctcatcttggattaagtttgagatcatgtgtcaaaagagaaaaagaccaagattcgaagactcctcgcagagtagctgatggccccagaaggtcctacatgtctcaggcgtcaacagtatcattggcaccttcgttggtttgcaatgaacagaacaacaatggtaataagatgctggacaaagctagtttggaaacggatacttgtccttttacagagcaaataaaatctggaactatttcactacaggaggcacacatgaagactgaggtatcctgtacactaaacagcagtgtcattcctgaaggccataaaagctcactaagcttgccagttccttctggccactcactttcttccaattttgcgacaaggtctttaagtactgcaggagaatctgtgaaaaacacatatgacttggtagtatttaaagggagtagagaatcttcgcgggctggagactgtatctcttcgcctggtgtgcatcataacataccgccaataatgattgatcaaggaagcaacatgaatcctagtatggagagctcaaacaattcacataggctgatggcatctaacactaatgcaactcagttttactcttacaaggaccaaatgcatgtaacaccagagactagggcctcagtgatgacagaaaaagatagcagtcaagcttctgctgcatcaagtcagccctttgcgggaactgttttaagagcacaaagtgtatctcaggaagcttcacctagcgtctttacttcaaagcctctcatagattcttcacttgtgaaaaatacatatgttggtttaagttcaggcggtgcccatattggacatccaaattttggtaaccagcaaccaagtgacgaatgccttaaaagaaaatctgaatctctatctggttcagaagcaaggggtcattcagctgcattggtgcaacctgctctaggaaatcataatgggagtggaggtgcacacaagggccttcggatggctaacgttgtacatcgattcaagagcttagttgaatctttggaaattggtgttgtgctatctgggaggttgtggtcctcaagccaagcaatcttcccaaaagggttcaggagcagagtaaaatacttcagcatcgtggatccaacacaaatggcatactacatatctgaaatattagacgccggaccacagggacctctgtttatggtgactctggaaaactgtccaggcgaactttttatcaacgtctctcctgccaagtgctggagcatggtccgtgagaggctgaatatggaaatacggaggcaactcagtacgggaagagctaatcttcctgcactacagccaccgggatcagttgatggttttgaaatgttcgggttgctgtcaccggcaatagttcaggcaatcgaggcacgggatagagatcgcatctgcacagagtactggagatccaggcctcatgttgtcactgaagatcgtgcgacggcgccacctcaggctcagggtcctctgcatgcgctgaggggtctattccagcgagccaaccgcaatgagctgctagccctacggagtctactggtgagcaacatcagcccggacgacttctccaggcggcaggctacccaaatcctcgacgaggagatcgccaagcagtggcgctgacaggcgtaaatacaactctgtaatctcttgatggcatgacgggaccaagcagttttcgaccctgacgagagagcggctccttccgttgccccccgtgcccattctttgtattgttgtgtccatgctccatgccataagatcttgtccccatttggatgcgatcgaatgaccgacgacggctcatcaactgaccagcgtacataccgtctgtctggaaactcttgtggtgttgtaggtttagttatttttcttttaaacgaaatatttaaccttcttttttagtgaggctgaaacgcaggctcatgagacctgagttttttacatgaaaggttgtgtacatcagaaatgtgcagggcctgttgacactactagcagataggcgtgatttttgtgccgagttggtcagagtcgaacagtccatgtgcttcaggtactcatcctgcatggttgactgggagttggtacttgcaagctgctgttacagaccagtagtccaa

SEQ ID NO: 210855 - DNA, 2855 bp, Zea Mays
cactgtccgctggcgtatgctccactggttactcaattttcaacatcattgcttaaatctgaaggagtaccagtctaccgatgtgttcagcatgagggagagtttgtcctaacgttccctcgggcataccatgctggtttcaactgtggcttcaattgtgcagaagctgttaatgtggcaccaattgattggttaccaattggacaggatgcagtcgagctttatcgtaagcaagctcggaaaattactgtttcccatgataagctgttgctaggggctgctagagaagcaataagagctcattgggatattctgttccttaagagaaatactgctgataacttgaggtggaaaagcatgtgtggacttgacagcactatatgcaaatcgcttaaggcaagaatcgatttggagttggcgcaaagacaaaatatatgctctccatctcaatctagaaaaatggatgctgaatttgattctactgatagagagtgtgcattgtgctattatgatctgcatctttctgcttctggctgtccatgttgcccagggaaatatacctgccttgtacatgcaaagcagctttgctcatgtgactgggacaaaagatttttccttttccgttatgatatcaatgagttaaatatgttggctgatgctttaggtgggaagttaagtgcaattcacagatggggtgtctctcatcttggattaagtttgagatcatgtgtcaaaagagaaaaagaccaagattcgaagactcctcgcagagtagctgatggccccagaaggtcctacatgtctcaggcgtcaacagtatcattggcaccttcgttggtttgcaatgaacagaacaacaatggtaataagatgctggacaaagctagtttggaaacggatacttgtccttttacagagcaaataaaatctggaactatttcactacaggaggcacacatgaagactgaggtatcctgtacactaaacagcagtgtcattcctgaaggccataaaagctcactaagcttgccagttccttctggccactcactttcttccaattttgcgacaaggtctttaagtactgcaggagaatctgtgaaaaacacatatgacttggtagtatttaaagggagtagagaatcttcgcgggctggagactgtatctcttcgcctggtgtgcatcataacataccgccaataatgattgatcaaggaagcaacatgaatcctagtatggagagctcaaacaattcacataggctgatggcatctaacactaatgcaactcagttttactcttacaaggaccaaatgcatgtaacaccagagactagggcctcagtgatgacagaaaaagatagcagtcaagcttctgctgcatcaagtcagccctttgcgggaactgttttaagagcacaaagtgtatctcaggaagcttcacctagcgtctttacttcaaagcctctcatagattcttcacttgtgaaaaatacatatgttggtttaagttcaggcggtgcccatattggacatccaaattttggtaaccagcaaccaagtgacgaatgccttaaaagaaaatctgaatctctatctggttcagaagcaaggggtcattcagctgcattggtgcaacctgctctaggaaatcataatgggagtggaggtgcacacaagggccttcggatggctaacgttgtacatcgattcaagagcttagttgaatctttggaaattggtgttgtgctatctgggaggttgtggtcctcaagccaagcaatcttcccaaaagggttcaggagcagagtaaaatacttcagcatcgtggatccaacacaaatggcatactacatatctgaaatattagacgccggaccacagggacctctgtttatggtgactctggaaaactgtccaggcgaactttttatcaacgtctctcctgccaagtgctggagcatggtccgtgagaggctgaatatggaaatacggaggcaactcagtacgggaagagctaatcttcctgcactacagccaccgggatcagttgatggttttgaaatgttcgggttgctgtcaccggcaatagttcaggcaatcgaggcacgggatagagatcgcatctgcacagagtactggagatccaggcctcatgttgtcactgaagatcgtgcgacggcgccacctcaggctcagggtcctctgcatgcgctgaggggtctattccagcgagccaaccgcaatgagctgctagccctacggagtctactggtgagcaacatcagcccggacgacttctccaggcggcaggctacccaaatcctcgacgaggagatcgccaagcagtggcgctgacaggcgtaaatacaactctgtaatctcttgatggcatgacgggaccaagcagttttcgaccctgacgagagagcggctccttccgttgccccccgtgcccattctttgtattgttgtgtccatgctccatgccataagatcttgtccccatttggatgcgatcgaatgaccgacgacggctcatcaactgaccagcgtacataccgtctgtctggaaactcttgtggtgttgtaggtttagttatttttcttttaaacgaaatatttaaccttcttttttagtgaggctgaaacgcaggctcatgagacctgagttttttacatgaaaggttgtgtacatcagaaatgtgcagggcctgttgacactactagcagataggcgtgatttttgtgccgagttggtcagagtcgaacagtccatgtgcttcaggtactcatcctgcatggttgactgggagttggtacttgcaagctgctgttacagaccagtagtccaa

SEQ ID NO: 210856 - DNA, 899 bp, Zea Mays
atgacacggggcccacttagttgcttatgtgagcaacccaacgctattattacgccacgataacccaaacaaaccaatcatcctctccgtgtaggccgcgggattccgtgtccctctccaatccggcgtagccatcgtcgccggatacaggatccggtccccgcgatggagccctcaccaacctcctcctcgccggctgtggcgcgccggttgtcgccggagcctcgccggaggccgaggaccgcaaggacgatgttggtgtcgatggagatggcatggcgacgtcgtcggttgcgagtgactccgattacgagacgacgcagatgtgtgaccttcttaaatctaaggttggatcactcgagttccttcaaaagctcaatggtattcagaagtcagtagatcagaattgtgcagttgaacctgatacatcatgggatataataaagtcggatttgtgggaagatggtgactcagatgatggatatgttcttgttaaacaggaagatgtggttgatgggatcacttcctttatggctgcatgcctgttatcacttaaaagaaccaaggacctgcctcctgatcaacttcagaaagcacttaggaagatgttttcagctgaaaagaagaaaagtaaaatcagaaaggcttgggatggaactaaactcatttataatgttacttcatggggcgccactgctgttgggttctacaataatcgagcattgcttacggtcgcaagtacagcatttcggacttcctgccgtgtgatatccaagttcctttgaatattgtgtagggaaatataactttacctcggcacgtacaatcctacagtagctgaacatgagacattcacgtccacgtcgtcttatattgttcacataaacaaagcagtacgg

SEQ ID NO: 210857 - DNA, 3254 bp, Zea Mays
cggaccctgcggcccagcttttttcttcactctctgcaacccattccccccctgcattctctctctgttctcttgtgcgtgcctgcgctctgtagtgacgacgactgggcggcggccgctgccgccgacctacgtgcgcaggtctccatcttccggaccttcgctggagacgagcacccaccaccagaaattttctatacatttaagatgtacagggcctcaaatttcatacctgatcctaatcaggtgcttctagatgccaatccattaagggaaccttcctgcctttggatcgttcactactttcagcgccactacaaacggtgtttcttatacgggcaccagtggtaatggtgccattgatgccactcctatctctgcatacaagacaagatcaagcatatcacttgatgatgatgatgatgagccttactcgggcaaccaaggtttggcatctgaacggaaggctaggagaggccgtcctcctggttctggtcgtgatggatcaaatggtaagttaaagcgccctaagcctacatacaagaattttgttgctggcaaagagcttgtctttctgtcttctacatccgatcccagggagtttgtggaatcagttcacatgacttttgaggccctcaggcgaagacatctgcagatggatgaaacacaggatgctagcagacgtgcagacctgaaggctggtgccatcatgatggccagtaacatcagggcgaattcaggcaagagggaggttatgagaatgaggatgatgacacagatgtgctcgtgtacagtggtcaaggtggaaataataggaatactgaggagaggcatgatcagaagcttgagaggggtaacctagctcttgagaggagtttgcataggaagaatgagataagggttgtacgcggcttcaaggatccattttgcctaactgggaaaatttacatatatgatggtctctacaagattcacgagtcctggaaggagagaacaaagtacggtgtcaattgcttcaagtacaagctgctgcgggaacctggacagcgtgatggagctgcattatggaagatgactcagagatggatagataatcctgctaccagaggcagggtcctactagctgatctgtcatctaaggctgaaattttgcctgtttgtctcgtcaatgaggtagaccatgagaaaggacctgtacatttcacttatactaatcaggtcaaatacttgaggcctctcagttctatgaaaaagttgcagggctgtggatgccagagcgtttgcttgcctggcgacgccagttgtgcttgtggacaacataatggaggcgatttacccttcagttcatcaggattgttgtcatgccgcaaaccaatagtctacgaatgtggtgaatcttgcaactgttctacaaattgcaggaacagagtgacccaaaaagggtccaggctacatttcgaggtcttcaggaccacaaatcgaggctggggtcttcgctgctgggaacctattcgtgctggttcatttatatgtgagtatgccggtgaggttattgatgagctcaaatttaatttgaatgatagtgaagatgattacatttttcaaactgtatgccctggcgagaagacattaaaatggaattatggacctgaactgataggtgaagtaagcacatatgtatcgcctgatgaatttgaaccactgcctgtcaagataagtgcaaaaaacatgggaaatgtctcccgtttcatgaaccacagttgctcacccaatgtcttttggcaaccagttcaatatgatcacggagatgatggacacccgcatataatgttctttgcactgaagcatattccacccatgacagaactgacttatgactatggtgttgctggagctgaatctagtggttcaggttctcgtagaacgaagaactgcgtgtgtggatcacaaaactgcaggggattattttgatgggttgagagacgtgctcttggtggttaatcatgcaaaccactttctgctagatcctttctatgaaaccaaatttagtctccggataatatgacagatgatgtcatttgccatgtgtactgtgaagacagtaagttgtcgagcgagctgtagaatttctgttgctctgaactgcatggtggtcgctttcccaccatttcctcggatgtttatgtgggcgtggattgctgcattgcttccgctaaacttgtccaccaattgcaccggcttttgtagacttgttatcagccccgcttgcgttggacgcctggttgttaggatatggtcttgtaaattatcctggttaaggatcatgttgctttcgactcgaattttcgtcctcccttgcccttatgttcagcaatgttcaggtgtatgctgagtgctcaggtagggaccaaaggatgcagttgatgcaatttggaaccaggttttcttgtgggcgccggccaagggaatttgctgcgagaggtacagatctgtttgcggctggatggtttgtgtgtagcgttgttcattattgatccgacggggacacacaaggctgcgctatggcccttgccaccgcgatcggtgaggggcatggtcgcccatgccgactgagcgtgcaagtgggcctatgcccatgtctcggcccgtcagctgggccccgccagcactgctcacgcgagaatggagaaaacgaaacgctcgctgttgaagaaaattggagggctgggcctctagaatcaacaggaagacacatgctctccatcgacgaacagcaagacgaggccagggaatcggagatcctcacgccgctgcatgcttgtagtaggatactctgctgctttggatgcactaaaagtgtaagttccgtaggagtagacgcactaggctttgctgtctgcttgcatgcttgtaggaggatactctgctgcttcttaaaatttcttgtgctcgattgatgcaccggggcagttggaagtcaaggcgctggtggccgtggcgctgcacagacgtcaatcgcgtccgcggcacctgaccagcgcgcggccaggatcgcgggagtccgctgggatcgggcacccacacccgaatcctgtgtcgtggctgatcgtcgcgccccacgctggggctaccagcaccgccgatggggctgccaagtctgcgtcctcgacgggaccgcggggcccacacacgccggtgctgaggcatcgcgccggaggctgagcccgcaccggggcccaacctgataagaggcc

SEQ ID NO: 210858 - DNA, 3396 bp, Zea Mays
cggaccctgcggcccagcttttttcttcactctctgcaacccattccccccctgcattctctctctgttctcttgtgcgtgcctgcgctctgtagtgacgacgactgggcggcggccgctgccgccgacctacgtgcgcaggtctccatcttccggaccttcgctggagacgagcacccaccaccagaaattttctatacatttaagatgtacagggcctcaaatttcatacctgatcctaatcaggtgcttctagatgccaatccattaagggaaccttcctgcctttggatcgttcactactttcagcgccactacaaacggtgtttcttatacgggcaccagtggtaatggtgccattgatgccactcctatctctgcatacaagacaagatcaagcatatcacttgatgatgatgatgatgagccttactcgggcaaccaaggtttggcatctgaacggaaggctaggagaggccgtcctcctggttctggtcgtgatggatcaaatggtaagttaaagcgccctaagcctacatacaagaattttgttgctggcaaagagcttgtctttctgtcttctacatccgatcccagggagtttgtggaatcagttcacatgacttttgaggccctcaggcgaagacatctgcagatggatgaaacacaggatgctagcagacgtgcagacctgaaggctggtgccatcatgatggccagtaacatcagggcgaattcaggcaagagggaggttatgagaatgaggatgatgacacagatgtgctcgtgtacagtggtcaaggtggaaataataggaatactgaggagaggcatgatcagaagcttgagaggggtaacctagctcttgagaggagtttgcataggaagaatgagataagggttgtacgcggcttcaaggatccattttgcctaactgggaaaatttacatatatgatggtctctacaagattcacgagtcctggaaggagagaacaaagtacggtgtcaattgcttcaagtacaagctgctgcgggaacctggacagcgtgatggagctgcattatggaagatgactcagagatggatagataatcctgctaccagaggcagggtcctactagctgatctgtcatctaaggctgaaattttgcctgtttgtctcgtcaatgaggtagaccatgagaaaggacctgtacatttcacttatactaatcaggtcaaatacttgaggcctctcagttctatgaaaaagttgcagggctgtggatgccagagcgtttgcttgcctggcgacgccagttgtgcttgtggacaacataatggaggcgatttacccttcagttcatcaggattgttgtcatgccgcaaaccaatagtctacgaatgtggtgaatcttgcaactgttctacaaattgcaggaacagagtgacccaaaaagggtccaggctacatttcgaggtcttcaggaccacaaatcgaggctggggtcttcgctgctgggaacctattcgtgctggttcatttatatgtgagtatgccggtgaggttattgatgagctcaaatttaatttgaatgatagtgaagatgattacatttttcaaactgtatgccctggcgagaagacattaaaatggaattatggacctgaactgataggtgaagtaagcacatatgtatcgcctgatgaatttgaaccactgcctgtcaagataagtgcaaaaaacatgggaaatgtctcccgtttcatgaaccacagttgctcacccaatgtcttttggcaaccagttcaatatgatcacggagatgatggacacccgcatataatgttctttgcactgaagcatattccacccatgacagaactgacttatgactatggtgttgctggagctgaatctagtggttcaggttctcgtagaacgaagaactgcgtgtgtggatcacaaaactgcaggggattattttgatgggttgagagacgtgctcttggtggttaatcatgcaaaccactttctgctagatcctttctatgaaaccaaatttagtctccggataatatgacagatgatgtcatttgccatgtgtactgtgaagacagtaagttgtcgagcgagctgtagaatttctgttgctctgaactgcatggtggtcgctttcccaccatttcctcggatgtttatgtgggcgtggattgctgcattgcttccgctaaacttgtccaccaattgcaccggcttttgtagacttgttatcagccccgcttgcgttggacgcctggttgttaggatatggtcttgtaaattatcctggttaaggatcatgttgctttcgactcgaattttcgtcctcccttgcccttatgttcagcaatgttcaggtgtatgctgagtgctcaggtagggaccaaaggatgcagttgatgcaatttggaaccaggttttcttgtgggcgccggccaagggaatttgctgcgagaggtacagatctgtttgcggctggatggtttgtgtgtagcgttgttcattattgatccgacggggacacacaaggctgcgctatggcccttgccaccgcgatcggtgaggggcatggtcgcccatgccgactgagcgtgcaagtgggcctatgcccatgtctcggcccgtcagctgggccccgccaggtctgttcacgccatggttgattctgttacaaaatattgtcatatattgtcatgtgatcaaccctcttccccgacgatctcttccctgacaattttcttccaaaggacacacaattttctcccaaaggacacaccctttaggagacactgtatctacatgtatataaaccagaatctctgcaataaagatctacaactgtcatttacactattctctcgaatcttgttttcactgagttacggcacgttatcagcactgctcacgcgagaatggagaaaacgaaacgctcgctgttgaagaaaattggagggctgggcctctagaatcaacaggaagacacatgctctccatcgacgaacagcaagacgaggccagggaatcggagatcctcacgccgctgcatgcttgtagtaggatactctgctgctttggatgcactaaaagtttggaagtcaaggcgctggtggccgtggcgctgcacagacgtcaatcgcgtccgcggcacctgaccagcgcgcggccaggatcgcgggagtccgctgggatcgggcacccacacccgaatcctgtgtcgtggctgatcgtcgcgccccacgctggggctaccagcaccgccgatggggctgccaagtctgcgtcctcgacgggaccgcggggcccacacacgccggtgctgaggcatcgcgccggaggctgagcccgcaccggggcccaacctgataagaggcc

SEQ ID NO: 210859 - DNA, 2904 bp, Zea Mays
cagcttttttcttcactctctgcaacccattccccccctgcattctctctctgttctcttgtgcgtgcctgcgctctgtagtgacgacgactgggcggcggccgctgccgccgacctacgtgcgcaggtctccatcttccggaccttcgctggagacgagcacccaccaccagatgccaatccattaaggtctttagctccaatgttccctgcccccatgggagtcaatgttaatcagtcaagtacaccaccattggtttgtgtcactccggttggtcaatttccaattgggtttggtgcagggaaccttcctgcctttggatcgttcactactttcagcgccactacaaacggtgtttcttatacgggcaccagtggtaatggtgccattgatgccactcctatctctgcatacaagacaagatcaagcatatcacttgatgatgatgatgatgagccttactcgggcaaccaaggtttggcatctgaacggaaggctaggagaggccgtcctcctggttctggtcgtgatggatcaaatggtaagttaaagcgccctaagcctacatacaagaattttgttgctggcaaagagcttgtctttctgtcttctacatccgatcccagggagtttgtggaatcagttcacatgacttttgaggccctcaggcgaagacatctgcagatggatgaaacacaggatgctagcagacgtgcagacctgaaggctggtgccatcatgatggccagtaacatcagggcgaattcaggcaagagggtaggaactgtacctggagttgaaataggagatattttctattttaggatggagctgtgtgtcattgggttgcatgcacctagtatgggaggcattgattacatgactactaaatttggaaaagatgaggattctgtagccatatgtattgtctctgcaggaggttatgagaatgaggatgatgacacagatgtgctcgtgtacagtggtcaaggtggaaataataggaatactgaggagaggcatgatcagaagcttgagaggggtaacctagctcttgagaggagtttgcataggaagaatgagataagggttgtacgcggcttcaaggatccattttgcctaactgggaaaatttacatatatgatggtctctacaagattcacgagtcctggaaggagagaacaaagtacggtgtcaattgcttcaagtacaagctgctgcgggaacctggacagcgtgatggagctgcattatggaagatgactcagagatggatagataatcctgctaccagaggcagggtcctactagctgatctgtcatctaaggctgaaattttgcctgtttgtctcgtcaatgaggtagaccatgagaaaggacctgtacatttcacttatactaatcaggtcaaatacttgaggcctctcagttctatgaaaaagttgcagggctgtggatgccagagcgtttgcttgcctggcgacgccagttgtgcttgtggacaacataatggaggcgatttacccttcagttcatcaggattgttgtcatgccgcaaaccaatagtctacgaatgtggtgaatcttgcaactgttctacaaattgcaggaacagagtgacccaaaaagggtccaggctacatttcgaggtcttcaggaccacaaatcgaggctggggtcttcgctgctgggaacctattcgtgctggttcatttatatgtgagtatgccggtgaggttattgatgagctcaaatttaatttgaatgatagtgaagatgattacatttttcaaactgtatgccctggcgagaagacattaaaatggaattatggacctgaactgataggtgaagtaagcacatatgtatcgcctgatgaatttgaaccactgcctgtcaagataagtgcaaaaaacatgggaaatgtctcccgtttcatgaaccacagttgctcacccaatgtcttttggcaaccagttcaatatgatcacggagatgatggacacccgcatataatgttctttgcactgaagcatattccacccatgacagaactgacttatgactatggtgttgctggagctgaatctagtggttcaggttctcgtagaacgaagaactgcgtgtgtggatcacaaaactgcaggggattattttgatgggttgagagacgtgctcttggtggttaatcatgcaaaccactttctgctagatcctttctatgaaaccaaatttagtctccggataatatgacagatgatgtcatttgccatgtgtactgtgaagacagtaagttgtcgagcgagctgtagaatttctgttgctctgaactgcatggtggtcgctttcccaccatttcctcggatgtttatgtgggcgtggattgctgcattgcttccgctaaacttgtccaccaattgcaccggcttttgtagacttgttatcagccccgcttgcgttggacgcctggttgttaggatatggtcttgtaaattatcctggttaaggatcatgttgctttcgactcgaattttcgtcctcccttgcccttatgttcagcaatgttcaggtgtatgctgagtgctcaggtagggaccaaaggatgcagttgatgcaatttggaaccaggttttcttgtgggcgccggccaagggaatttgctgcgagaggtacaggtgagatgcaatgtggctggcacaccataaggccatctctctctagcagccgtgtgtgtacatgtgaacattgttttgcagtgtagactttacggggtggataggtcgggtagagatgttactccttagaaccgcggtcccagcacttgggcgcgagcgtaactacgtacacgagtcccggacccgccgactagcctggtcggctcgtctcctggtcctctacaccc

SEQ ID NO: 210860 - DNA, 2776 bp, Zea Mays
ccagcttttttcttcactctctgcaacccattccccccctgcattctctctctgttctcttgtgcgtgcctgcgctctgtagtgacgacgactgggcggcggccgctgccgccgacctacgtgcgcaggtctccatcttccggaccttcgctggagacgagcacccaccaccagggaaccttcctgcctttggatcgttcactactttcagcgccactacaaacggtgtttcttatacgggcaccagtggtaatggtgccattgatgccactcctatctctgcatacaagacaagatcaagcatatcacttgatgatgatgatgatgagccttactcgggcaaccaaggtttggcatctgaacggaaggctaggagaggccgtcctcctggttctggtcgtgatggatcaaatggtaagttaaagcgccctaagcctacatacaagaattttgttgctggcaaagagcttgtctttctgtcttctacatccgatcccagggagtttgtggaatcagttcacatgacttttgaggccctcaggcgaagacatctgcagatggatgaaacacaggatgctagcagacgtgcagacctgaaggctggtgccatcatgatggccagtaacatcagggcgaattcaggcaagagggtaggaactgtacctggagttgaaataggagatattttctattttaggatggagctgtgtgtcattgggttgcatgcacctagtatgggaggcattgattacatgactactaaatttggaaaagatgaggattctgtagccatatgtattgtctctgcaggaggttatgagaatgaggatgatgacacagatgtgctcgtgtacagtggtcaaggtggaaataataggaatactgaggagaggcatgatcagaagcttgagaggggtaacctagctcttgagaggagtttgcataggaagaatgagataagggttgtacgcggcttcaaggatccattttgcctaactgggaaaatttacatatatgatggtctctacaagattcacgagtcctggaaggagagaacaaagtacggtgtcaattgcttcaagtacaagctgctgcgggaacctggacagcgtgatggagctgcattatggaagatgactcagagatggatagataatcctgctaccagaggcagggtcctactagctgatctgtcatctaaggctgaaattttgcctgtttgtctcgtcaatgaggtagaccatgagaaaggacctgtacatttcacttatactaatcaggtcaaatacttgaggcctctcagttctatgaaaaagttgcagggctgtggatgccagagcgtttgcttgcctggcgacgccagttgtgcttgtggacaacataatggaggcgatttacccttcagttcatcaggattgttgtcatgccgcaaaccaatagtctacgaatgtggtgaatcttgcaactgttctacaaattgcaggaacagagtgacccaaaaagggtccaggctacatttcgaggtcttcaggaccacaaatcgaggctggggtcttcgctgctgggaacctattcgtgctggttcatttatatgtgagtatgccggtgaggttattgatgagctcaaatttaatttgaatgatagtgaagatgattacatttttcaaactgtatgccctggcgagaagacattaaaatggaattatggacctgaactgataggtgaagtaagcacatatgtatcgcctgatgaatttgaaccactgcctgtcaagataagtgcaaaaaacatgggaaatgtctcccgtttcatgaaccacagttgctcacccaatgtcttttggcaaccagttcaatatgatcacggagatgatggacacccgcatataatgttctttgcactgaagcatattccacccatgacagaactgacttatgactatggtgttgctggagctgaatctagtggttcaggttctcgtagaacgaagaactgcgtgtgtggatcacaaaactgcaggggattattttgatgggttgagagacgtgctcttggtggttaatcatgcaaaccactttctgctagatcctttctatgaaaccaaatttagtctccggataatatgacagatgatgtcatttgccatgtgtactgtgaagacagtaagttgtcgagcgagctgtagaatttctgttgctctgaactgcatggtggtcgctttcccaccatttcctcggatgtttatgtgggcgtggattgctgcattgcttccgctaaacttgtccaccaattgcaccggcttttgtagacttgttatcagccccgcttgcgttggacgcctggttgttaggatatggtcttgtaaattatcctggttaaggatcatgttgctttcgactcgaattttcgtcctcccttgcccttatgttcagcaatgttcaggtgtatgctgagtgctcaggtagggaccaaaggatgcagttgatgcaatttggaaccaggttttcttgtgggcgccggccaagggaatttgctgcgagaggtacaggtgagatgcaatgtggctggcacaccataaggccatctctctctagcagccgtgtgtgtacatgtgaacattgttttgcagtgtagactttacggggtggataggtcgggtagagatgttactccttagaaccgcggtcccagcacttgggcgcgagcgtaactacgtacacgagtcccggacccgccgactagcctggtcggctcgtctcctggtcctctacaccc

SEQ ID NO: 210861 - DNA, 2675 bp, Zea Mays
ccagcttttttcttcactctctgcaacccattccccccctgcattctctctctgttctcttgtgcgtgcctgcgctctgtagtgacgacgactgggcggcggccgctgccgccgacctacgtgcgcaggtctccatcttccggaccttcgctggagacgagcacccaccaccagaaattttctatacatttaagatgtacagggcctcaaatttcatacctgatcctaatcagggaaccttcctgcctttggatcgttcactactttcagcgccactacaaacggtgtttcttatacgggcaccagtggtaatggtgccattgatgccactcctatctctgcatacaagacaagatcaagcatatcacttgatgatgatgatgatgagccttactcgggcaaccaaggtttggcatctgaacggaaggctaggagaggccgtcctcctggttctggtcgtgatggatcaaatggtaagttaaagcgccctaagcctacatacaagaattttgttgctggcaaagagcttgtctttctgtcttctacatccgatcccagggagtttgtggaatcagttcacatgacttttgaggccctcaggcgaagacatctgcagatggatgaaacacaggatgctagcagacgtgcagacctgaaggctggtgccatcatgatggccagtaacatcagggcgaattcaggcaagagggaggttatgagaatgaggatgatgacacagatgtgctcgtgtacagtggtcaaggtggaaataataggaatactgaggagaggcatgatcagaagcttgagaggggtaacctagctcttgagaggagtttgcataggaagaatgagataagggttgtacgcggcttcaaggatccattttgcctaactgggaaaatttacatatatgatggtctctacaagattcacgagtcctggaaggagagaacaaagtacggtgtcaattgcttcaagtacaagctgctgcgggaacctggacagcgtgatggagctgcattatggaagatgactcagagatggatagataatcctgctaccagaggcagggtcctactagctgatctgtcatctaaggctgaaattttgcctgtttgtctcgtcaatgaggtagaccatgagaaaggacctgtacatttcacttatactaatcaggtcaaatacttgaggcctctcagttctatgaaaaagttgcagggctgtggatgccagagcgtttgcttgcctggcgacgccagttgtgcttgtggacaacataatggaggcgatttacccttcagttcatcaggattgttgtcatgccgcaaaccaatagtctacgaatgtggtgaatcttgcaactgttctacaaattgcaggaacagagtgacccaaaaagggtccaggctacatttcgaggtcttcaggaccacaaatcgaggctggggtcttcgctgctgggaacctattcgtgctggttcatttatatgtgagtatgccggtgaggttattgatgagctcaaatttaatttgaatgatagtgaagatgattacatttttcaaactgtatgccctggcgagaagacattaaaatggaattatggacctgaactgataggtgaagtaagcacatatgtatcgcctgatgaatttgaaccactgcctgtcaagataagtgcaaaaaacatgggaaatgtctcccgtttcatgaaccacagttgctcacccaatgtcttttggcaaccagttcaatatgatcacggagatgatggacacccgcatataatgttctttgcactgaagcatattccacccatgacagaactgacttatgactatggtgttgctggagctgaatctagtggttcaggttctcgtagaacgaagaactgcgtgtgtggatcacaaaactgcaggggattattttgatgggttgagagacgtgctcttggtggttaatcatgcaaaccactttctgctagatcctttctatgaaaccaaatttagtctccggataatatgacagatgatgtcatttgccatgtgtactgtgaagacagtaagttgtcgagcgagctgtagaatttctgttgctctgaactgcatggtggtcgctttcccaccatttcctcggatgtttatgtgggcgtggattgctgcattgcttccgctaaacttgtccaccaattgcaccggcttttgtagacttgttatcagccccgcttgcgttggacgcctggttgttaggatatggtcttgtaaattatcctggttaaggatcatgttgctttcgactcgaattttcgtcctcccttgcccttatgttcagcaatgttcaggtgtatgctgagtgctcaggtagggaccaaaggatgcagttgatgcaatttggaaccaggttttcttgtgggcgccggccaagggaatttgctgcgagaggtacaggtgagatgcaatgtggctggcacaccataaggccatctctctctagcagccgtgtgtgtacatgtgaacattgttttgcagtgtagactttacggggtggataggtcgggtagagatgttactccttagaaccgcggtcccagcacttgggcgcgagcgtaactacgtacacgagtcccggacccgccgactagcctggtcggctcgtctcctggtcctctacaccc

SEQ ID NO: 210862 - DNA, 2587 bp, Zea Mays
cggaccctgcggcccagcttttttcttcactctctgcaacccattccccccctgcattctctctctgttctcttgtgcgtgcctgcgctctgtagtgacgacgactgggcggcggccgctgccgccgacctacgtgcgcaggtctccatcttccggaccttcgctggagacgagcacccaccaccagaaattttctatacatttaagatgtacagggcctcaaatttcatacctgatcctaatcaggtgcttctagatgccaatccattaagggaaccttcctgcctttggatcgttcactactttcagcgccactacaaacggtgtttcttatacgggcaccagtggtaatggtgccattgatgccactcctatctctgcatacaagacaagatcaagcatatcacttgatgatgatgatgatgagccttactcgggcaaccaaggtttggcatctgaacggaaggctaggagaggccgtcctcctggttctggtcgtgatggatcaaatggcgaagacatctgcagatggatgaaacacaggatgctagcagacgtgcagacctgaaggctggtgccatcatgatggccagtaacatcagggcgaattcaggcaagagggaggttatgagaatgaggatgatgacacagatgtgctcgtgtacagtggtcaaggtggaaataataggaatactgaggagaggcatgatcagaagcttgagaggggtaacctagctcttgagaggagtttgcataggaagaatgagataagggttgtacgcggcttcaaggatccattttgcctaactgggaaaatttacatatatgatggtctctacaagattcacgagtcctggaaggagagaacaaagtacggtgtcaattgcttcaagtacaagctgctgcgggaacctggacagcgtgatggagctgcattatggaagatgactcagagatggatagataatcctgctaccagaggcagggtcctactagctgatctgtcatctaaggctgaaattttgcctgtttgtctcgtcaatgaggtagaccatgagaaaggacctgtacatttcacttatactaatcaggtcaaatacttgaggcctctcagttctatgaaaaagttgcagggctgtggatgccagagcgtttgcttgcctggcgacgccagttgtgcttgtggacaacataatggaggcgatttacccttcagttcatcaggattgttgtcatgccgcaaaccaatagtctacgaatgtggtgaatcttgcaactgttctacaaattgcaggaacagagtgacccaaaaagggtccaggctacatttcgaggtcttcaggaccacaaatcgaggctggggtcttcgctgctgggaacctattcgtgctggttcatttatatgtgagtatgccggtgaggttattgatgagctcaaatttaatttgaatgatagtgaagatgattacatttttcaaactgtatgccctggcgagaagacattaaaatggaattatggacctgaactgataggtgaagtaagcacatatgtatcgcctgatgaatttgaaccactgcctgtcaagataagtgcaaaaaacatgggaaatgtctcccgtttcatgaaccacagttgctcacccaatgtcttttggcaaccagttcaatatgatcacggagatgatggacacccgcatataatgttctttgcactgaagcatattccacccatgacagaactgacttatgactatggtgttgctggagctgaatctagtggttcaggttctcgtagaacgaagaactgcgtgtgtggatcacaaaactgcaggggattattttgatgggttgagagacgtgctcttggtggttaatcatgcaaaccactttctgctagatcctttctatgaaaccaaatttagtctccggataatatgacagatgatgtcatttgccatgtgtactgtgaagacagtaagttgtcgagcgagctgtagaatttctgttgctctgaactgcatggtggtcgctttcccaccatttcctcggatgtttatgtgggcgtggattgctgcattgcttccgctaaacttgtccaccaattgcaccggcttttgtagacttgttatcagccccgcttgcgttggacgcctggttgttaggatatggtcttgtaaattatcctggttaaggatcatgttgctttcgactcgaattttcgtcctcccttgcccttatgttcagcaatgttcaggtgtatgctgagtgctcaggtagggaccaaaggatgcagttgatgcaatttggaaccaggttttcttgtgggcgccggccaagggaatttgctgcgagaggtacaggtgagatgcaatgtggctggcacaccataaggccatctctctctagcagccgtgtgtgtacatgtgaacattgttttgcagtgtagactttacggggtggataggtcgggtagagatgttactccttagaaccgcggtcccagcacttgggcgcgagcgtaactacgtacacgagtcccggacccgccgactagcctggtcggctcgtctcctggtcctctacaccc

SEQ ID NO: 210863 - DNA, 2417 bp, Zea Mays
gtcctgcttgctctctctagagctgactttaggacattggaggctttgacgccttcggtgtccttgcgtccgcgtcgtgtccgcgcgcctgctgcccgccaacccgcctctcccaaatcccatccaaattcctccgcgtctttcgaagatcatattttgggaggggcaccgcccccagatcggggaggaatccccattccgtctggtgggtcggtctcccctgtccgtttttggctcttttcccctctcacaagggcggctcttggatgggctgcctgccgtgcttcgggtcggctggtgagggggcggccaaggagggcggtgcgcgcaaggacggtacgtcggatcttcgcgtcacccgggtcgaatcaggtctggaccttggtattacagaagcttggacttgtggcactagcacctgattctgatgtaacaagtttccccagctggtggtgtggtgctatcaagaagatacctaaggacataaatcaaaaccacagggtggactagactctaagaaggatgcagtcattttgagggaggggaataatcaacatattgcagcacacactttcacttttcgtgaacttgcagctgccactaagaacttcagacaagattgcttattgggtgagggaggttttggtcgtgtttataaaggacgtttggagaatggacaggttgttgcagtgaagcaacttgatcgcaatggccttcaaggaaacagggagtttctggttgaggttctaatgcttagtctgttgcaccatgacaatctagtaaacttaattggatactgcgctgatggagaccaacgtcttcttgtatacgagtttatgccattgggatcacttgaggatcatttgcatgatattccacctgataaggaacctctggactggaatacacgtatgaagattgctgctggtgccgccaagggcttagagtacttgcatgataaggcaagtcctcctgttatttacagggatttcaagtcctcaaacattctactcggtgaagggtttcatccgaagctatcagacttcggccttgccaaacttggccctgttggtgacaagactcacgtttcaacacgtgtcatgggaacttatggctactgtgctccagagtatgcaatgacagggcagcttacagctaaatctgatgtatatagttttggtgttgtgttccttgaactgattactggccgcaaagcaattgacaacacaaaaccccatggagagcaaaacctagttgcatgggctcgtcctctattcaaggaccgcagaaaattccctaaaatggctgatccgtcacttcagggctgtttccccatgaggggactgtatcaagctctagctgttgctgcaatgtgtttgcaagagcaggctgctacccgcccctttataggtgacgtggtcactgctctttcatacctagcttctcacacatatgatccaaatgcgcctgctcaacataatcggagtaattcatctactccgagggttagccgaggtggtgggagcaatgaccaacgccgtctccgctcatcaaaccaccactctccagatttgagaagggaagtcaccacagcatcaagatacgacgatgaggttagcagggcaaactctggtactggttctggtcgccggtctggcttggatgatgcggatatgtcaggctcacaattgggtagccctgctcacactggaaggaagaggggatctcctaggacttctgaaagccagcatgctatagcagaggccaaaacatatggggaaaattcaagaggcagaaagtgaccaaactctcagagcagcattgaccgtatgagcagaatgctgaaccagatggttcatccattcatcattcatagaaaaaaaaaatgataagttccttgctagcgccagacaggaacattgcatcagtccatctaggtcccttggtctttgtgaatagagctttcctcttttccctttacgggctattgccactgcttcttaacttctccatacaaatatcattgccaccacaaccaccatcagaactcccattcctgtcatctattcctcatgaatgcgatcatcatgcttacgagccttcgtcgtcacggtgtataacaacattcggttcacaatgtggaggtaaggcaaacatctgctctggggagcacaggatctcatccagttgggcatcttctgttgctgttgcatgctgggtgtcagcagtcacaccattgtcgaggggtgtgatgttctttttcttgaatggtttgtacctggggttacagcagttcacctgtgtttgatacatctgccttgtgacatttttgtgttgagttgtcggaacacatctattatcatctctaccataaaattgttgtggcccttgcatcttatcctatgcatgctgttttg

SEQ ID NO: 210864 - DNA, 2191 bp, Zea Mays
gtcctgcttgctctctctagagctgactttaggacattggaggctttgacgccttcggtgtccttgcgtccgcgtcgtgtccgcgcgcctgctgcccgccaacccgcctctcccaaatcccatccaaattcctccgcgtctttcgaagatcatattttgggaggggcaccgcccccagatcggggaggaatccccattccgtctggtgggtcggtctcccctgtccgtttttggctcttttcccctctcacaagggcggctcttggatgggctgcctgccgtgcttcgggtcggctggtgagggggcggccaaggagggcggtgcgcgcaaggacggtacgtcggatcttcgcgtcacccgggtcgaatcagataaatcaaaaccacagggtggactagactctaagaaggatgcagtcattttgagggaggggaataatcaacatattgcagcacacactttcacttttcgtgaacttgcagctgccactaagaacttcagacaagattgcttattgggtgagggaggttttggtcgtgtttataaaggacgtttggagaatggacaggttgttgcagtgaagcaacttgatcgcaatggccttcaaggaaacagggagtttctggttgaggttctaatgcttagtctgttgcaccatgacaatctagtaaacttaattggatactgcgctgatggagaccaacgtcttcttgtatacgagtttatgccattgggatcacttgaggatcatttgcatgggatttcaagtcctcaaacattctactcggtgaagggtttcatccgaagctatcagacttcggccttgccaaacttggccctgttggtgacaagactcacgtttcaacacgtgtcatgggaacttatggctactgtgctccagagtatgcaatgacagggcagcttacagctaaatctgatgtatatagttttggtgttgtgttccttgaactgattactggccgcaaagcaattgacaacacaaaaccccatggagagcaaaacctagttgcatgggctcgtcctctattcaaggaccgcagaaaattccctaaaatggctgatccgtcacttcagggctgtttccccatgaggggactgtatcaagctctagctgttgctgcaatgtgtttgcaagagcaggctgctacccgcccctttataggtgacgtggtcactgctctttcatacctagcttctcacacatatgatccaaatgcgcctgctcaacataatcggagtaattcatctactccgagggttagccgaggtggtgggagcaatgaccaacgccgtctccgctcatcaaaccaccactctccagatttgagaagggaagtcaccacagcatcaagatacgacgatgaggttagcagggcaaactctggtactggttctggtcgccggtctggcttggatgatgcggatatgtcaggctcacaattgggtagccctgctcacactggaaggaagaggggatctcctaggacttctgaaagccagcatgctatagcagaggccaaaacatatggggaaaattcaagaggcagaaagtgaccaaactctcagagcagcattgaccgtatgagcagaatgctgaaccagatggttcatccattcatcattcatagaaaaaaaaaatgataagttccttgctagcgccagacaggaacattgcatcagtccatctaggtcccttggtctttgtgaatagagctttcctcttttccctttacgggctattgccactgcttcttaacttctccatacaaatatcattgccaccacaaccaccatcagaactcccattcctgtcatctattcctcatgaatgcgatcatcatgcttacgagccttcgtcgtcacggtgtataacaacattcggttcacaatgtggaggtaaggcaaacatctgctctggggagcacaggatctcatccagttgggcatcttctgttgctgttgcatgctgggtgtcagcagtcacaccattgtcgaggggtgtgatgttctttttcttgaatggtttgtacctggggttacagcagttcacctgtgtttgatacatctgccttgtgacatttttgtgttgagttgtcggaacacatctattatcatctctaccataaaattgttgtggcccttgcatcttatcctatgcatgctgttttg

SEQ ID NO: 210865 - DNA, 1938 bp, Zea Mays
gtcctgcttgctctctctagagctgactttaggacattggaggctttgacgccttcggtgtccttgcgtccgcgtcgtgtccgcgcgcctgctgcccgccaacccgcctctcccaaatcccatccaaattcctccgcgtctttcgaagatcatattttgggaggggcaccgcccccagatcggggaggaatccccattccgtctggtgggtcggtctcccctgtccgtttttggctcttttcccctctcacaagggcggctcttggatgggctgcctgccgtgcttcgggtcggctggtgagggggcggccaaggagggcggtgcgcgcaaggacgataaatcaaaaccacagggtggactagactctaagaaggatgcagtcattttgagggaggggaataatcaacatattgcagcacacactttcacttttcgtgaacttgcagctgccactaagaacttcagacaagattgcttattgggtgagggaggttttggtcgtgtttataaaggacgtttggagaatggacaggttgttgcagtgaagcaacttgatcgcaatggccttcaaggaaacagggagtttctggttgaggttctaatgcttagtctgttgcaccatgacaatctagtaaacttaattggatactgcgctgatggagaccaacgtcttcttgtatacgagtttatgccattgggatcacttgaggatcatttgcatgggatttcaagtcctcaaacattctactcggtgaagggtttcatccgaagctatcagacttcggccttgccaaacttggccctgttggtgacaagactcacgtttcaacacgtgtcatgggaacttatggctactgtgctccagagtatgcaatgacagggcagcttacagctaaatctgatgtatatagttttggtgttgtgttccttgaactgattactggccgcaaagcaattgacaacacaaaaccccatggagagcaaaacctagttgcatgggctcgtcctctattcaaggaccgcagaaaattccctaaaatggctgatccgtcacttcagggctgtttccccatgaggggactgtatcaagctctagctgttgctgcaatgtgtttgcaagagcaggctgctacccgcccctttataggtgacgtggtcactgctctttcatacctagcttctcacacatatgatccaaatgcgcctgctcaacataatcggagtaattcatctactccgagggttagccgaggtggtgggagcaatgaccaacgccgtctccgctcatcaaaccaccactctccagatttgagaagggaagtcaccacagcatcaagatacgacgatgaggttagcagggcaaactctggtactggttctggtcgccggtctggcttggatgatgcggatatgtcaggctcacaattgggtagccctgctcacactggaaggaagaggggatctcctaggacttctgaaagccagcatgctatagcagaggccaaaacatatggggaaaattcaagaggcagaaagtgaccaaactctcagagcagcattgaccgtatgagcagaatgctgaaccagatggttcatccattcatcattcatagaaaaaaaaaatgataagttccttgctagcgccagacaggaacattgcatcagtccatctaggtcccttggtctttgtgaatagagctttcctcttttccctttacgggctattgccactgcttcttaacttctccatacaaatatcattgccaccacaaccaccatcagaactcccattcctgtcatctattcctcatgaatgcgatcatcatgcttacgagccttcgtcgtcacggtgtataacaacattcggttcacaatgtggagaagccatgagtctggaaactgggaaaccagcgttcaaagctggagtctgaaaggta

SEQ ID NO: 210866 - DNA, 2036 bp, Zea Mays
gtcctgcttgctctctctagagctgactttaggacattggaggctttgacgccttcggtgtccttgcgtccgcgtcgtgtccgcgcgcctgctgcccgccaacccgcctctcccaaatcccatccaaattcctccgcgtctttcgaagatcatattttgggaggggcaccgcccccagatcggggaggaatccccattccgtctggtgggtcggtctcccctgtccgtttttggctcttttcccctctcacaagggcggctcttggatgggctgcctgccgtgcttcgggtcggctggtgagggggcggccaaggagggcggtgcgcgcaaggacgggtggactagactctaagaaggatgcagtcattttgagggaggggaataatcaacatattgcagcacacactttcacttttcgtgaacttgcagctgccactaagaacttcagacaagattgcttattgggtgagggaggttttggtcgtgtttataaaggacgtttggagaatggacaggttgttgcagtgaagcaacttgatcgcaatggccttcaaggaaacagggagtttctggttgaggttctaatgcttagtctgttgcaccatgacaatctagtaaacttaattggatactgcgctgatggagaccaacgtcttcttgtatacgagtttatgccattgggatcacttgaggatcatttgcatgatattccacctgataaggaacctctggactggaatacacgtatgaagattgctgctggtgccgccaagggcttagagtacttgcatgataaggcaagtcctcctgttatttacagggatttcaagtcctcaaacattctactcggtgaagggtttcatccgaagctatcagacttcggccttgccaaacttggccctgttggtgacaagactcacgtttcaacacgtgtcatgggaacttatggctactgtgctccagagtatgcaatgacagggcagcttacagctaaatctgatgtatatagttttggtgttgtgttccttgaactgattactggccgcaaagcaattgacaacacaaaaccccatggagagcaaaacctagttgcatgggctcgtcctctattcaaggaccgcagaaaattccctaaaatggctgatccgtcacttcagggctgtttccccatgaggggactgtatcaagctctagctgttgctgcaatgtgtttgcaagagcaggctgctacccgcccctttataggtgacgtggtcactgctctttcatacctagcttctcacacatatgatccaaatgcgcctgctcaacataatcggagtaattcatctactccgagggttagccgaggtggtgggagcaatgaccaacgccgtctccgctcatcaaaccaccactctccagatttgagaagggaagtcaccacagcatcaagatacgacgatgaggttagcagggcaaactctggtactggttctggtcgccggtctggcttggatgatgcggatatgtcaggctcacaattgggtagccctgctcacactggaaggaagaggggatctcctaggacttctgaaagccagcatgctatagcagaggccaaaacatatggggaaaattcaagaggcagaaagtgaccaaactctcagagcagcattgaccgtatgagcagaatgctgaaccagatggttcatccattcatcattcatagaaaaaaaaaatgataagttccttgctagcgccagacaggaacattgcatcagtccatctaggtcccttggtctttgtgaatagagctttcctcttttccctttacgggctattgccactgcttcttaacttctccatacaaatatcattgccaccacaaccaccatcagaactcccattcctgtcatctattcctcatgaatgcgatcatcatgcttacgagccttcgtcgtcacggtgtataacaacattcggttcacaatgtggagaagccatgagtctggaaactgggaaaccagcgttcaaagctggagtctgaaaggta

SEQ ID NO: 210867 - DNA, 2056 bp, Zea Mays
gttccttggaatttggaaagagctggatcttggatgcgtttgtgataaatcaaaaccacagggtggactagactctaagaaggatgcagtcattttgagggaggggaataatcaacatattgcagcacacactttcacttttcgtgaacttgcagctgccactaagaacttcagacaagattgcttattgggtgagggaggttttggtcgtgtttataaaggacgtttggagaatggacaggttgttgcagtgaagcaacttgatcgcaatggccttcaaggaaacagggagtttctggttgaggttctaatgcttagtctgttgcaccatgacaatctagtaaacttaattggatactgcgctgatggagaccaacgtcttcttgtatacgagtttatgccattgggatcacttgaggatcatttgcatgatattccacctgataaggaacctctggactggaatacacgtatgaagattgctgctggtgccgccaagggcttagagtacttgcatgataaggcaagtcctcctgttatttacagggatttcaagtcctcaaacattctactcggtgaagggtttcatccgaagctatcagacttcggccttgccaaacttggccctgttggtgacaagactcacgtttcaacacgtgtcatgggaacttatggctactgtgctccagagtatgcaatgacagggcagcttacagctaaatctgatgtatatagttttggtgttgtgttccttgaactgattactggccgcaaagcaattgacaacacaaaaccccatggagagcaaaacctagttgcatgggctcgtcctctattcaaggaccgcagaaaattccctaaaatggctgatccgtcacttcagggctgtttccccatgaggggactgtatcaagctctagctgttgctgcaatgtgtttgcaagagcaggctgctacccgcccctttataggtgacgtggtcactgctctttcatacctagcttctcacacatatgatccaaatgcgcctgctcaacataatcggagtaattcatctactccgagggttagccgaggtggtgggagcaatgaccaacgccgtctccgctcatcaaaccaccactctccagatttgagaagggaagtcaccacagcatcaagatacgacgatgaggttagcagggcaaactctggtactggttctggtcgccggtctggcttggatgatgcggatatgtcaggctcacaattgggtagccctgctcacactggaaggaagaggggatctcctaggacttctgaaagccagcatgctatagcagaggccaaaacatatggggaaaattcaagaggcagaaagtgaccaaactctcagagcagcattgaccgtatgagcagaatgctgaaccagatggttcatccattcatcattcatagaaaaaaaaaatgataagttccttgctagcgccagacaggaacattgcatcagtccatctaggtcccttggtctttgtgaatagagctttcctcttttccctttacgggctattgccactgcttcttaacttctccatacaaatatcattgccaccacaaccaccatcagaactcccattcctgtcatctattcctcatgaatgcgatcatcatgcttacgagccttcgtcgtcacggtgtataacaacattcggttcacaatgtggaggacattgctatgtttgaccttcgcccaacacagcatgcggttgatgacagcttgcgtcttccctcccctttcaagagcactatccacctctgcggaaaagatgtaccgccggagaagaacacttcagaagatgtgtgcaacttctcaatcaccattttgttacgagaataccgaagagccccaagtcaattctttcagcagcttactcattttcatactcatattcaaacttcactctataaacagtataatttatagtacaaaacaatgttttagatagggctggcaaaatgctcgtgactcgtcggctcggattgacttgtttgaaattttttacgagttgagttaaca

SEQ ID NO: 210868 - DNA, 4464 bp, Zea Mays
agtatcgacgcccttctaaaaccctaactccctctgtgtcctcgacgccgccaagccatcctccctctggagtaccgaccgactctccacctcaggaccgcaagctacttcctccgcctcgacaggcgtcggcgagatggtgaagagaagcaagaagagcaagagcaagcgcgtcacgctgcggcagaagcacaaggtgctgcgcaaggtgaaggagcaccaccgcaagaagcgcaaggaggccaagaaggagggcaaggccggccagcggaagaaggtcgagaaggaccccgggatccccaacgagtggcccttcaaggagcaggagctcaaggcgctcgaggcccgacgcgcgcaggcgctccaggagctcgagctcaagaaggaggcgcgcaaggagagggctcggaagaggaagctaggattgctcgaggatgaggaaattgctaatttggcatctgcagcttccgcgcagggcagtgagtttgcagcaaaggatgcagcaaaggataaagctcctttaacagtggcaaagagcaatgatcattctgagagatctttctacaaggagcttgttaaagtaatcgaagcttctgatgtgattcttgaggttcttgatgcaagagatccgctgggcacccgttgcattgacatggaaaagatggttaggaaggctgatccaagtaaacggattgtactacttctcaacaagatagatcttgttcctaaggaggcggtagagaagtggcttacatatctgagagaagaaatgccaacagttgcgtttaagtgtaatacccaagagcagcggaccaagctgggatggaaatcttcaaaactagataaaacaaacatcatcccacaaagtagtgattgccttggtgctgagaatctaattagattgctcaagaattattccagaagccacgagctcaaactggcaattacggtgggtattgttggactccctaatgttggcaagagcagtctgatcaacagcctgaagaggtcccgagtggttaatgtcggttccactccaggggttactagatcaatgcaagaagttcaattagacaagaaggtaaagttgttggattgtcctggtgttgttatgctcaaatcttccaacagcggtgtgtctgtagctcttcgaaactgcaaaagagttgagaaaatggaagatccagtcactcctgttaaggagatccttggtatttgcccacatgagaagttgctgtctatgtataaggttccaagcttcagttcagttgatgatttccttcagaaagtatcaactgtacgggggaaattgaaaaagggtggtgtggtggatgttgaagctgctgcgagaattgtgcttcatgactggaatgaaggtaaaataccatattttacactgccacctaaaagagatgctgtggaggactcagatgtagtgattatatcagaagatgggaaagaatttaatattgatgaaatttacaaagctgagtcttcatatattggtggtttgaagtccattgaggagttccatcatattgagattcctcctaatgctccaccggcaattgacgaagagatgctagaggatggcagcaaaccaagtgaacccgctcaggaaaaccgggaggagcaaatgtctgacgcgaacgacccacaaggaagcaagccagccaccgccagcacgcagaacgacaagttgtacaccgccgagggcatactcgaccctcgcaagaggaaagcagagaagaaacggcgcaaggcgaacaggttcagtgtgctgaacgacatggacgcggactacgatttcaaggtggattaccagatggaggacgccgcggatggtgaagacgaagacgctggggatgaagccaaggaggataatgagccgatgactggcgtcgacgattcgtgaaattttggccccttcgtcgtgtatgaggtgatggctaggctcagcgggggttgcaaaattgacccaccaaggcgctgccgtccttcaacttcaagtcacgcgaactgaaatgcagccaagccctccagcgccgcaaccaacgcccgactcactcccgccgcgagcacttcccacccaagcggcgatggcgacgcaggacgagctccaggcggccgtcgccgcggtcacggagaagaagcgccgcctccgggaggcattcgaccgcctcgtctcctgcgccccggtccctgtccccttccgctgggaggacgtcgacgcgcacctcgccgccatcttccgccacctcggctccacccacgccgacgtcatagccatcgctgggggtccagccaccgctgctcaccacttccagttccagcacacggtcaaggaggagcaggaccaggaacgccgcgtcgggcgcggcgcgtcggaggagggacaaggtagcaatgcggaggaaggcaggagcgcgtcgtcgcaccaggaacgcggggaggaggaaggggaggtccgggaggcgtcagttgcgcgtcccgaccgagaagccgacgaagcgggcaacattctcggggcggaggcggttccagagcagctagacgacgagaaggaggatgacatggggacaatcgtggcgtctccccaccaacgcaatgatggcatcgagatggtagtggaggaggaggaggaggccgtcaaggggaacgcagacagagaaggccgcgaggacgaggcggaggaaggggagtggcggcagcagcatccgcacgccgcaggcgggggagagacgtcgtcggctctggcgaaagccgtcgccgcggcgtgcgcgaacatggacccctccgcgctggtggactcgctgcgcgtcagcggcaggagctccccccgcgcgttcctcccggcgctgctcggcgccccggacccccacgctctccttgtccgtgccgtcggcggcgttttggacatggcctcagcggagcgcgacgcgagcaagtggtggtgcgcaaactgcgtcgcgctggtcgaatgcgcgccccgcctccccgcgccgtcgccggacgcgctggcgcatgcaaagcgcctggcggggcgctggaaggagatggtggttgcgggccctgcgggtggcggggacacgggcgggatggccggatggggccttctcaccttcattgcttcctacgacattgccccggagttcgatgctgatgagatcatccgtctcttcggtgatatcgcgtctgaggtgaaggacaactgcgttgagctctgcaagcggcttggcctcatcggaaagatgactgattcagtcgaccatttcatcgaaaatgggcagccaatcgatgctataagactggcacgtactttcggtttgactggcaagtatactccacttgccatcatgaatgattatattgagaatgccaagaaggatgctgaagacatactaagcaaggagagctatacaccagagtctcggaagcaagcgatggcaaagaaggttgatgctctaatatttttatggagtgcaatcgatgggtacgatatggattctgttcagcgtagtagcatcaaggcagaaattacccagctgttacacaagtacgcaaacaagcagcaaagtctggcaggtgttcctgcctccatttcaagttcgcaccagcagcagaagtttcaggaggagtatcggcagcggccaccggtggaacaggagacgcagcagcgaaaggcacatgagctgcagcaagaaacagaagagaaacagcaccaccagcagcggaaggcacaagagacgcagcatcagcacatccaagatcaacaagagacgcagaagcgggaaatgtggcagaaccggaaaaggagaaggcaaaacaagaatcgcaagaggaaacagcgcaggcagaatctgcagcagcagagtaaacgtccaaggctacctccatatgtcaggccaggagttggcaaccagcacgggcagccattttcaggaggtcgattcgcagcctgtgccactaccatacctccatattattggtccatgggatgatcgctctcggcatcacatgccagtgttgccagagtaagtgctcggtgttctattagtaaattgatggtccagaatagaagagaaagctgttcggtgctgattggtttcgcttagctttccgtaaagaagtttttaagtccctgcagtcacttgtgtatatgatatgcacagtttagctaccctcggtggctctgttaacaatcgactttatatgctggatatgcctagtagttactcataagaatagaaaaaaagacagaatagattaaaatctgaacggagtgattactgcatataacaggacctctcagatccctgaacttatctaagaagattgtctcgcagaaaaatatatatatacatgccagtctgtcaggctagaagaaaaacaactccagtctctcagatcactgaagaaaacataccactctatttctccaaagtcctaactgaactcctgcgc

SEQ ID NO: 210869 - DNA, 2088 bp, Zea Mays
agtatcgacgcccttctaaaaccctaactccctctgtgtcctcgacgccgccaagccatcctccctctggagtaccgaccgactctccacctcaggaccgcaagctacttcctccgcctcgacaggcgtcggcgagatggtgaagagaagcaagaagagcaagagcaagcgcgtcacgctgcggcagaagcacaaggtgctgcgcaaggtgaaggagcaccaccgcaagaagcgcaaggaggccaagaaggagggcaaggccggccagcggaagaaggtcgagaaggaccccgggatccccaacgagtggcccttcaaggagcaggagctcaaggcgctcgaggcccgacgcgcgcaggcgctccaggagctcgagctcaagaaggaggcgcgcaaggagagggctcggaagaggaagctaggattgctcgaggatgaggaaattgctaatttggcatctgcagcttccgcgcagggcagtgagtttgcagcaaaggatgcagcaaaggataaagctcctttaacagtggcaaagagcaatgatcattctgagagatctttctacaaggagcttgttaaagtaatcgaagcttctgatgtgattcttgaggttcttgatgcaagagatccgctgggcacccgttgcattgacatggaaaagatggttaggaaggctgatccaagtaaacggattgtactacttctcaacaagatagatcttgttcctaaggaggcggtagagaagtggcttacatatctgagagaagaaatgccaacagttgcgtttaagtgtaatacccaagagcagcggaccaagctgggatggaaatcttcaaaactagataaaacaaacatcatcccacaaagtagtgattgccttggtgctgagaatctaattagattgctcaagaattattccagaagccacgagctcaaactggcaattacggtgggtattgttggactccctaatgttggcaagagcagtctgatcaacagcctgaagaggtcccgagtggttaatgtcggttccactccaggggttactagatcaatgcaagaagttcaattagacaagaaggtaaagttgttggattgtcctggtgttgttatgctcaaatcttccaacagcggtgtgtctgtagctcttcgaaactgcaaaagagttgagaaaatggaagatccagtcactcctgttaaggagatccttggtatttgcccacatgagaagttgctgtctatgtataaggttccaagcttcagttcagttgatgatttccttcagaaagtatcaactgtacgggggaaattgaaaaagggtggtgtggtggatgttgaagctgctgcgagaattgtgcttcatgactggaatgaagagatgctgtggaggactcagatgtagtgattatatcagaagatgggaaagaatttaatattgatgaaatttacaaagctgagtcttcatatattggtggtttgaagtccattgaggagttccatcatattgagattcctcctaatgctccaccggcaattgacgaagagatgctagaggatggcagcaaaccaagtgaacccgctcaggaaaaccgggaggagcaaatgtctgacgcgaacgacccacaaggaagcaagccagccaccgccagcacgcagaacgacaagttgtacaccgccgagggcatactcgaccctcgcaagaggaaagcagagaagaaacggcgcaaggcgaacaggttcagtgtgctgaacgacatggacgcggactacgatttcaaggtggattaccagatggaggacgccgcggatggtgaagacgaagacgctggggatgaagccaaggaggataatgagccgatgactggcgtcgacgattcgtgaaattttggccccttcgtcgtgtatgaggtgatggctaggctcagcgggggttgcaaaattgacccaccaaggttttgtgctcagtttgcttgtttaatgaaaagattatactatgagaaggcttgcgttttacctgttccagtacctacttttacctgcttttgcataagttgcattcattgatcttgatgcgctatcggtcgcatt

SEQ ID NO: 210870 - DNA, 1872 bp, Zea Mays
ccactctcgctttcttctgtctcgcctcgccctcgcctttgttgatcttttcctctctcgcgttcccctcgccttcctcttcctcccccacacccaccggtcgccgcccccgtcgccccgtcctcctcggtccagagacgagggggtccgcgccgttccgacgccacaccgcaaccgcatcacatcacacaccgcctgctcccaccgtccgtccgccctccctcgatcgcgccccccggatcgctggtacctccgcgcgcggctccgacctcatcttcctccatcgactggcatcggcagcggcggcgtgttcccggccagccttcgaaagggtaatcaatcgccagacttttgggagctctgttgggggggaccggggggaagagccaagttactgcagaggctaacatttcggttgtcgagtgatggcgcaaggcatcaacttccctgacttcatcggcgccgtgggtggccatgatggtggtgtggactttggtgggaacttctgtgacatggccttctaccagaagctaggggagggcaccaacatgtcggtcgacagcctcaacagcatgcagaccagcatgcatggggggtccatcgccatgtctgtggacaacaacagcagcgttggctctaacagtgactcccgcactggcatgcttggtcatcctggtctcaaggggcctgccattgtgggaagctactcggttgggcacagcatcttccgccctggccgggtgtcccacgccttgagtgaggatgcgctggcacatgctctgatggacaataagttcccaactgagacactcaaggattatgaggagtggactattgatctggggaagctccacttgggaatgccctttgcacaaggtgcctttgggaagctctacaggggaacatacaatgggatggatgttgctattaagcttttggagcgacctgaggctgaccctgagaaagctcaactgttagagcagcagtttgtccaagaagttatgatgcttgcaacactgaggcacccgaatattgtcaagttcattggtgcgtgcaggaagccgttggtttggtgtattgtgacggagtatgcaaagggtggatctctcaagaatttcttgagcaagaggcagaacaggtctgtcccgctgaagttggcagtcaagcaggcattggatgttgcacgtggcatggcctatgtccatggccttgggttcattcatagagatcttaagtcggacaacctcctgatttctggtgataagtccattaagattgctgactttggagtggctaggattgaagtcaagactgaggggatgacacctgaaactggaacataccgctggatggctcctgaaatgatccagcataggccatacaaccagaaagttgatgtctacagttttgccattgtcctgtgggagttagtgactgggaatgtcccctttgcaaacatgagcgcagtgcaagctgcatttgctgtggttaacaagggcgtgcgaccagccataccccacgactgcctccctgcccttgcggagatcatgaccatgtgctgggacacaaaccctgaagtccgtcccccattcgctgagattgtgaggatgctggagcaggtggaggtggaggttctgaccactgtccgtaaggctcgcttccgctgttgcatcgcccaaccgatgacgctggactgacggactgagtcgtccgcaatccaggaaaagaacctggagaggggtttaatcctatgtgtttataatcccaatagacttgtgcttctgtctttgacatgttatcgtagagtacacctagctgtcgtcaccagtggttgtaatagaggtgattttaggtttgctgctgcaacaacgg

SEQ ID NO: 210871 - DNA, 709 bp, Zea Mays
atactcaatgcttcattctgctggccatttgttggacatctgtgttcacaatgtaggcctctttcatctggagcctgggaaaggctatcattttcctgatgggtcttagcttctgtttttccttatgaggaggcagccatattatgcggaggttctttgcctagctacatttcaaaggatagcaatcctcgcattgttaagtttggggataaccctggtggtccttgcggtggcactcatgttgccgacatttcaatcatcaacagcctaaaggtgacaaacataagagtcaagaaaggcctcactaaagtctcatacagcatcagcccatgatccttttccagcagccgcagcagacaacacctggaatttattggagcgagaattattaattgaatcagaaggctgtactttagtttcgtggcatcacatgtatacgtagggtggcaaataaacaatttctatgtagtaaagtctgccagttcctcatgtacttcaatagatgatttgtttctgtactgagtcgtagcagagccgttaaggttctgatgtagatgatgacacatgtaaaactgccacggcaccatcatacaacaacatgaaggagatttaaatttgttagagcaactccaatagttatgtaaattttagctctctaaatcacagatttaaaaagttgctaaatgacttttgagtaaaaaaatgtgag

SEQ ID NO: 210872 - DNA, 876 bp, Zea Mays
gatgatccatactagtatttccacggggaatgcctgtagaagtagtgatgtattcagctcatagatactcaatgcttcattctgctggccatttgttggacatctgtgttcacaatgtaggcctctttcatctggagcctgggaaaggctatcattttcctgatggaccgtttgttgagtataagggaataattcctccagatcaaataccggttaagaaaaatgaactggaaagagaggccaatagactaatttcagaaggagcgaaggtcttagcttctgtttttccttatgaggaggcagccatattatgcggaggttctttgcctagctacatttcaaaggatagcaatcctcgcattgttaagtttggggataaccctggtggtccttgcggtggcactcatgttgccgacatttcaatcatcaacagcctaaaggtgacaaacataagagtcaagaaaggcctcactaaagtctcatacagcatcagcccatgatccttttccagcagccgcagcagacaacacctggaatttattggagcgagaattattaattgaatcagaaggctgtactttagtttcgtggcatcacatgtatacgtagggtggcaaataaacaatttctatgtagtaaagtctgccagttcctcatgtacttcaatagatgatttgtttctgtactgagtcgtagcagagccgttaaggttctgatgtagatgatgacacatgtaaaactgccacggcaccatcatacaacaacatgaaggagatttaaatttgttagagcaactccaatagttatgtaaattttagctctctaaatcacagatttaaaaagttgctaaatgacttttgagtaaaaaaatgtgag

SEQ ID NO: 210873 - DNA, 1394 bp, Zea Mays
caaagccaacctgctcccgtaattaggcgaccttgcagaattcctttttttatctccaggaaagttcagagacaaacagaaagctgggcgaagaacgaaggcacctcgaaaccaagcctggccatgagaccatcaaaatctgtaaacagcacgtagtcacggtggggcgcgggcctatatattgtcttgtcaggccttgttcgtctcttcagaatcttcagacatccgagcgtcttgcgcgttcgatttgaaccacttggcgctgctgcctgaccggtcctcacccctcaacccgccgaacttcctcgtcaccgccggcggcgatcgatcgttgccaagtctcccaccatcgcctccacgggaaaaaatggcgcaggaggctgcaccggcgaggccggtgggccccaccaggctcgtctacttcgatgatatgggggcactccaccactcatccgccaccgttctctccgtccaccaggttttccactacggaagatttgagggcacggagcaaggatgtgggactgtatttaaggaggggggaaccgttagcttgcaggtcgacgcagaacgacgcagctttaattcaaggcttcattctgctggccatttgttggacatctgtgttcacaatgtaggcctctttcatctggagcctgggaaaggctatcattttcctgatggaccgtttgttgagtataagggaataattcctccagatcaaataccggttaagaaaaatgaactggaaagagaggccaatagactaatttcagaaggagcgaaggtcttagcttctgtttttccttatgaggaggcagccatattatgcggaggttctttgcctagctacatttcaaaggatagcaatcctcgcattgttaagtttggggataaccctggtggtccttgcggtggcactcatgttgccgacatttcaatcatcaacagcctaaaggtgacaaacataagagtcaagaaaggcctcactaaagtctcatacagcatcagcccatgatccttttccagcagccgcagcagacaacacctggaatttattggagcgagaattattaattgaatcagaaggctgtactttagtttcgtggcatcacatgtatacgtagggtggcaaataaacaatttctatgtagtaaagtctgccagttcctcatgtacttcaatagatgatttgtttctgtactgagtcgtagcagagccgttaaggttctgatgtagatgatgacacatgtaaaactgccacggcaccatcatacaacaacatgaaggagatttaaatttgttagagcaactccaatagttatgtaaattttagctctctaaatcacagatttaaaaagttgctaaatgacttttgagtaaaaaaatgtgag

SEQ ID NO: 210874 - DNA, 2952 bp, Zea Mays
ctcccgcattgccgtttccgaccgccaactctcccaaggctgctctgctcgcccaccggaattcccgccgcggagggtgctgtggtataagcttgctttaggattggagggctctggttggttgcctagacgccggcgatggcgtcgccggccggcggcgagtctccggcgaagcccgtcctcctgcacggcgacctcgacctctggatcctcgaggcgcgcctgctgcccaacatggacatgttctccgagcacgtgcgccgctgcttcgccgcatgccgcccgccctcctcctgcgggaccaagcacccgccgcccgccgccgctggccgccgccaccaccaccaccaccggaacatcatcaccagcgatccctacgtcacgctgtccgtgtccggcgccgtcgtggcgcgcaccgccgtcatccccaactcccaggaccccgtctgggaggagcgcttcgccgtgccgctcgcgcaccgcgccgccgacctcgagttccaggtcaaggacaacgacaccttcggcgcgcagctcatcggcaccgtcgccgtccccgccgaccgcgttgtctcgggcgacgaggtcgaggactggttccccgtcataggcaccaacggcaagccgtacaagcccgacaccgcgctgcgcctccgcttcaagttccagcccatcgccgacaacccggcctaccgccacggcatcgccggcgaccccgaccacaggggcatccaggactcctacttcccgctccgccacggcggccaactcacgctgtaccaggacgcgcacgtcagggaaggggacctgccagagattgagctcgacaacggcaagacgttccagcacaacgcgtgctgggaggacatctgccacgccatcctagaggcgcaccacatgatatatatcgtcggctggtcggtgtacgacaaggtgcgcctcgtgcgcgaaccatctccgtcgcggccattgcccgagggtggagaccttacgcttggggacctgctcaagttcaagtcgcaggagggtgtcagagtgtgcctgcttgtgtgggatgataagacttcacatgacaagttcttcatcaagacgggtggggttatggcaactcatgatgaagaaactcggaagtttttcaaacattcctcagtcatctgtgttctctctcctcgatatgctagcaataagctcagcattttcaaacagcaggttgttgggactttgtttacacaccatcaaaagtgtgtgctggttgatacacaagccaggggaaacaagcggaaaattacagctttcattgggggcctagatctttgtgatggccgctatgacacacctgaacacaggcttttcaaagatcttgacacagtattccaaaatgattaccataaccctacattttcggcaggtgcaaagggtcccaggcaaccatggcatgatttacattgcaggattgatggccctgctgcctatgatgtcttgacaaattttgagcaaaggtggcgaaaggcaacaaaatggcgtgaccggtttagaagagtatctcattggaaagacgatgctttaattaaactggagcgtatctcatggattttaagcccttcacccaatgttccaaataatcatcctagtttgtgggtttcaaaagaagaggatcatgaaaattggcacgttcaggtattcaggtcaattgactctggttccctaaaaggatttcctagtgattgcaaagcagcttcaaagctgaatcttgtgtgccgaaagaacctggtaattgataagagcatccacactgcatatgtccgagcaatcagatctgcacaacatttcatttatattgagaaccagtactttcttggttcttcatatgcttggccatcctatgtgaattcaggtgctgataatctggtaccaatagaattggccctcaaaattgcaagtaagattaaagcgggagaacgctttgcagtgtatgtagtgataccaatgtggccggaaggagtccctactgcagcatctgtgcaagaaatccttttctttcaggcccagacaatggagatgatgtataaaataattgcagatgagctcaaggcaacggacaataaggatatgcaccctgaagattacttgaacttcttttgtcttggaaatcgggaagaaccaccatctaatggtagtccagaatcagagaaatctacagataaaagtgcaggccttagcttcgaaatatcgacggttcatgatctatgttcacgcaaaagggatgattgtggatgatgaatatgtcattctgggttcagcaaacatcaaccagagatccctggctggttctagagatactgagatcgcaatgggtgcataccagcctcattatgcatggtctacaaagaatggacatcctcacggccaggtatatgggtacagaacgtctctgtgggcagagcaccttggaacggttgatgatcgcttcaaggatccttcgagtttggagtgtgtaaggtttgtgaatcaaatagctgtagagaactggcaaaggtttacagcagaagaaatgagtacgttacaagggcacctcctcaagtacccagttaaggtggaggctgatggtaagatcagcccactgtcagaccaggagtgctttcctgatgttgggggcaagattctgggagctccaacttcacttcctgattcactgactatgtagtgttattacataaaaaaacttctttcagagttgaactttgtaattgtctaaaattggcgggtttatcgcagaacttgtactatatctgtaatcatcgatagttggcgcagggaaagttcaagatgttagtggtgctaagttttcccagcgtttgtaaatgaaccatatgataggatcctagacaatgcttccatttccattatgattatacaacagttttcaacatttttgctcaaccccttattcac

SEQ ID NO: 210875 - DNA, 2981 bp, Zea Mays
gccaaatctcgagatccaatcgaagcgccccctcccgcattgccgtttccgaccgccaactctcccaaggctgctctgctcgcccaccggaattcccgccgcggagggtgctgtggtataagcttgctttaggattggagggctctggttggttgcctagacgccggcgatggcgtcgccggccggcggcgagtctccggcgaagcccgtcctcctgcacggcgacctcgacctctggatcctcgaggcgcgcctgctgcccaacatggacatgttctccgagcacgtgcgccgctgcttcgccgcatgccgcccgccctcctcctgcgggaccaagcacccgccgcccgccgccgctggccgccgccaccaccaccaccaccggaacatcatcaccagcgatccctacgtcacgctgtccgtgtccggcgccgtcgtggcgcgcaccgccgtcatccccaactcccaggaccccgtctgggaggagcgcttcgccgtgccgctcgcgcaccgcgccgccgacctcgagttccaggtcaaggacaacgacaccttcggcgcgcagctcatcggcaccgtcgccgtccccgccgaccgcgttgtctcgggcgacgaggtcgaggactggttccccgtcataggcaccaacggcaagccgtacaagcccgacaccgcgctgcgcctccgcttcaagttccagcccatcgccgacaacccggcctaccgccacggcatcgccggcgaccccgaccacaggggcatccaggactcctacttcccgctccgccacggcggccaactcacgctgtaccaggacgcgcacgtcagggaaggggacctgccagagattgagctcgacaacggcaagacgttccagcacaacgcgtgctgggaggacatctgccacgccatcctagaggcgcaccacatgatatatatcgtcggctggtcggtgtacgacaaggtgcgcctcgtgcgcgaaccatctccgtcgcggccattgcccgagggtggagaccttacgcttggggacctgctcaagttcaagtcgcaggagggtgtcagagtgtgcctgcttgtgtgggatgataagacttcacatgacaagttcttcatcaagacgggtggggttatggcaactcatgatgaagaaactcggaagtttttcaaacattcctcagtcatctgtgttctctctcctcgatatgctagcaataagctcagcattttcaaacagcaggttgttgggactttgtttacacaccatcaaaagtgtgtgctggttgatacacaagccaggggaaacaagcggaaaattacagctttcattgggggcctagatctttgtgatggccgctatgacacacctgaacacaggcttttcaaagatcttgacacagtattccaaaatgattaccataaccctacattttcggtgcaaagggtcccaggcaaccatggcatgatttacattgcaggattgatggccctgctgcctatgatgtcttgacaaattttgagcaaaggtggcgaaaggcaacaaaatggcgtgaccggtttagaagagtatctcattggaaagacgatgctttaattaaactggagcgtatctcatggattttaagcccttcacccaatgttccaaataatcatcctagtttgtgggtttcaaaagaagaggatcatgaaaattggcacgttcaggtattcaggtcaattgactctggttccctaaaaggatttcctagtgattgcaaagcagcttcaaagctgaatcttgtgtgccgaaagaacctggtaattgataagagcatccacactgcatatgtccgagcaatcagatctgcacaacatttcatttatattgagaaccagtactttcttggttcttcatatgcttggccatcctatgtgaattcaggtgctgataatctggtaccaatagaattggccctcaaaattgcaagtaagattaaagcgggagaacgctttgcagtgtatgtagtgataccaatgtggccggaaggagtccctactgcagcatctgtgcaagaaatccttttctttcaggcccagacaatggagatgatgtataaaataattgcagatgagctcaaggcaacggacaataaggatatgcaccctgaagattacttgaacttcttttgtcttggaaatcgggaagaaccaccatctaatggtagtccagaatcagagaaatctacagataaaagtgcagcggccttagcttcgaaatatcgacggttcatgatctatgttcacgcaaaagggatgattgtggatgatgaatatgtcattctgggttcagcaaacatcaaccagagatccctggctggttctagagatactgagatcgcaatgggtgcataccagcctcattatgcatggtctacaaagaatggacatcctcacggccaggtatatgggtacagaacgtctctgtgggcagagcaccttggaacggttgatgatcgcttcaaggatccttcgagtttggagtgtgtaaggtttgtgaatcaaatagctgtagagaactggcaaaggtttacagcagaagaaatgagtacgttacaagggcacctcctcaagtacccagttaaggtggaggctgatggtaagatcagcccactgtcagaccaggagtgctttcctgatgttgggggcaagattctgggagctccaacttcacttcctgattcactgactatgtagtgttattacataaaaaaacttctttcagagttgaactttgtaattgtctaaaattggcgggtttatcgcagaacttgtactatatctgtaatcatcgatagttggcgcagggaaagttcaagatgttagtggtgctaagttttcccagcgtttgtaaatgaaccatatgataggatcctagacaatgcttccatttccattatgattatacaacagttttcaacatttttgctcaaccccttattcac

SEQ ID NO: 210876 - DNA, 1618 bp, Zea Mays
atgacggcgacgtccaaggctccgcggcggccccgcatccgcccccgcggcccgccgccggcgccgacgccgatccgcacggcgcgcggcgcgcgcaccgcggccgccgacgagcgcgtcctcgccgagttcctcgaggcctccctccgcgtgccggacctctccctgcccccacggaagcgcttcagcttcccaccgccgccggcgccggaaccggacgggatcccttctcacgccctcgtttcgggcgacgcggacgcggagcagcgggcgattgccgcggcagcggagaccggcgcgttccgcgtgaccagcgcggtcgacgctcgcgaggcgcgcgacgccgtggaggcggcgtcggagctcgtgttcgcggcgccggaggaggtgaagcgcggcctggagagatggtaccgaaggagagatcgggagccccgggaggagttcgtctggttccggccgatgagcgccgacgaggacagagcgatggccgcggccttcccaggctccacgtaccgtgcgttcagggagaaggtggacaccttggcgtccaaaatggaggatatagcaaaagctgtcatcagggttctacacgataacgtcaaaaaccctaaagcctctgccgagcccagagaagccgccccgtcaatcctgcgcctggcactgtacagcagtgacacgtcgagtacgtgctggaacgagcttgacagcaccactgctcctaactcgcacgctttgagcgtccacctctgcggacaagaccggcggatctgtctgcggcggagtctggggggctcgaccgtctccactctacctgcgggctgcatgcttgtcacagtcggcaagcagattcaggaatggtccaacgggcagttcaaggccgctgttggaggagaggtagtactgttcgagacgaccgacgaaccaggccccttcgtctccgcggaactcatcgtgtactgttactgtccacacgacctgcgtctctctgaggctggccggtacgccagccgccgcgttgaccgtgccacgatcgtttcctttagggaccagatactggtcgctctggttttgctgtctttgttctacctcttccggggctgatccgggtggatcgatccgtttggactggattgtcgattccttttgcgacgtccgagatggctagattttacagccttgtcggacctgtgacgactgcctgcccttctctgttggctggctacggagatgatgggggaaaacaccgcgtggattgcggtggcatgcaacaggtggttcgagtgtttgtggtgatttgcatggcttttcttttcttggagggataggtcataggtccggtacatactgctgttagtttgtgatagttgaggggaaatgggacatgctatgtggggttggttgattttttttttcccgattgagagagttgacgacgctgcgattgaagtgtttactgtgatagtggtttctcttctcttttttttgtaagtacattgctgaatcatgtatgtaataattgtatgtgtgttggtctttgttggctgtgtggcaaggatatactagggaaattgcttccttgcaatgtgaagccctgtagtgtaattatggttgcctg

SEQ ID NO: 210877 - DNA, 649 bp, Zea Mays
ggggccaagaccgtgcgcaagccggtcttcaccaccgtcgaccagctgcacccctagatgcatggccacactcttaccatccgcgtcatctctgcctgcaccatcctcgacaaatcctccatgcacattggtcgtacccgcatcgcccagtgcctcgtcggatacaacaccgacaccgtccttgtcacgcccgcaacaatcaggcaaatttgtcatagatacactcacggtgtgctggtgtgtgagtggaggaagagcttgatggaggatgagggagaggaatcagtagagcaaatgagcaagacgagacagatgtgtagctgttggtgtttctccactatcgcgacctcaatgcgcaagcatggcctatatagagtgacgagaacaccatggaattgagttgtgttgttgtggtgcggagtaggagtgtccaagcaaggagagaatcacaggcgatttctctcattgttgttctggcatcgtttctgattctacgtttaaacaaagtgtttgtctcattagggcgtgtttcctcactttttctcgcacaagaatctagtaaaaaggttctccaaataggctctttgactgctacagttcgtcgattcgattctcccatctatatcctttgtggttgcccatccggcta

SEQ ID NO: 210878 - DNA, 895 bp, Zea Mays
ggtgtcaagtgaggcccgcacgacagaaaagacaaggtgcgcgtgctggaacggatgggccgccagcacccatcgtggacgtctgaccacaccccatgtgtgttagcaccatagaaggagatttgagggcgccgcgtgcgatgcccgctgcgccgccgccaacatctcgctgcaggggaagtatctcgtcgacatgctccacctgccctcccatgggtccgcccctggccggcctctaactcagctacaacaccctctagcggcatccagcaggagctggttgcagatcccgcagatggggccaagaccgtgcgcaagccggtcttcaccaccgtcgaccagctgcacccctagatgcatggccacactcttaccatccgcgtcatctctgcctgcaccatcctcgacaaatcctccatgcacattggtcgtacccgcatcgcccagtgcctcgtcggatacaacaccgacaccgtccttgtcacgcccgcaacaatcaggagcttgatggaggatgagggagaggaatcagtagagcaaatgagcaagacgagacagatgtgtagctgttggtgtttctccactatcgcgacctcaatgcgcaagcatggcctatatagagtgacgagaacaccatggaattgagttgtgttgttgtggtgcggagtaggagtgtccaagcaaggagagaatcacaggcgatttctctcattgttgttctggcatcgtttctgattctacgtttaaacaaagtgtttgtctcattagggcgtgtttcctcactttttctcgcacaagaatctagtaaaaaggttctccaaataggctctttgactgctacagttcgtcgattcgattctcccatctatatcctttgtggttgcccatccggcta

SEQ ID NO: 210879 - DNA, 3400 bp, Zea Mays
caatttttccccgttggccattgacggacaaacgcgttctccctgaaaagcatgctgtgaggctcgatatcgctgcggctgtcgtgctcccgcagcgcacaggaagaaaaaaatactaactgtcttactaggagcctagagtgtccgaatttttgccattgcttgtcctgacttgccaacctacaatgggatggggaaacactattaccagacgcctcaaggttttctctatggccctgtttatctacttcgactataaggctgttcagaagagagttcaatgggttagcactggtaaaaagagtgctatatggaagaaaacacatgagcgaaatgctcgccgtgtcctcaacctgatgatagagttagaaggtttatgggtgaaactgggccaatatttatccacaagagcagatgtacttcctgaaccctacataaatgtcctcaagcagttgcaggattcgcttcctccacgaccttttgaagaggttcgtgaaacgatagagaaagaacttggagaacctatgagtgatctatttgctgattttgtcctagaccctctcgcaaccgcatcaatagcacaagttcatcgtgcaactctggcagatggcagagaagtagttgtcaaaattcagcatgatggtgtgaaggagatcatattagaggatctgaagaatgcaaaatcattgattgaatggatagcgtgggcagagcctcagtatgattttaatccgatgattgatgaatggtgcaaggaggctccaaaggaacttgatttcaaccatgaagcagagaatactagggctgtctccaggaatcttagtcgcaaaagtgactgtgggagtggcagtgtttccagtactgttgatgtactcattccagaagttattcagtcaactggcaaggttctaattttggaatatatggatgggattcgtttaaatgataatgattcattggaagcatatggtgttgacaagcaaaaactggtcgaagagataacccgtgcatacgctcatcaaatatacattgatggcttctttaacggcgaccctcatcctggcaattttcttgtgagcaaggaacctccacataaaccgattctccttgattttgggctcactaagcgcatatctgaatctatgaggcaggcactagcaaaaatgtttttgtcatgtgcagagggagatcacgtggcactgctgtcagcattttcagagatggggcttaaactgcgggttgacatgcctcagcaggctatggatattgccacagtattctttcgtcagtcaaccacagcaagtgaagcaaaggagaacataaaaacacttaatgaccaaagagagagaaatgtcaaagctcttcaagaaaagatgaaattgaacaagaaggaggttcaacgctttaatcctgttgatgctttccccggggatgccataatatttatgagggtcttgaatctcctcagaggtctttcagcttcactaaatgttaggatagtttatctggacatcatgaggccatttgctgaatcaactttgttagggagtttgacacacggacaaatacctaacagtcagtggatttttgactcacctgctaactctgatgtggagtctaaactgagaaattatctgcttgagttgggaagcgacaaaattttaggaatacaagtctgcgcatataaagatggaaaggtcataatagatactgctgctggtatgctggggaagtatgatccccgacctgttcaacctgattctctttttcctgttttctcagtgactaagggtatcactgctgggatggtacattggcttgtggacaaagggaagctgaagtacgaggaaacagttgccaacatatggccgaattttggaactaacggaaaggagttaataaaggtccatcatcttctaaatcacacatccggtttgcacaatgcactgggtgatgtggtaaagaatgatcctttgttggtatgtgactgggaggagacactaaaccagattacgaagagtacacctgagaccgaacctggttcagcacaaatttaccattacctctccttcggttggctgtgtgggggagtcatagagcatgcatctgggaagaagtttcaagagattctagaagaggctattgttcgtcctcttcacattgagggggagttgtatgttggcattccaccaggtgtcgagtctcggctggcagcgctgacagttgacaccgaggagctccagaagctatcaggaatcagggcaggtgcagatgtgccagcagctctgctgaacaacatcgcgcagatggcgtccggtgtgcccgctattttcaacacgctaaacgtccgtcgggccatcatccctgccgccaacggccactgctctgcccgcgcgctcgctcgatactacgcggcgctagcggccggcggttctgttcccccgccgcactcttcgggcgccatgccgcccctcggcagccacgtgcacacccccaagttcccgaccgcgccgctcaagaagaagaagaagggcgccggaaagaagaagggcgccggcggcggctccatgggagacctcaaggtccaggatataagcggcggcagcagcgacaggaacgggtactgccagctgcgcaccagcgacgccgacagcgaggcggggagcggcagcggcggaggcggcaggatgttcggcagcgacaggatcctcgacgcgttcatgggcgtcggcgagtacgagggcatggcgcaccgggacggcaagttcgggctcgggttcaggaggtacgacgacgccagcagcggcagcggcaggctgaggtgctttgggcactccgggatgggcggctcgaccgggttctgcgacgtggagaacggcttcgccatcgcggtgacggtgaacaagctgtctctgggcagcgtcacgcgcggcgtcgtccggctcgtcctcgaggagctgggcctgcccgtgccggacgagtactcggccaccggggagaaggggcctgacatgatgctcaacctgacgacaacgacgacgactacgccgccgcaactgagatgacgacggcgaaactgagattatcaggttgggttcgtaataatctgtggaacaagatatatagcgagcagaaggaaggttggggtacagggatttggtggacagtatatatacgcgtgccattttgattttgacgtggcatgtaaaactcggcaaattctggtatattacgaagctgggtgctgggaattgtggccagcagtacaagaaatggacatgctagtttgttgacctgtgttttttttatggcggaactttttgttttgtcttctgggcttcactaggtctatgctcgtgcgttgccacggaaaacacatgaaatcgtaatatgtgtggta

SEQ ID NO: 210880 - DNA, 3369 bp, Zea Mays
gacggacaaacgcgttctccctgaaaagcatgctgtgaggctcgatatcgctgcggctgtcgtgctcccgcagcgcacaggaagaaaaaaatactaactgtcttactaggagcctagagtgtccgaatttttgccattgcttgtcctgacttgccaacctacaatgggatggggaaacactattaccagacgcctcaaggttttctctatggccctgtttatctacttcgactataaggctgttcagaagagagttcaatgggttagcactggtaaaaagagtgctatatggaagaaaacacatgagcgaaatgctcgccgtgtcctcaacctgatgatagagttagaaggtttatgggtgaaactgggccaatatttatccacaagagcagatgtacttcctgaaccctacataaatgtcctcaagcagttgcaggattcgcttcctccacgaccttttgaagaggttcgtgaaacgatagagaaagaacttggagaacctatgagtgatctatttgctgattttgtcctagaccctctcgcaaccgcatcaatagcacaagttcatcgtgcaactctggcagatggcagagaagtagttgtcaaaattcagcatgatggtgtgaaggagatcatattagagaatgcaaaatcattgattgaatggatagcgtgggcagagcctcagtatgattttaatccgatgattgatgaatggtgcaaggaggctccaaaggaacttgatttcaaccatgaagcagagaatactagggctgtctccaggaatcttagtcgcaaaagtgactgtgggagtggcagtgtttccagtactgttgatgtactcattccagaagttattcagtcaactggcaaggttctaattttggaatatatggatgggattcgtttaaatgataatgattcattggaagcatatggtgttgacaagcaaaaactggtcgaagagataacccgtgcatacgctcatcaaatatacattgatggcttctttaacggcgaccctcatcctggcaattttcttgtgagcaaggaacctccacataaaccgattctccttgattttgggctcactaagcgcatatctgaatctatgaggcaggcactagcaaaaatgtttttgtcatgtgcagagggagatcacgtggcactgctgtcagcattttcagagatggggcttaaactgcgggttgacatgcctcagcaggctatggatattgccacagtattctttcgtcagtcaaccacagcaagtgaagcaaaggagaacataaaaacacttaatgaccaaagagagagaaatgtcaaagctcttcaagaaaagatgaaattgaacaagaaggaggttcaacgctttaatcctgttgatgctttccccggggatgccataatatttatgagggtcttgaatctcctcagaggtctttcagcttcactaaatgttaggatagtttatctggacatcatgaggccatttgctgaatcaactttgttagggagtttgacacacggacaaatacctaacagtcagtggatttttgactcacctgctaactctgatgtggagtctaaactgagaaattatctgcttgagttgggaagcgacaaaattttaggaatacaagtctgcgcatataaagatggaaaggtcataatagatactgctgctggtatgctggggaagtatgatccccgacctgttcaacctgattctctttttcctgttttctcagtgactaagggtatcactgctgggatggtacattggcttgtggacaaagggaagctgaagtacgaggaaacagttgccaacatatggccgaattttggaactaacggaaaggagttaataaaggtccatcatcttctaaatcacacatccggtttgcacaatgcactgggtgatgtggtaaagaatgatcctttgttggtatgtgactgggaggagacactaaaccagattacgaagagtacacctgagaccgaacctggttcagcacaaatttaccattacctctccttcggttggctgtgtgggggagtcatagagcatgcatctgggaagaagtttcaagagattctagaagaggctattgttcgtcctcttcacattgagggggagttgtatgttggcattccaccaggtgtcgagtctcggctggcagcgctgacagttgacaccgaggagctccagaagctatcaggaatcagggcaggtgcagatgtgccagcagctctgctgaacaacatcgcgcagatggcgtccggtgtgcccgctattttcaacacgctaaacgtccgtcgggccatcatccctgccgccaacggccactgctctgcccgcgcgctcgctcgatactacgcggcgctagcggccggcggttctgttcccccgccgcactcttcgggcgccatgccgcccctcggcagccacgtgcacacccccaagttcccgaccgcgccgctcaagaagaagaagaagggcgccggaaagaagaagggcgccggcggcggctccatgggagacctcaaggtccaggatataagcggcggcagcagcgacaggaacgggtactgccagctgcgcaccagcgacgccgacagcgaggcggggagcggcagcggcggaggcggcaggatgttcggcagcgacaggatcctcgacgcgttcatgggcgtcggcgagtacgagggcatggcgcaccgggacggcaagttcgggctcgggttcaggaggtacgacgacgccagcagcggcagcggcaggctgaggtgctttgggcactccgggatgggcggctcgaccgggttctgcgacgtggagaacggcttcgccatcgcggtgacggtgaacaagctgtctctgggcagcgtcacgcgcggcgtcgtccggctcgtcctcgaggagctgggcctgcccgtgccggacgagtactcggccaccggggagaaggggcctgacatgatgctcaacctgacgacaacgacgacgactacgccgccgcaactgagatgacgacggcgaaactgagattatcaggttgggttcgtaataatctgtggaacaagatatatagcgagcagaaggaaggttggggtacagggatttggtggacagtatatatacgcgtgccattttgattttgacgtggcatgtaaaactcggcaaattctggtatattacgaagctgggtgctgggaattgtggccagcagtacaagaaatggacatgctagtttgttgacctgtgttttttttatggcggaactttttgttttgtcttctgggcttcactaggtctatgctcgtgcgttgccacggaaaacacatgaaatcgtaatatgtgtggta

SEQ ID NO: 210881 - DNA, 3528 bp, Zea Mays
ggacaaacgcgttctccctgaaaagcatgctgtgaggctcgatatcgctgcggctgtcgtgctcccgcagcgcacaggaaggtgagtgaggaggaagaaaccgcatgcaaggggacgggagtacgggaccggcgggcggaagacgaacgggattccaaaaaaacgacttgtcgtggcggagcggaatccacaatagcgacgagccgtcggggtctgccggcctggatgcaaaccagtctcgtcgtcacggactcccggaataaatactccctcctgcggcgcccggcggaaaccgccgaattcccctcttcctcgcgcgtgctcagcgattcgagaaaaaaatactaactgtcttactaggagcctagagtgtccgaatttttgccattgcttgtcctgacttgccaacctacaatgggatggggaaacactattaccagacgcctcaaggttttctctatggccctgtttatctacttcgactataaggctgttcagaagagagttcaatgggttagcactggtaaaaagagtgctatatggaagaaaacacatgagcgaaatgctcgccgtgtcctcaacctgatgatagagttagaaggtttatgggtgaaactgggccaatatttatccacaagagcagatgtacttcctgaaccctacataaatgtcctcaagcagttgcaggattcgcttcctccacgaccttttgaagaggttcgtgaaacgatagagaaagaacttggagaacctatgagtgatctatttgctgattttgtcctagaccctctcgcaaccgcatcaatagcacaagttcatcgtgcaactctggcagatggcagagaagtagttgtcaaaattcagcatgatggtgtgaaggagatcatattagaggatctgaagaatgcaaaatcattgattgaatggatagcgtgggcagagcctcagtatgattttaatccgatgattgatgaatggtgcaaggaggctccaaaggaacttgatttcaaccatgaagcagtcaactggcaaggttctaattttggaatatatggatgggattcgtttaaatgataatgattcattggaagcatatggtgttgacaagcaaaaactggtcgaagagataacccgtgcatacgctcatcaaatatacattgatggcttctttaacggcgaccctcatcctggcaattttcttgtgagcaaggaacctccacataaaccgattctccttgattttgggctcactaagcgcatatctgaatctatgaggcaggcactagcaaaaatgtttttgtcatgtgcagagggagatcacgtggcactgctgtcagcattttcagagatggggcttaaactgcgggttgacatgcctcagcaggctatggatattgccacagtattctttcgtcagtcaaccacagcaagtgaagcaaaggagaacataaaaacacttaatgaccaaagagagagaaatgtcaaagctcttcaagaaaagatgaaattgaacaagaaggaggttcaacgctttaatcctgttgatgctttccccggggatgccataatatttatgagggtcttgaatctcctcagaggtctttcagcttcactaaatgttaggatagtttatctggacatcatgaggccatttgctgaatcaactttgttagggagtttgacacacggacaaatacctaacagtcagtggatttttgactcacctgctaactctgatgtggagtctaaactgagaaattatctgcttgagttgggaagcgacaaaattttaggaatacaagtctgcgcatataaagatggaaaggtcataatagatactgctgctggtatgctggggaagtatgatccccgacctgttcaacctgattctctttttcctgttttctcagtgactaagggtatcactgctgggatggtacattggcttgtggacaaagggaagctgaagtacgaggaaacagttgccaacatatggccgaattttggaactaacggaaaggagttaataaaggtccatcatcttctaaatcacacatccggtttgcacaatgcactgggtgatgtggtaaagaatgatcctttgttggtatgtgactgggaggagacactaaaccagattacgaagagtacacctgagaccgaacctggttcagcacaaatttaccattacctctccttcggttggctgtgtgggggagtcatagagcatgcatctgggaagaagtttcaagagattctagaagaggctattgttcgtcctcttcacattgagggggagttgtatgttggcattccaccaggtgtcgagtctcggctggcagcgctgacagttgacaccgaggagctccagaagctatcaggaatcagggcaggtgcagatgtgccagcagctctgctgaacaacatcgcgcagatggcgtccggtgtgcccgctattttcaacacgctaaacgtccgtcgggccatcatccctgccgccaacggccactgctctgcccgcgcgctcgctcgatactacgcggcgctagcggccggcggttctgttcccccgccgcactcttcgggcgccatgccgcccctcggcagccacgtgcacacccccaagttcccgaccgcgccgctcaagaagaagaagaagggcgccggaaagaagaagggcgccggcggcggctccatgggagacctcaaggtccaggatataagcggcggcagcagcgacaggaacgggtactgccagctgcgcaccagcgacgccgacagcgaggcggggagcggcagcggcggaggcggcaggatgttcggcagcgacaggatcctcgacgcgttcatgggcgtcggcgagtacgagggcatggcgcaccgggacggcaagttcgggctcgggttcaggaggtacgacgacgccagcagcggcagcggcaggctgaggtgctttgggcactccgggatgggcggctcgaccgggttctgcgacgtggagaacggcttcgccatcgcggtgacggtgaacaagctgtctctgggcagcgtcacgcgcggcgtcgtccggctcgtcctcgaggagctgggcctgcccgtgccggacgagtactcggccaccggggagaaggggcctgacatgatgctcaacctgacgacaacgacgacgactacgccgccgcaactgagatgacgacggcgaaactgagattatcaggttgggttcgtaataatctgtggaacaagatatatagcgagcagaaggaaggttggggtacagggatttggtggacagtatatatacgcgtgccattttgattttgacgtggcatgtaaaactcggcaaattctggtatattacgaagctgggtgctgggaattgtggccagcagtacaagaaatggacatgctagtttgttgacctgtgttttttttatggcggaactttttgttttgtcttctgggcttcactaggtctatgctcgtgcgttgccacggaaaacacatgaaatcgtaatatgtgtggta

SEQ ID NO: 210882 - DNA, 3511 bp, Zea Mays
gatgatcaagtaaagcagttgaaacagcgtccccttggtgttggaatcatgcgaaagatcatgaaaaaaatactaactgtcttactaggagcctagagtgtccgaatttttgccattgcttgtcctgacttgccaacctacaatgggatggggaaacactattaccagacgcctcaaggttttctctatggccctgtttatctacttcgactataaggctgttcagaagagagttcaatgggttagcactggtaaaaagagtgctatatggaagaaaacacatgagcgaaatgctcgccgtgtcctcaacctgatgatagagttagaaggtttatgggtgaaactgggccaatatttatccacaagagcagatgtacttcctgaaccctacataaatgtcctcaagcagttgcaggattcgcttcctccacgaccttttgaagaggttcgtgaaacgatagagaaagaacttggagaacctatgagtgatctatttgctgattttgtcctagaccctctcgcaaccgcatcaatagcacaagttcatcgtgcaactctggcagatggcagagaagtagttgtcaaaattcagcatgatggtgtgaaggagatcatattagaggtttatctctaacctgcaagtatgctgtctagcacagttggagtccattacatttttctattggtggccaggatctgaagaatgcaaaatcattgattgaatggatagcgtgggcagagcctcagtatgattttaatccgatgattgatgaatggtgcaaggaggctccaaaggaacttgatttcaaccatgaagcagagaatactagggctgtctccaggaatcttagtcgcaaaagtgactgtgggagtggcagtgtttccagtactgttgatgtactcattccagaagttattcagtcaactggcaaggttctaattttggaatatatggatgggattcgtttaaatgataatgattcattggaagcatatggtgttgacaagcaaaaactggtcgaagagataacccgtgcatacgctcatcaaatatacattgatggcttctttaacggcgaccctcatcctggcaattttcttgtgagcaaggaacctccacataaaccgattctccttgattttgggctcactaagcgcatatctgaatctatgaggcaggcactagcaaaaatgtttttgtcatgtgcagagggagatcacgtggcactgctgtcagcattttcagagatggggcttaaactgcgggttgacatgcctcagcaggctatggatattgccacagtattctttcgtcagtcaaccacagcaagtgaagcaaaggagaacataaaaacacttaatgaccaaagagagagaaatgtcaaagctcttcaagaaaagatgaaattgaacaagaaggaggttcaacgctttaatcctgtgagttggaatgtctagcttgctacttttcagtttccacagccaattgatggggtgtcacatggacattttcatgcttttaggttgatgctttccccggggatgccataatatttatgagggtcttgaatctcctcagaggtctttcagcttcactaaatgttaggatagtttatctggacatcatgaggccatttgctgaatcaactttgttagggagtttgacacacggacaaatacctaacagtcagtggatttttgactcacctgctaactctgatgtggagtctaaactgagaaattatctgcttgagttgggaagcgacaaaattttaggaatacaagtctgcgcatataaagatggaaaggtcataatagatactgctgctggtatgctggggaagtatgatccccgacctgttcaacctgattctctttttcctgttttctcagtgactaagggtatcactgctgggatggtacattggcttgtggacaaagggaagctgaagtacgaggaaacagttgccaacatatggccgaattttggaactaacggaaaggagttaataaaggtccatcatcttctaaatcacacatccggtttgcacaatgcactgggtgatgtggtaaagaatgatcctttgttggtatgtgactgggaggagacactaaaccagattacgaagagtacacctgagaccgaacctggttcagcacaaatttaccattacctctccttcggttggctgtgtgggggagtcatagagcatgcatctgggaagaagtttcaagagattctagaagaggctattgttcgtcctcttcacattgagggggagttgtatgttggcattccaccaggtgtcgagtctcggctggcagcgctgacagttgacaccgaggagctccagaagctatcaggaatcagggcaggtgcagatgtgccagcagctctgctgaacaacatcgcgcagatggcgtccggtgtgcccgctattttcaacacgctaaacgtccgtcgggccatcatccctgccgccaacggccactgctctgcccgcgcgctcgctcgatactacgcggcgctagcggccggcggttctgttcccccgccgcactcttcgggcgccatgccgcccctcggcagccacgtgcacacccccaagttcccgaccgcgccgctcaagaagaagaagaagggcgccggaaagaagaagggcgccggcggcggctccatgggagacctcaaggtccaggatataagcggcggcagcagcgacaggaacgggtactgccagctgcgcaccagcgacgccgacagcgaggcggggagcggcagcggcggaggcggcaggatgttcggcagcgacaggatcctcgacgcgttcatgggcgtcggcgagtacgagggcatggcgcaccgggacggcaagttcgggctcgggttcaggaggtacgacgacgccagcagcggcagcggcaggctgaggtgctttgggcactccgggatgggcggctcgaccgggttctgcgacgtggagaacggcttcgccatcgcggtgacggtgaacaagctgtctctgggcagcgtcacgcgcggcgtcgtccggctcgtcctcgaggagctgggcctgcccgtgccggacgagtactcggccaccggggagaaggggcctgacatgatgctcaacctgacgacaacgacgacgactacgccgccgcaactgagatgacgacggcgaaactgagattatcaggttgggttcgtaataatctgtggaacaagatatatagcgagcagaaggaaggttggggtacagggatttggtggacagtatatatacgcgtgccattttgattttgacgtggcatgtaaaactcggcaaattctggtatattacgaagctgggtgctgggaattgtggccagcagtacaagaaatggacatgctagtttgttgacctgtgttttttttatggcggaactttttgttttgtcttctgggcttcactaggtctatgctcgtgcgttgccacggaaaacacatgaaatcgtaatatgtgtggta

SEQ ID NO: 210883 - DNA, 3225 bp, Zea Mays
gtcaaggttttgaagctgcgatttgtccatgtaaaaaaatactaactgtcttactaggagcctagagtgtccgaatttttgccattgcttgtcctgacttgccaacctacaatgggatggggaaacactattaccagacgcctcaaggttttctctatggccctgtttatctacttcgactataaggctgttcagaagagagttcaatgggttagcactggtaaaaagagtgctatatggaagaaaacacatgagcgaaatgctcgccgtgtcctcaacctgatgatagagttagaaggtttatgggtgaaactgggccaatatttatccacaagagcagatgtacttcctgaaccctacataaatgtcctcaagcagttgcaggattcgcttcctccacgaccttttgaagaggttcgtgaaacgatagagaaagaacttggagaacctatgagtgatctatttgctgattttgtcctagaccctctcgcaaccgcatcaatagcacaagttcatcgtgcaactctggcagatggcagagaagtagttgtcaaaattcagcatgatggtgtgaaggagatcatattagaggatctgaagaatgcaaaatcattgattgaatggatagcgtgggcagagcctcagtatgattttaatccgatgattgatgaatggtgcaaggaggctccaaaggaacttgatttcaaccatgaagcagtcaactggcaaggttctaattttggaatatatggatgggattcgtttaaatgataatgattcattggaagcatatggtgttgacaagcaaaaactggtcgaagagataacccgtgcatacgctcatcaaatatacattgatggcttctttaacggcgaccctcatcctggcaattttcttgtgagcaaggaacctccacataaaccgattctccttgattttgggctcactaagcgcatatctgaatctatgaggcaggcactagcaaaaatgtttttgtcatgtgcagagggagatcacgtggcactgctgtcagcattttcagagatggggcttaaactgcgggttgacatgcctcagcaggctatggatattgccacagtattctttcgtcagtcaaccacagcaagtgaagcaaaggagaacataaaaacacttaatgaccaaagagagagaaatgtcaaagctcttcaagaaaagatgaaattgaacaagaaggaggttcaacgctttaatcctgttgatgctttccccggggatgccataatatttatgagggtcttgaatctcctcagaggtctttcagcttcactaaatgttaggatagtttatctggacatcatgaggccatttgctgaatcaactttgttagggagtttgacacacggacaaatacctaacagtcagtggatttttgactcacctgctaactctgatgtggagtctaaactgagaaattatctgcttgagttgggaagcgacaaaattttaggaatacaagtctgcgcatataaagatggaaaggtcataatagatactgctgctggtatgctggggaagtatgatccccgacctgttcaacctgattctctttttcctgttttctcagtgactaagggtatcactgctgggatggtacattggcttgtggacaaagggaagctgaagtacgaggaaacagttgccaacatatggccgaattttggaactaacggaaaggagttaataaaggtccatcatcttctaaatcacacatccggtttgcacaatgcactgggtgatgtggtaaagaatgatcctttgttggtatgtgactgggaggagacactaaaccagattacgaagagtacacctgagaccgaacctggttcagcacaaatttaccattacctctccttcggttggctgtgtgggggagtcatagagcatgcatctgggaagaagtttcaagagattctagaagaggctattgttcgtcctcttcacattgagggggagttgtatgttggcattccaccaggtgtcgagtctcggctggcagcgctgacagttgacaccgaggagctccagaagctatcaggaatcagggcaggtgcagatgtgccagcagctctgctgaacaacatcgcgcagatggcgtccggtgtgcccgctattttcaacacgctaaacgtccgtcgggccatcatccctgccgccaacggccactgctctgcccgcgcgctcgctcgatactacgcggcgctagcggccggcggttctgttcccccgccgcactcttcgggcgccatgccgcccctcggcagccacgtgcacacccccaagttcccgaccgcgccgctcaagaagaagaagaagggcgccggaaagaagaagggcgccggcggcggctccatgggagacctcaaggtccaggatataagcggcggcagcagcgacaggaacgggtactgccagctgcgcaccagcgacgccgacagcgaggcggggagcggcagcggcggaggcggcaggatgttcggcagcgacaggatcctcgacgcgttcatgggcgtcggcgagtacgagggcatggcgcaccgggacggcaagttcgggctcgggttcaggaggtacgacgacgccagcagcggcagcggcaggctgaggtgctttgggcactccgggatgggcggctcgaccgggttctgcgacgtggagaacggcttcgccatcgcggtgacggtgaacaagctgtctctgggcagcgtcacgcgcggcgtcgtccggctcgtcctcgaggagctgggcctgcccgtgccggacgagtactcggccaccggggagaaggggcctgacatgatgctcaacctgacgacaacgacgacgactacgccgccgcaactgagatgacgacggcgaaactgagattatcaggttgggttcgtaataatctgtggaacaagatatatagcgagcagaaggaaggttggggtacagggatttggtggacagtatatatacgcgtgccattttgattttgacgtggcatgtaaaactcggcaaattctggtatattacgaagctgggtgctgggaattgtggccagcagtacaagaaatggacatgctagtttgttgacctgtgttttttttatggcggaactttttgttttgtcttctgggcttcactaggtctatgctcgtgcgttgccacggaaaacacatgaaatcgtaatatgtgtggta

SEQ ID NO: 210884 - DNA, 3320 bp, Zea Mays
gttttgaagctgcgatttgtccatgtaaaaaaatactaactgtcttactaggagcctagagtgtccgaatttttgccattgcttgtcctgacttgccaacctacaatgggatggggaaacactattaccagacgcctcaaggttttctctatggccctgtttatctacttcgactataaggctgttcagaagagagttcaatgggttagcactggtaaaaagagtgctatatggaagaaaacacatgagcgaaatgctcgccgtgtcctcaacctgatgatagagttagaaggtttatgggtgaaactgggccaatatttatccacaagagcagatgtacttcctgaaccctacataaatgtcctcaagcagttgcaggattcgcttcctccacgaccttttgaagaggttcgtgaaacgatagagaaagaacttggagaacctatgagtgatctatttgctgattttgtcctagaccctctcgcaaccgcatcaatagcacaagttcatcgtgcaactctggcagatggcagagaagtagttgtcaaaattcagcatgatggtgtgaaggagatcatattagaggatctgaagaatgcaaaatcattgattgaatggatagcgtgggcagagcctcagtatgattttaatccgatgattgatgaatggtgcaaggaggctccaaaggaacttgatttcaaccatgaagcagagaatactagggctgtctccaggaatcttagtcgcaaaagtgactgtgggagtggcagtgtttccagtactgttgatgtactcattccagaagttattcagtcaactggcaaggttctaattttggaatatatggatgggattcgtttaaatgataatgattcattggaagcatatggtgttgacaagcaaaaactggtcgaagagataacccgtgcatacgctcatcaaatatacattgatggcttctttaacggcgaccctcatcctggcaattttcttgtgagcaaggaacctccacataaaccgattctccttgattttgggctcactaagcgcatatctgaatctatgaggcaggcactagcaaaaatgtttttgtcatgtgcagagggagatcacgtggcactgctgtcagcattttcagagatggggcttaaactgcgggttgacatgcctcagcaggctatggatattgccacagtattctttcgtcagtcaaccacagcaagtgaagcaaaggagaacataaaaacacttaatgaccaaagagagagaaatgtcaaagctcttcaagaaaagatgaaattgaacaagaaggaggttcaacgctttaatcctgttgatgctttccccggggatgccataatatttatgagggtcttgaatctcctcagaggtctttcagcttcactaaatgttaggatagtttatctggacatcatgaggccatttgctgaatcaactttgttagggagtttgacacacggacaaatacctaacagtcagtggatttttgactcacctgctaactctgatgtggagtctaaactgagaaattatctgcttgagttgggaagcgacaaaattttaggaatacaagtctgcgcatataaagatggaaaggtcataatagatactgctgctggtatgctggggaagtatgatccccgacctgttcaacctgattctctttttcctgttttctcagtgactaagggtatcactgctgggatggtacattggcttgtggacaaagggaagctgaagtacgaggaaacagttgccaacatatggccgaattttggaactaacggaaaggagttaataaaggtccatcatcttctaaatcacacatccggtttgcacaatgcactgggtgatgtggtaaagaatgatcctttgttggtatgtgactgggaggagacactaaaccagattacgaagagtacacctgagaccgaacctggttcagcacaaatttaccattacctctccttcggttggctgtgtgggggagtcatagagcatgcatctgggaagaagtttcaagagattctagaagaggctattgttcgtcctcttcacattgagggggagttgtatgttggcattccaccaggtgtcgagtctcggctggcagcgctgacagttgacaccgaggagctccagaagctatcaggaatcagggcaggtgcagatgtgccagcagctctgctgaacaacatcgcgcagatggcgtccggtgtgcccgctattttcaacacgctaaacgtccgtcgggccatcatccctgccgccaacggccactgctctgcccgcgcgctcgctcgatactacgcggcgctagcggccggcggttctgttcccccgccgcactcttcgggcgccatgccgcccctcggcagccacgtgcacacccccaagttcccgaccgcgccgctcaagaagaagaagaagggcgccggaaagaagaagggcgccggcggcggctccatgggagacctcaaggtccaggatataagcggcggcagcagcgacaggaacgggtactgccagctgcgcaccagcgacgccgacagcgaggcggggagcggcagcggcggaggcggcaggatgttcggcagcgacaggatcctcgacgcgttcatgggcgtcggcgagtacgagggcatggcgcaccgggacggcaagttcgggctcgggttcaggaggtacgacgacgccagcagcggcagcggcaggctgaggtgctttgggcactccgggatgggcggctcgaccgggttctgcgacgtggagaacggcttcgccatcgcggtgacggtgaacaagctgtctctgggcagcgtcacgcgcggcgtcgtccggctcgtcctcgaggagctgggcctgcccgtgccggacgagtactcggccaccggggagaaggggcctgacatgatgctcaacctgacgacaacgacgacgactacgccgccgcaactgagatgacgacggcgaaactgagattatcaggttgggttcgtaataatctgtggaacaagatatatagcgagcagaaggaaggttggggtacagggatttggtggacagtatatatacgcgtgccattttgattttgacgtggcatgtaaaactcggcaaattctggtatattacgaagctgggtgctgggaattgtggccagcagtacaagaaatggacatgctagtttgttgacctgtgttttttttatggcggaactttttgttttgtcttctgggcttcactaggtctatgctcgtgcgttgccacggaaaacacatgaaatcgtaatatgtgtggta

SEQ ID NO: 210885 - DNA, 3383 bp, Zea Mays
tctgggtgtgttgtctggtaaactagctacttgctcatctcattggcatgccacttaatacacgacgtgggaggctcgaacccttttcaaaaaaaatactaactgtcttactaggagcctagagtgtccgaatttttgccattgcttgtcctgacttgccaacctacaatgggatggggaaacactattaccagacgcctcaaggttttctctatggccctgtttatctacttcgactataaggctgttcagaagagagttcaatgggttagcactggtaaaaagagtgctatatggaagaaaacacatgagcgaaatgctcgccgtgtcctcaacctgatgatagagttagaaggtttatgggtgaaactgggccaatatttatccacaagagcagatgtacttcctgaaccctacataaatgtcctcaagcagttgcaggattcgcttcctccacgaccttttgaagaggttcgtgaaacgatagagaaagaacttggagaacctatgagtgatctatttgctgattttgtcctagaccctctcgcaaccgcatcaatagcacaagttcatcgtgcaactctggcagatggcagagaagtagttgtcaaaattcagcatgatggtgtgaaggagatcatattagaggatctgaagaatgcaaaatcattgattgaatggatagcgtgggcagagcctcagtatgattttaatccgatgattgatgaatggtgcaaggaggctccaaaggaacttgatttcaaccatgaagcagagaatactagggctgtctccaggaatcttagtcgcaaaagtgactgtgggagtggcagtgtttccagtactgttgatgtactcattccagaagttattcagtcaactggcaaggttctaattttggaatatatggatgggattcgtttaaatgataatgattcattggaagcatatggtgttgacaagcaaaaactggtcgaagagataacccgtgcatacgctcatcaaatatacattgatggcttctttaacggcgaccctcatcctggcaattttcttgtgagcaaggaacctccacataaaccgattctccttgattttgggctcactaagcgcatatctgaatctatgaggcaggcactagcaaaaatgtttttgtcatgtgcagagggagatcacgtggcactgctgtcagcattttcagagatggggcttaaactgcgggttgacatgcctcagcaggctatggatattgccacagtattctttcgtcagtcaaccacagcaagtgaagcaaaggagaacataaaaacacttaatgaccaaagagagagaaatgtcaaagctcttcaagaaaagatgaaattgaacaagaaggaggttcaacgctttaatcctgttgatgctttccccggggatgccataatatttatgagggtcttgaatctcctcagaggtctttcagcttcactaaatgttaggatagtttatctggacatcatgaggccatttgctgaatcaactttgttagggagtttgacacacggacaaatacctaacagtcagtggatttttgactcacctgctaactctgatgtggagtctaaactgagaaattatctgcttgagttgggaagcgacaaaattttaggaatacaagtctgcgcatataaagatggaaaggtcataatagatactgctgctggtatgctggggaagtatgatccccgacctgttcaacctgattctctttttcctgttttctcagtgactaagggtatcactgctgggatggtacattggcttgtggacaaagggaagctgaagtacgaggaaacagttgccaacatatggccgaattttggaactaacggaaaggagttaataaaggtccatcatcttctaaatcacacatccggtttgcacaatgcactgggtgatgtggtaaagaatgatcctttgttggtatgtgactgggaggagacactaaaccagattacgaagagtacacctgagaccgaacctggttcagcacaaatttaccattacctctccttcggttggctgtgtgggggagtcatagagcatgcatctgggaagaagtttcaagagattctagaagaggctattgttcgtcctcttcacattgagggggagttgtatgttggcattccaccaggtgtcgagtctcggctggcagcgctgacagttgacaccgaggagctccagaagctatcaggaatcagggcaggtgcagatgtgccagcagctctgctgaacaacatcgcgcagatggcgtccggtgtgcccgctattttcaacacgctaaacgtccgtcgggccatcatccctgccgccaacggccactgctctgcccgcgcgctcgctcgatactacgcggcgctagcggccggcggttctgttcccccgccgcactcttcgggcgccatgccgcccctcggcagccacgtgcacacccccaagttcccgaccgcgccgctcaagaagaagaagaagggcgccggaaagaagaagggcgccggcggcggctccatgggagacctcaaggtccaggatataagcggcggcagcagcgacaggaacgggtactgccagctgcgcaccagcgacgccgacagcgaggcggggagcggcagcggcggaggcggcaggatgttcggcagcgacaggatcctcgacgcgttcatgggcgtcggcgagtacgagggcatggcgcaccgggacggcaagttcgggctcgggttcaggaggtacgacgacgccagcagcggcagcggcaggctgaggtgctttgggcactccgggatgggcggctcgaccgggttctgcgacgtggagaacggcttcgccatcgcggtgacggtgaacaagctgtctctgggcagcgtcacgcgcggcgtcgtccggctcgtcctcgaggagctgggcctgcccgtgccggacgagtactcggccaccggggagaaggggcctgacatgatgctcaacctgacgacaacgacgacgactacgccgccgcaactgagatgacgacggcgaaactgagattatcaggttgggttcgtaataatctgtggaacaagatatatagcgagcagaaggaaggttggggtacagggatttggtggacagtatatatacgcgtgccattttgattttgacgtggcatgtaaaactcggcaaattctggtatattacgaagctgggtgctgggaattgtggccagcagtacaagaaatggacatgctagtttgttgacctgtgttttttttatggcggaactttttgttttgtcttctgggcttcactaggtctatgctcgtgcgttgccacggaaaacacatgaaatcgtaatatgtgtggta

SEQ ID NO: 210886 - DNA, 1605 bp, Zea Mays
tttcttatgcgataagacagttacgatcccatggaatccgcttgaccaaattgacctttcaggataggaataatttcagacaggaaggggaaaaggttgctagtacagcaaattcgtttgggcgctttggttgtgctatgagcaggcacatatatatctagactgattataataggcagttatctgacatggaggagcacatgggaagacgaacagtcggcggcctgctattaaccaagggaggatcaattcttctcttcagagaggacggttcgcgccccagggccaagaactgctgctcgcgccatggctgcagtggtcatcattctgttggcaaagccaaaggcaaggaggtgcacagggcagcggtggccaatgaatcaacaccggctaccccacggagaccaaagatttgtaggaatcccgacagaatgccaccacatggaaccagtgctccaggcagcatcagcaaggatgcaggaggctcttgtagcgaaaccggcaacaggtcaagagacactcccggtcccgggcgtgatctactggctcggctcaaggagagggtcaacacatcaaggaaacggtcattgaacagggagaacagcccacagtcaccgagtggattcactgctagttccccgagcaacagtcgatcagtctcgctctcaaggccgtcgcaccgggcagcttcgagggtaagaagagctgatgaaggtgcaaatgcaggagctgacagtgtgcacagaaatggtgctgggggtgctaggaggagttcacagaggggtgacgcaggcttgctgctagttgagcagcaggtagcaagaaaccatgtgccttctgaagggtttctttctgggttcatggcgagatacagaagcgggcttcaggaagggctttcgtccctggacgacagcgtggaggattcaaatgggtacttgcgctttgatacgggtggaattgaagagctccagaactatttaatattcagcgatcggcacagaggaatgaggatggatatcgacggcatgtcctacgaagagttgcttgctttgggagagcggattggtactgtaaaaacaggtctttcagacgatgcattgtccacgtgcctaaataggagcctctacatgcccacagctccagggtctcatgaagattgtgaaacaaaatgcagcatatgccaggaggagtatttatcgggtgaggatgtgggcaagatggcgtgtaaacactactaccacctttcctgcatagagcactggcttcggcagaagaaccggtgtcctatatgcaaatctgttgccctgaaaaccaagtagcaacgtgtttcatgtttctttatagattcttcatatcctttatcccctccgcacctctcacattttcccttttggaattcttttccttcctttttcttactcaaagcactcatttttgtatcaatttaaatcagaaaaggaaatcttgtgttgtgttagcaacttgctgcgagcctggaccctgttggcccaaggcctagtaagaacaacccaatttattacgggagaagtccactgtctgctcaactgttgaaagtacagaaatggatatcgtgcactccaacaa

SEQ ID NO: 210887 - DNA, 1568 bp, Zea Mays
agacagttacgatcccatggaatccgataggaataatttcagacaggaaggggaaaaggttgctagtacagcaaattcgtttgggcgctttggttgtgctatgagcaggcacatatatatctagactgattataataggcagttatctgacatggaggagcacatgggaagacgaacagtcggcggcctgctattaaccaagggaggatcaattcttctcttcagagaggacggttcgcgccccagggccaagaactgctgctcgcgccatggctgcagtggtcatcattctgttggcaaagccaaaggcaaggaggtgcacagggcagcggtggccaatgaatcaacaccggctaccccacggagaccaaagatttgtaggaatcccgacagaatgccaccacatggaaccagtgctccaggcagcatcagcaaggatgcaggaggctcttgtagcgaaaccggcaacaggtcaagagacactcccggtcccgggcgtgatctactggctcggctcaaggagagggtcaacacatcaaggaaacggtcattgaacagggagaacagcccacagtcaccgagtggattcactgctagttccccgagcaacagtcgatcagtctcgctctcaaggccgtcgcaccgggcagcttcgagggtaagaagagctgatgaaggtgcaaatgcaggagctgacagtgtgcacagaaatggtgctgggggtgctaggaggagttcacagaggggtgacgcaggcttgctgctagttgagcagcaggtagcaagaaaccatgtgccttctgaagggtttctttctgggttcatggcgagatacagaagcgggcttcaggaagggctttcgtccctggacgacagcgtggaggattcaaatgggtacttgcgctttgatacgggtggaattgaagagctccagaactatttaatattcagcgatcggcacagaggaatgaggatggatatcgacggcatgtcctacgaagagttgcttgctttgggagagcggattggtactgtaaaaacaggtctttcagacgatgcattgtccacgtgcctaaataggagcctctacatgcccacagctccagggtctcatgaagattgtgaaacaaaatgcagcatatgccaggaggagtatttatcgggtgaggatgtgggcaagatggcgtgtaaacactactaccacctttcctgcatagagcactggcttcggcagaagaaccggtgtcctatatgcaaatctgttgccctgaaaaccaagtagcaacgtgtttcatgtttctttatagattcttcatatcctttatcccctccgcacctctcacattttcccttttggaattcttttccttcctttttcttactcaaagcactcatttttgtatcaatttaaatcagaaaaggaaatcttgtgttgtgttagcaacttgctgcgagcctggaccctgttggcccaaggcctagtaagaacaacccaatttattacgggagaagtccactgtctgctcaactgttgaaagtacagaaatggatatcgtgcactccaacaa

SEQ ID NO: 210888 - DNA, 871 bp, Zea Mays
gcagaagctgctgcagtgccacgcggagttggcgaggagcggcgcgtccgtctgccgggagtgcgcgtacctcgtctctccggcccagtacctgtgcatcgacgccctccagctcctgtcatccacccgtgtagcctgcagaggttctccatggtgacgttctcgtggtagtagtggggggattattgtcctcaagggcttgggaggagattcccagatcggccaaagaaagctgcaatggattcaccaaacccatacaatataagaagagacaacgcacgagcatggaacagcaacggccggcctccatgactagagcagtcccagaatccaacaacaaccagcatcattccccattggaaggccgaatgcgccacacgcccgcggcagataagcgtctcgacgggccaaagaacctaccccctctcgccatgcagcgcagatctgacgggaagggaacgcgggtgaatcgcagatgccgtcggtcttcttgtgcccgtagtgcttcacctttcttcacgttctacaggggagcaaaagattgagaagttcagagatacacttgcgaagcacagacttctgacaccaacgacaccattggcaaggcagggatctgatgatatgtccttggtgtcatccgtgatataaaccacttcctttagtcatgtgttattcttcattgttattcatgtgtacaatttgttcctttccattgtcacagagttcaggttttcagatttttttgcctgtgaagtctacccacgctgcctcgctcttgttctttataatgagatgaaattgtatggtggctttcgagtgagatgaaatgtatggtggctttgggagtgactcattgtggtttactaagtat

SEQ ID NO: 210889 - DNA, 677 bp, Zea Mays
cgcaacaaccccacgccccacccggcgatacggtagccgacacctctaccccgggtcgtgcccgtcccctcccctcccccatcccagtgatacggtagcccgccagcctcgcgtcccgccgtcacccgttcacttcctctccctgccgccacagctcgcgcaacccccatctcaccctcttccttcctgccacaccatcgctaccaccgcccgccctgagagggcccggcgtcatggaccccctcaagaagatgatggcgcggggagtgttctcggacctacagaacttctccggccatatggagcacctggtcagcgccgacgacctcaatcgcatggctcgacgattgagaagttcagagatacacttgcgaagcacagacttctgacaccaacgacaccattggcaaggcagggatctgatgatatgtccttggtgtcatccgtgatataaaccacttcctttagtcatgtgttattcttcattgttattcatgtgtacaatttgttcctttccattgtcacagagttcaggttttcagatttttttgcctgtgaagtctacccacgctgcctcgctcttgttctttataatgagatgaaattgtatggtggctttcgagtgagatgaaatgtatggtggctttgggagtgactcattgtggtttactaagtat

SEQ ID NO: 210890 - DNA, 966 bp, Zea Mays
cggaatagttccatacagaccagggttccggcttttaagccaaccacacacgcccgacatccaggacccacattacaaaaatacgcttttctcacacacaaacgccccacgctcggctgagcactttcccgccgtcttcagaccgtcacaccctcggtcgtgacaggtttctgcctccactgccttccccaccgccgccatgccctcctccgccgcccgggccctcacatccgtctcccgcgcagccttctcctggaagccgacggggcggccgcagcaaacgctggcggcggcggtgagcaggtcgggcgtggggctccactcgggagcgcgcgtcaccgccacgctgtttccgacgcaagctggagagggtaggtatttcctcgtggagggtgatgaggaggcgagggtagcggcagaggtggggaacgccgagccactgtcgcagctctgcacgacgcttcgtcggggcgaaggcgcccacacgcgggtccggacggtggaacaccttctttcggcgatggaggcgcttggcgtcgacaactgccgtatcgaggttagcggcggggatgagattcctttgcttgatggatcagcgcaagagtgggtagaggcagtacaaggcgttggcttgtgtgcggcagaggatgccaatggggaaaagttggataaactggcgcctgaaattcaggagcctgtttacctacggaaacacgattgctttatagctgcattccctagcccacaaatccacataacctgtggcattgatttcccaaagatcctagcttcgcccctggtaaggatggctcaggaaaagatgatccaacaggagaagatgaagcatcagaaggattgagccattagaagatggcgagatggggaaaaattccttgcacctagatgtacagaagcaacaccacatgcttcgtctgatcatgacacatgtccatcctactaatctta

SEQ ID NO: 210891 - DNA, 746 bp, Zea Mays
ttggccgtgcgtccgtggctttgcatctgcaaccccgcccgatcaatcttcctcgttccgccgctccctcgcctccggcagcgaggtgaggccaccgatcggaccttccctagcggcggcgcctaccaacctcaaggagcgatggctctgtctgcgacgctacggatttctcttagcgtcgcgttctttggggttctggcgttcgtgcttggtgtcatcgccgaaaacaaaaaggcttgtctcagccctggctcttgcaatgtcgctgtgggcaactgtcaccgagggtcttcaccgcagcaagaacatccaccacgacatggactaccagtgccctactgccaagaccggcctgttcggcggcgccgctttcctcgcccttgacgctgctctcttctggcttgtttgccagatgctggccctcaatgcaagggctgactaccttgacgaggatgacggcaagggagaatatggccagatttatgctgctcaagtcgatgatggctcgaaggtctgagcctatgtggtcatgctcggcagggttctatgattagtgtcatttggctacattatgccatcaacaaagtcgctttagctctcagtaaatttgtatataagttgcaaagtcttacataaggctggtggttattgcactttcgtgtttcagtgtgatcgataaacagtatctcagtacaatcggtttgctatgccccttggcgaacttgtccttgagttttctgttctct

SEQ ID NO: 210892 - DNA, 860 bp, Zea Mays
attggccgtgcgtccgtggctttgcatctgcaaccccgcccgatcaatcttcctcgttccgccgctccctcgcctccggcagcgaggtgaggccaccgatcggaccttccctagcggcggcgcctaccaacctcaaggagcgatggctctgtctgcgacgctacggatttctcttagcgtcgcgttctttggggttctggcgttcgtgcttggtgtcatcgccgaaaacaaaaagtataaatttatgcaagaggaggatgggttttggcatagtggtgggaagccttcccattcagccaaaggtcctgcattcgacgcagcctctttgcaaaatgctctctgcaaaatgcttgtctcagccctggctcttgcaatgtcgctgtgggcaactgtcaccgagggtcttcaccgcagcaagaacatccaccacgacatggactaccagtgccctactgccaagaccggcctgttcggcggcgccgctttcctcgcccttgacgctgctctcttctggcttgtttgccagatgctggccctcaatgcaagggctgactaccttgacgaggatgacggcaagggagaatatggccagatttatgctgctcaagtcgatgatggctcgaaggtctgagcctatgtggtcatgctcggcagggttctatgattagtgtcatttggctacattatgccatcaacaaagtcgctttagctctcagtaaatttgtatataagttgcaaagtcttacataaggctggtggttattgcactttcgtgtttcagtgtgatcgataaacagtatctcagtacaatcggtttgctatgccccttggcgaacttgtccttgagttttctgttctct

SEQ ID NO: 210893 - DNA, 522 bp, Zea Mays
tacttgctgagcttgtctcagccctggctcttgcaatgtcgctgtgggcaactgtcaccgagggtcttcaccgcagcaagaacatccaccacgacatggactaccagtgccctactgccaagaccggcctgttcggcggcgccgctttcctcgcccttgacgctgctctcttctggcttgtttgccagatgctggccctcaatgcaagggctgactaccttgacgaggatgacggcaagggagaatatggccagatttatgctgctcaagtcgatgatggctcgaaggtctgagcctatgtggtcatgctcggcagggttctatgattagtgtcatttggctacattatgccatcaacaaagtcgctttagctctcagtaaatttgtatataagttgcaaagtcttacataaggctggtggttattgcactttcgtgtttcagtgtgatcgataaacagtatctcagtacaatcggtttgctatgccccttggcgaacttgtccttgagttttctgttctct

SEQ ID NO: 210894 - DNA, 831 bp, Zea Mays
cttcctcctgtccttttgctgcaactagtagcactggcttcatctagagggaccgtctcctctcctgcacccagactcctctctctctctctctctctctcccctctgtgtgcggtgtgccctggcctcctccgccgccattgcagcgagcaagatcaatccctctgctgccattcatgattggcattgagcctgagttggtgctgttcatcgactgcccaagggaggagctggagcggcgcatcctgcaccgcgatcagggaagagacgacgacaacgtcgacactataaggaagcggtttcaggttttccacgactccactctacctgttgttctgtactacgacagaatggggaaggtccgacgggtagatggcgccaaatccgctgatgcagtctttgacgatgtgaaggctatatttactcagctactgaccactcaggcaagccaaggtggcaatgcgagcagcaggcggagcaatccgccgctttgttcagtgctctaggatgaagcaacatacctccagctccaaataaaaaaaagaggatttcagaaaacacacacttgctgtgcgtatgtggtgtgttcgtgctgtgctgtgctgtgctgtgcagatttaatggcttgttaaaaagaaacagagaataatggccctccccagctgcagctggtatggttgttcgctcagtggcagcactagaggctgcgagcctgctgcaaacacacagcttgtatttctaattgtaaaatgtagcgaaatggatgaatgtgatgtgtgcaactcattcagtttgctttgctgcatctcatctgatgatgcttgtgatggc

SEQ ID NO: 210895 - DNA, 1105 bp, Zea Mays
ctggcttcatctagagggaccgtctcctctcctgcacccagactcctctctctctctctctctctctcccctctgtgtgcggtgtgccctggcctcctccgccgccattgcagcgagcaagatcaatccctctgctgccattcatgagtcaagctggggcattccctcctgggaagaagatcacggtggtgtttgtcataggcggcccaggcagtggcaagggcacccagtgctccaagattgtcagacactttggattcacccacctgagcgctggcgacctcctgcgccaacaatgccatgatcaagaacctgatgcacgaagggaagctcgtgccgtccgacatcatcgtcaggctcctgctcacggccatgctccagagcggaaacgacaggttcctcgtcgacggattccctcgaaacgaggagaaccgccgagcgtacgagagcgttattggcattgagcctgagttggtgctgttcatcgactgcccaagggaggagctggagcggcgcatcctgcaccgcgatcagggaagagacgacgacaacgtcgacactataaggaagcggtttcaggttttccacgactccactctacctgttgttctgtactacgacagaatggggaaggtccgacgggtagatggcgccaaatccgctgatgcagtctttgacgatgtgaaggctatatttactcagctactgaccactcaggcaagccaaggtggcaatgcgagcagcaggcggagcaatccgccgctttgttcagtgctctaggatgaagcaacatacctccagctccaaataaaaaaaagaggatttcagaaaacacacacttgctgtgcgtatgtggtgtgttcgtgctgtgctgtgctgtgctgtgcagatttaatggcttgttaaaaagaaacagagaataatggccctccccagctgcagctggtatggttgttcgctcagtggcagcactagaggctgcgagcctgctgcaaacacacagcttgtatttctaattgtaaaatgtagcgaaatggatgaatgtgatgtgtgcaactcattcagtttgctttgctgcatctcatctgatgatgcttgtgatggc

SEQ ID NO: 210896 - DNA, 1116 bp, Zea Mays
gcttcatctagagggaccgtctcctctcctgcacccagactcctctctctctctctctctctctcccctctgtgtgcggtgtgccctggcctcctccgccgccattgcagcgagcaagatcaatccctctgctgccattcatgagtcaagctggggcattccctcctgggaagaagatcacggtggtgtttgtcataggcggcccaggcagtggcaagggcacccagtgctccaagattgtcagacactttggattcacccacctgagcgctggcgacctcctgcgccaacaagttcagtcagatactgaacacggtgccatgatcaagaacctgatgcacgaagggaagctcgtgccgtccgacatcatcgtcaggctcctgctcacggccatgctccagagcggaaacgacaggttcctcgtcgacggattccctcgaaacgaggagaaccgccgagcgtacgagagcgttattggcattgagcctgagttggtgctgttcatcgactgcccaagggaggagctggagcggcgcatcctgcaccgcgatcagggaagagacgacgacaacgtcgacactataaggaagcggtttcaggttttccacgactccactctacctgttgttctgtactacgacagaatggggaaggtagatggcgccaaatccgctgatgcagtctttgacgatgtgaaggctatatttactcagctactgaccactcaggcaagccaaggtggcaatgcgagcagcaggcggagcaatccgccgctttgttcagtgctctaggatgaagcaacatacctccagctccaaataaaaaaaagaggatttcagaaaacacacacttgctgtgcgtatgtggtgtgttcgtgctgtgctgtgctgtgctgtgcagatttaatggcttgttaaaaagaaacagagaataatggccctccccagctgcagctggtatggttgttcgctcagtggcagcactagaggctgcgagcctgctgcaaacacacagcttgtatttctaattgtaaaatgtagcgaaatggatgaatgtgatgtgtgcaactcattcagtttgctttgctgcatctcatctgatgatgcttgtgatggc

SEQ ID NO: 210897 - DNA, 657 bp, Zea Mays
ccgatcgacgtcgtattggcattgagcctgagttggtgctgttcatcgactgcccaagggaggagctggagcggcgcatcctgcaccgcgatcagggaagagacgacgacaacgtcgacactataaggaagcggtttcaggttttccacgactccactctacctgttgttctgtactacgacagaatggggaaggtagatggcgccaaatccgctgatgcagtctttgacgatgtgaaggctatatttactcagctactgaccactcaggcaagccaaggtggcaatgcgagcagcaggcggagcaatccgccgctttgttcagtgctctaggatgaagcaacatacctccagctccaaataaaaaaaagaggatttcagaaaacacacacttgctgtgcgtatgtggtgtgttcgtgctgtgctgtgctgtgctgtgcagatttaatggcttgttaaaaagaaacagagaataatggccctccccagctgcagctggtatggttgttcgctcagtggcagcactagaggctgcgagcctgctgcaaacacacagcttgtatttctaattgtaaaatgtagcgaaatggatgaatgtgatgtgtgcaactcattcagtttgctttgctgcatctcatctgatgatgcttgtgatggc

SEQ ID NO: 210898 - DNA, 1448 bp, Zea Mays
cggctccggctccgctctccttttgggtggagagcttcatagagcaccaggacacttgcaacgccgggcgggcacgggcggacccctcgccggcgtgtggcgccgggagcaccggtgtggctgctgctagtgctgggtcgcagccgcaggcgccgccgcccatgtcactgtcgaggaccgcgtcgagcaccagcccgtccagcgacattgtcatcagcccggtggccgcctggcccggttcgtcggcaccgacgattccaagccctgcgaccgccgcgttccaccggttcgaacaagtcccgtcgccgcggacaccgccatcggaccaccatcaccgcggcgggcacaacctcgagctgcagctcatgccgccgtccggcagcggcgtggtgggccgtggcgcgccgggggtggcggagtacggcgtcgcgccacgcactccggccgctcctccacagagccaccccgccaccatgcagctgcagctgtccatcggcgtctgcggcggcggggggttcggggacgaggcgatgctggcagcggcgagggagaaagaggaggtggaggcgcgggagcagctgcggcaagctgtggcggagaaggcggcggcgaacgaggcccgcgcgcaggcgaggcggcacgcggagctggccgagcaggagctggcgagcgccaagcggatgcggcggcaggcgcaggtggagctgagccgagcccacgcgctccgggagcacgccgtgcgccaggtgaacgcgacgcttctccagatcacctgcctcggctgccgccacaagttccgcgcgcgtccgcagctcctggatgcggccctgggcgcccccgaggtgacctgcagctacatgtcctccgtcgtgacagaaggcggcgacgccgaggccgacgatgagccgcccctcgacggcagggacggcatgctgcagcggcgccgacacgccatggcaatggacgtcatcctctagctaacctgaaatgagatgatggtcttcgtttcaaatagtttcttgtgtttttgccggcaagacgccggggttgcatttgcattggcccctgctgtatgaggtgtatcagatgccgatgcctgatggtgcgtagacagtggaagaccccgctagctcgatcgggccagtgctgcctagacttcgagtcctgtgatgagaaggaaggaccggagaggtagccattaggcaagtccaaggagagacgaagacgagggctagctgctactagcttactgtgacgtacgtgcatggaatctttcggtgtttgcttcctattggatcttgttggaaagaaacattcattatattgctcatggaaagcaagttgatgatgccctttgtaaaggtcttcagtagccaacagggaaatcaagaatatttgtcacacctaaattcagcgactgcaatataacaccaaattacattaatttg

SEQ ID NO: 210899 - DNA, 1834 bp, Zea Mays
agactaataaccatcgccaatctcctctgtgttcttgcgtgcgcgttgacctgctggcgactctgcgctggtccctctcttcttctgtgaggagccaccagagtacgtacgtacaatggaggaggagggcggcgtcacttcgccgttgctgctgcggcaggggcaggagaaggtttaccacccgggctgcccgggctgtgccaacgaccggaggaaggagctccaggagggactgccgtacaaggagttcttgtacgtctggatcatctgcctcgcgacttctttaccggtgtcatcattattccccttcttgtatttcatgataagagacttgcacgttgcaaaaagaacagaggacatcgggttctatgccggatttgtgggcgcttcatttatgctcggtagatgcttgacctcaactgtctgggggatggcagcagatcggtttgggaggaagccagttgccatactcggcgtcttctccgtggttatattcaacactttatttggactcagtactagttactggatggcaatagccacaagatttctacttggcgctctgaatggtctgcttgggccaatcaaggcttattcgatcgaagtttgcagacctgagcacgaggcgctgggaatatcacttgtcggcacagcctggggaataggtctcatcattgggcctgctctaggaggctaccttgcacagcctgcagaaaaatttccagacctgttttcacctgactcgttcttcgggaggtttccctatttcttgccatgcttatgctcctcgctcttcgctgctgttgttcttgtcatctgcatatggatgccggagacactacacaaacacaaagctcgccatgacgaaaataaaaatgacgaagctttggaggcccaccagagtgactacaaggacaaggacgaacagattccaagtttggatgacaagaagagtttgctcaagaactggcccttcatgtcatccttaattacgtactgtgtgttttccttccatgatatggcttattcagaggtgttctctttatgggccgaaagcgataggaagtatggcggcctcagtctatcatctgaggatgtaggtcaagtgctttcagtcacaggcgtcagtcttctcatataccaactctctgtgtaccctcgtaccaacaaaatccttggacctatcaagacttctcgagttgcagctgttctgtgcatgcttattctcttgggctacccctacatgacacatctgtcaggaactgcactgtccgtcgttctcaacattgcgtcgatcttgaaaatcaatcttgcttctaccatcatctcgagcagcttcatccttcagaacaatgccgtgcctcaagatcagagaggagctgcgaacggactgtcggtgacagtgatgtccctgttcaagtcaatcgctcctgcagctgcaggcactgtgttctcttgggcacaagaacggcagcatgctttcttctttccaggtgaccagatggtgttctttcttctcaatgccatcgagctccttggacttgtcctcacgttcaagcccttcatggccgcaccagagtccagagcagcatgatgcagatggttcgtggatcactaatcgatcagaggtcgagcacacgtaaagatggcaacggtgaagattcgtcggattttgcatgccactccgaattcgccccgtccaatatttgtacccagtacaattctataccgtaccatgtgggtattctatacccgatggatatacatacccaataagaaaatatacaaatataacgaatatgaatagtattcggttttaatatatatttttaat

SEQ ID NO: 210900 - DNA, 1148 bp, Zea Mays
tatcaaccgcatcctctattccagttcttctccacctcgtcctcgtgccttctcgcccgcccccccaaaattcacccggccaccctctaccaccacgtcggcgcgggtagcaagcagttggtctcatcgtcctcgcacctgacaacgtcgcggttcgcgctctcgcctcgtgccgcgcgcccattcctcgccctcgtctcctgcgagttcccacgccccccggtgccgccaccccggagccagtcctcgccgcattgttcccctcctcctggtgatcccgcaccgcgctgtgtccgctccatcttcctccgccgccacgctcatcgccgggtaatccgtactggacaatgatgcatacaaactcatacaaaactgatggtgggcgcagaacatgggataacactacacctgtaaacaatgtggattctgccaatgttgtcctgcagggtggtgaagctccccgcacaactgcaaatactactagtgaggattgcatccaacaggtacaccaaagtccgggtagtcctcaggttgtttggcaagacaacattgaccctgacaatatgacatatgaggaactcttggatttgggtgaggcagttggaacccagagccgtggtctctctcaagaatgcatttcattgcttcccatcactaagtataagtgtggattcttttcaaggaagaaaacacgccgtgaaaggtgtgtgatttgccaaatggagtacaggagaggaaatttgcagattacgcttccatgcaagcatgtataccatgccagctgcgtgacaagatggcttagcataaacaaggtatgccctgtttgctttgctgaagttcctggcgaggattctctgaggcaatgattcatcagttgtgatgccactatgaagttgctgctctgggtactgcgcccccaatggacgcatgatttctgctttgaaggcagcttgttgtccccactttagaattgtgtattagcgccatattaccaaataggttattacttatcagatgtatttaggtagtgtttggtttcagaatatggtaggatggagtcactttgctcctaatttattgttgtttgaattgatttcatgtaggacatagtaactctaaaaatggaaaaactatgcttaaatactgaa

SEQ ID NO: 210901 - DNA, 1310 bp, Zea Mays
tatcaaccgcatcctctattccagttcttctccacctcgtcctcgtgccttctcgcccgcccccccaaaattcacccggccaccctctaccaccacgtcggcgcgggtagcaagcagttggtctcatcgtcctcgcacctgacaacgtcgcggttcgcgctctcgcctcgtgccgcgcgcccattcctcgccctcgtctcctgcgagttcccacgccccccggtgccgccaccccggagccagtcctcgccgcattgttcccctcctcctggtgatcccgcaccgcgctgtgtccgctccatcttcctccgccgccacgctcatcgccggttcatgtttcatcttaaggaatgaccagcagtcgacaaatggaactgcactacataaacactggatttccatacacaatcaccgagagtttcatggatttctttgagggtctcacttatgctcatgctgactttgctctcatggatggctttcaggatcagggtaatccgtactggacaatgatgcatacaaactcatacaaaactgatggtgggcgcagaacatgggataacactacacctgtaaacaatgtggattctgccaatgttgtcctgcagggtggtgaagctccccgcacaactgcaaatactactagtgaggattgcatccaacaggtacaccaaagtccgggtagtcctcaggttgtttggcaagacaacattgaccctgacaatatgacatatgaggaactcttggatttgggtgaggcagttggaacccagagccgtggtctctctcaagaatgcatttcattgcttcccatcactaagtataagtgtggattcttttcaaggaagaaaacacgccgtgaaaggtgtgtgatttgccaaatggagtacaggagaggaaatttgcagattacgcttccatgcaagcatgtataccatgccagctgcgtgacaagatggcttagcataaacaaggtatgccctgtttgctttgctgaagttcctggcgaggattctctgaggcaatgattcatcagttgtgatgccactatgaagttgctgctctgggtactgcgcccccaatggacgcatgatttctgctttgaaggcagcttgttgtccccactttagaattgtgtattagcgccatattaccaaataggttattacttatcagatgtatttaggtagtgtttggtttcagaatatggtaggatggagtcactttgctcctaatttattgttgtttgaattgatttcatgtaggacatagtaactctaaaaatggaaaaactatgcttaaatactgaa

SEQ ID NO: 210902 - DNA, 1135 bp, Zea Mays
tatcaaccgcatcctctattccagttcttctccacctcgtcctcgtgccttctcgcccgcccccccaaaattcacccggccaccctctaccaccacgtcggcgcgggtagcaagcagttggtctcatcgtcctcgcacctgacaacgtcgcggtgttcatgtttcatcttaaggaatgaccagcagtcgacaaatggaactgcactacataaacactggatttccatacacaatcaccgagagtttcatggatttctttgagggtctcacttatgctcatgctgactttgctctcatggatggctttcaggatcagggtaatccgtactggacaatgatgcatacaaactcatacaaaactgatggtgggcgcagaacatgggataacactacacctgtaaacaatgtggattctgccaatgttgtcctgcagggtggtgaagctccccgcacaactgcaaatactactagtgaggattgcatccaacaggtacaccaaagtccgggtagtcctcaggttgtttggcaagacaacattgaccctgacaatatgacatatgaggaactcttggatttgggtgaggcagttggaacccagagccgtggtctctctcaagaatgcatttcattgcttcccatcactaagtataagtgtggattcttttcaaggaagaaaacacgccgtgaaaggtgtgtgatttgccaaatggagtacaggagaggaaatttgcagattacgcttccatgcaagcatgtataccatgccagctgcgtgacaagatggcttagcataaacaaggtatgccctgtttgctttgctgaagttcctggcgaggattctctgaggcaatgattcatcagttgtgatgccactatgaagttgctgctctgggtactgcgcccccaatggacgcatgatttctgctttgaaggcagcttgttgtccccactttagaattgtgtattagcgccatattaccaaataggttattacttatcagatgtatttaggtagtgtttggtttcagaatatggtaggatggagtcactttgctcctaatttattgttgtttgaattgatttcatgtaggacatagtaactctaaaaatggaaaaactatgcttaaatactgaa

SEQ ID NO: 210903 - DNA, 2333 bp, Zea Mays
accccggctttgccttggtgaagaaaagtcgctgcgttcctcttgcctgatgaaatcctcttcccgtctagatctgagcctccgcgtggcttccggatcagatggttggtccgatcgaacaacggtgagtcttgctctgttacttgattgttcgaaacgcatggttttgttttgtgatgatgtgcaggttccgatctgtttcgtttgattgatgagttgacgacgcatcggctcgaagcgagacgaggctgcatggtttttgtgcctggaggtttctgatccgcgtggttaaggaaactgggtgctacaatttgttgctacaagtgcccgatccttcgaattgatatctgccgaccttcagagttgggacgttccgggggatctggatcttggcggactggacaaattgggaggcgtcgacgggcttctaaagcgtggctggacaattgtgagatgtgacatcttgaaggcctttgccatgttgggtgcgctcgcatggcaggcatcataataaagatgttggttttgtgtgctgggtgggagatcgcacggggaattgttttttcatccctgggttctcccgccctttgtgtccccgtgccctgcttcgtgttgtttggcttctcgttctacgcttcatcaccggtgctgctgcaaattgaacggatcttctcgtctcgaggcgtgctgcaaattgaacggggctacatcgcaacgcaacacaacacgcaagttagtttatatgatacatcgtcgtcaccgcatgagatctactgctgagccatatgaagacctgctgcctcatcatggtgtttgtatatgaagatcaactgcagtgcctacacgctggacggagtatttatatgatgtgaaggtcaactgttcggcatcgtcggtatgaaatggctatggccttcaaagcttccttggtcactggacagggaagaaattttctgctcaagctaaaaattagatacaagcttgttcaacttgcactatagttcatttgagtacttacctgttattgatctctattgagttgaagctaggtttcaagtatctcctaaggtttcgtataggtgaaaaccagtgattctctctttttttttagcactacaatctgtgacgtttcatgcccttagtttgagctttctccttagtgagtttattaatttttcttcttttccaaatcaaaagatgttttgactttccatattttgctatgcatttagttaaatctacactgtagataaacaaatgtttgtggataagtaaaaatgccttatttggtcgtcatggtaaatggctgcggtggacacatgagcagtctctggcagctgatgtgtcagtgatcttgctgtttcattgttggtatatattactgtcggattgttactattgaggagccattttttgcaaaaaaattttggaggcttcactacatccattatcaataactggattttgctctacgaaggtacatgtccattatcaataactcgatttttttaattgttcttcgatagtctttgcattgtgaataccaataattgctgccatttataactaatactgttaaccaaggcgcgtagaaaattgtttcaggtgatctaatcttacataattttgttataaacaaaatttgaaaaattattttagattttgatcagcgttgaaacgtacacacgccattaggcctgtctgtctcctaactgtggatcttgtctcaacacggtgaggtcctcacatgactgtccattacagtctttgacggaaggtggttcgattccacccagatcctttagtctgtattttgtgattcaacccatttaaataaatatacgaggtattattgagaaattgaatagaactggctcaattagctgctgtatataggggtgataatgggctttaaattttacactaaaatttaaggatcgaattaggataggatcctatttctattcattttggaactaaaattaatttagggctctaacaaattgtgaagaaacatttggaccattgttgtccctcacatttatatgataaaaagctaaaattatacacaaatgagaatttgaatcatggttgttggctctaaatatacattcaaattcacctagccaataatatacacgtctttgtgttttatattttatactcaagtataaaatagaatcgtgtgttttatattttatactcaagtataaaatagaatcgtagcgacacacgagcacgtactttgttagtactagtgttgataatgattgatagttgatgtggcggtcgataaaggacatgagcattggacttaaaacacaaaagtgtac

SEQ ID NO: 210904 - DNA, 3167 bp, Zea Mays
ctctgaccctctcccctcgtcccgaactggcgaacagtaagcgaaacataaacaaacaaccacggacccaatgaaatcgagggaaggttcacgacacgctgctccccaccactaaccgcactcgattgagcgccatgctgcagctccagccccctgggttcctgcccatcccgcgccggcgcgtcaccgcccgcgggcgtcgcgcccgccctgtcatcgccttcaactcccagtggaagatccccgacgtcgacacagatgcggtgcgggagcgagtgcggtcttggatgtctctggcgcggggcgcgatcgccgacgcggggcgcgcggcgcgggagggagggaggcacaaagaggagcccgagggtgggaagaagaagcagcggaaggaggtgaccgtggaggagcaggcgttcgttgcggtgccagaggtcaccgtggagccgcgggtgccccagggttggctctcgctggacgccgtcgtctccatcgagcagttcgccaggttgaatgggttgacggggagacaggtgcagaggatatttgaatcacttgctccagagcatctgcacaatgacgctcgaagcctggttgagtatagctgcttccgctacttggcaaaagataattctgacttccatccaaacttgaaggagcttgcctttcaaaagcttatctttgtgactatgcttgcttgggaagatccatataacgaagacagcagtccactttcttcgctagacaactattctgtattgggaaggcttgttggagaagatgcctttgcccgaattgctcctgctgttgcaggtgttgctgatgtttcaacagctcattatctctttagggctcttgttggtgcagaaaagggactttcatttgatctgtggacaacatatctagcggaacttttgaaggttcatcatggcaggcaaacacatcaaacgggagataattttttgtatgatgagaaagtcttatgcattggctctagtaaaaaaagacctgttctaaaatgggaggaaaataccgcatggccaggaaaccttaccttgacggacaaggcgctgtattttgaggccattggactgtcaggtaccaagaaaccaatgaggcttgaccttacaaatcagaattcaagggctgaaaagacgaaagttggaccatttggatccaaactatttgactctgctgtctcagtttcttctggttcaatgtcagatgaatggacattggagtttgttgatttcagtggggagatgagacgagatgtgtggctcgccttcatcagtgaaattatttcagtttatagattcattcgtgaatatggtccaggtggtgatgatccagcaatacataatgtgtatggtgcgtacaaagggaagaaaagagctgttagtagtgcagcgaacagtattgcaaggctccagtctctgcagttcatacggagattatatgaagatccagctaagctagtgcagttctcttacctgtccaacgcaccatttggtgatgttgttcttcagaccctagcagtgaacttttggggtgggcctctgactacaaaagccagatctgcaaatcatagatcaactcagtggcatagatcttcagaggacccatctagcggtcgcacacatgtttacgacatagatggcagcgtgtacttgcgcaagtggatgacgtcccccagctggacatctagccactcagccaatttttggagaaattcttctgtcaagtatggtataatattgagtaaatctttagttgtagctgataaaaaccttgtagaaaaggcaatggttgactgtaaagagaagagcaaagtagttgaaaggacacaagcgacaatagttgctgctacaatcgaaggagcttatgcttccttttgcaatagtggctgaaaatttcaagaaactgcaacgctgggaaaatccacgttcaacattttgttttctactattggttcatactgttattttcaggactgaaagaacaaggccggttaggtagatcttttggtaaagtgacgattagggatcaatcaccttcaaacacaattcagaagatcctagcccttaaagaggcaatggcctcagtggaaaattatctccagaatctgaatgtctccctgctgaagatccgcacgatccttctagctggccaacctgaggtgacaacacaggtcgcgtttgttctcctagcatcctcagccgtccttcttgtgtttcctttcaaatatgttcttgcattctttacatgtgatcttttcacaagggagctagaattccggagggaaacggtgagagccttcatgaacttcgtgaaggaacggtgggaatcaatacatgctgcccctgtggtcgtgttgccatatgaaggcgctgaaagcagccccaagacactcccggcagaagtttcggggcaagcagaaccccagaatgtccaacgtgggagcggttatgtctcctcaaagaatggcatcagcagttgatccgtgcagctttgagggcatcttgctgtaaacttgtgtacagttaaacttgtatagattactcgagagggcagattaggtatagatcgtaccaattggtggattttgcagagtaatgttccatttacgtcgtagtgaagataactagcgtagacgagaacttaggagagaattttgggtccaattcgctgtcttggatcgttggtctggcagttagggatgtcaagtaagaattttgggtccaattcacggtcttggatcgttggtctgacagttaggaatgtcaagttgacagatgcatgtattcataatccgtttggaacgctgcaggatcggggaatatatatcagcggatgtgcctagacagacaagtgatctgggacgtggtttcagttcaggctgcagagaaagctaatgagatatcctgcacctagaaacctgcttaagtgcgttgatggcatcctgtccgtgtacagcgaacggccgttgattcccaaaggacagcagcaaacacattcggggtctcgcatatgaccgctcagcatggcactaggaggactgattggcacggcacggtaagaacatggcacgacaaatgtgcctcttagccgtgtcatgccagtaccggccctaagcattacatatgtaaaccctaaaatataattttaag

SEQ ID NO: 210905 - DNA, 2676 bp, Zea Mays
gaactggcgaacagtaagcgaaacataaacaaacaaccacggacccaatgaaatcgagggaaggttcacgacacgctgctccccaccactaaccgcactcgattgagcgccatgctgcagctccagccccctgggttcctgcccatcccgcgccggcgcgtcaccgcccgcgggcgtcgcgcccgccctgtcatcgccttcaactcccagtggaagatccccgacgtcgacacagatgcggtgcgggagcgagtgcggtcttggatgtctctggcgcggggcgcgatcgccgacgcggggcgcgcggcgcgggagggagggaggcacaaagaggagcccgagggtgggaagaagaagcagcggaaggaggtgaccgtggaggagcaggcgttcgttgcggtgccagaggtcaccgtggagccgcgggtgccccagggttggctctcgctggacgccgtcgtctccatcgagcagttcgccaggttgaatgggttgacggggagacaggtgcagaggatatttgaatcacttgctccagagcatctgcacaatgacgctcgaagcctggttgagtatagctgcttccgctacttggcaaaagataattctgacttccatccaaacttgaaggagcttgcctttcaaaagcttatctttgtgactatgcttgcttgggaagatccatataacgaagacagcagtccactttcttcgctagacaactattctgtattgggaaggcttgttggagaagatgcctttgcccgaattgctcctgctgttgcaggtgttgctgatgtttcaacagctcattatctctttagggctcttgttggtgcagaaaagggactttcatttgatctgtggacaacatatctagcggaacttttgaaggttcatcatggcaggcaaacacatcaaacgggagataattttttgtatgatgagaaagtcttatgcattggctctagtaaaaaaagacctgttctaaaatgggaggaaaataccgcatggccaggaaaccttaccttgacggacaaggcgctgtattttgaggccattggactgtcaggtaccaagaaaccaatgaggcttgaccttacaaatcagaattcaagggctgaaaagacgaaagttggaccatttggatccaaactatttgactctgctgtctcagtttcttctggttcaatgtcagatgaatggacattggagtttgttgatttcagtggggagatgagacgagatgtgtggctcgccttcatcagtgaaattatttcagtttatagattcattcgtgaatatggtccaggtggtgatgatccagcaatacataatgtgtatggtgcgtacaaagggaagaaaagagctgttagtagtgcagcgaacagtattgcaaggctccagtctctgcagttcatacggagattatatgaagatccagctaagctagtgcagttctcttacctgtccaacgcaccatttggtgatgttgttcttcagaccctagcagtgaacttttggggtgggcctctgactacaaaagccagatctgcaaatcatagatcaactcagtggcatagatcttcagaggacccatctagcggtcgcacacatgtttacgacatagatggcagcgtgtacttgcgcaagtggatgacgtcccccagctggacatctagccactcagccaatttttggagaaattcttctgtcaagtatggtataatattgagtaaatctttagttgtagctgataaaaaccttgtagaaaaggcaatggttgactgtaaagagaagagcaaagtagttgaaaggacacaagcgacaatagttgctgctacaatcgaaggtattccaagtaacattgacctcttcaaggagcttatgcttccttttgcaatagtggctgaaaatttcaagaaactgcaacgctgggaaaatccacgttcaacattttgttttctactattggttcatactgttattttcaggaacatgctttcttatgtatttcctttcaccttgatgacgatggccctttccatgcttgctgtcaaaggactgaaagaacaaggccggttaggtagatcttttggtaaagtgacgattagggatcaatcaccttcaaacacaattcagaagatcctagcccttaaagaggcaatggcctcagtggaaaattatctccagaatctgaatgtctccctgctgaagatccgcacgatccttctagctggccaacctgaggtgacaacacaggtcgcgtttgttctcctagcatcctcagccgtccttcttgtgtttcctttcaaatatgttcttgcattctttacatgtgatcttttcacaagggagctagaattccggagggaaacggtgagagccttcatgaacttcgtgaaggaacggtgggaatcaatacatgctgcccctgtggtcgtgttgccatatgaaggcgctgaaagcagccccaagacactcccggcagaagtttcggggcaagcagaaccccagaatgtccaacgtgggagcggttatgtctcctcaaagaatggcatcagcagttgatccgtgcagctttgagggcatcttgctgtaaacttgtgtacagttaaacttgtatagattactcgagagggcagattagaagcgaggtgacgaagaatatgaagc

SEQ ID NO: 210906 - DNA, 3224 bp, Zea Mays
gcgaaacataaacaaacaaccacggacccaatgaaatcgagggaaggttcacgacacgctgctccccaccactaaccgcactcgattgagcgccatgctgcagctccagccccctgggttcctgcccatcccgcgccggcgcgtcaccgcccgcgggcgtcgcgcccgccctgtcatcgccttcaactcccagtggaagatccccgacgtcgacacagatgcggtgcgggagcgagtgcggtcttggatgtctctggcgcggggcgcgatcgccgacgcggggcgcgcggcgcgggagggagggaggcacaaagaggagcccgagggtgggaagaagaagcagcggaaggaggtgaccgtggaggagcaggcgttcgttgcggtgccagaggtcaccgtggagccgcgggtgccccagggttggctctcgctggacgccgtcgtctccatcgagcagttcgccaggttgaatgggttgacggggagacaggtgcagaggatatttgaatcacttgctccagagcatctgcacaatgacgctcgaagcctggttgagtatagctgcttccgctacttggcaaaagataattctgacttccatccaaacttgaaggagcttgcctttcaaaagcttatctttgtgactatgcttgcttgggaagatccatataacgaagacagcagtccactttcttcgctagacaactattctgtattgggaaggcttgttggagaagatgcctttgcccgaattgctcctgctgttgcaggtgttgctgatgtttcaacagctcattatctctttagggctcttgttggtgcagaaaagggactttcatttgatctgtggacaacatatctagcggaacttttgaaggttcatcatggcaggcaaacacatcaaacgggagataattttttgtatgatgagaaagtcttatgcattggctctagtaaaaaaagacctgttctaaaatgggaggaaaataccgcatggccaggaaaccttaccttgacggacaaggcgctgtattttgaggccattggactgtcaggtaccaagaaaccaatgaggcttgaccttacaaatcagaattcaagggctgaaaagacgaaagttggaccatttggatccaaactatttgactctgctgtctcagtttcttctggttcaatgtcagatgaatggacattggagtttgttgatttcagtggggagatgagacgagatgtgtggctcgccttcatcagtgaaattatttcagtttatagattcattcgtgaatatggtccaggtggtgatgatccagcaatacataatgtgtatggtgcgtacaaagggaagaaaagagctgttagtagtgcagcgaacagtattgcaaggctccagtctctgcagttcatacggagattatatgaagatccagctaagctagtgcagttctcttacctgtccaacgcaccatttggtgatgttgttcttcagaccctagcagtgaacttttggggtgggcctctgactacaaaagccagatctgcaaatcatagatcaactcagtggcatagatcttcagaggacccatctagcggtcgcacacatgtttacgacatagatggcagcgtgtacttgcgcaagtggatgacgtcccccagctggacatctagccactcagccaatttttggagaaattcttctgtcaagtatggtataatattgagtaaatctttagttgtagctgataaaaaccttgtagaaaaggcaatggttgactgtaaagagaagagcaaagtagttgaaaggacacaagcgacaatagttgctgctacaatcgaaggtattccaagtaacattgacctcttcaaggagcttatgcttccttttgcaatagtggctgaaaatttcaagaaactgcaacgctgggaaaatccacgttcaacattttgttttctactattggttcatactgttattttcaggaacatgctttcttatgtatttcctttcaccttgatgacgatggccctttccatgcttgctgtcaaaggactgaaagaacaaggccggttaggtagatcttttggtaaagtgacgattagggatcaatcaccttcaaacacaattcagaagatcctagcccttaaagaggcaatggcctcagtggaaaattatctccagaatctgaatgtctccctgctgaagatccgcacgatccttctagctggccaacctgaggtgacaacacaggtcgcgtttgttctcctagcatcctcagccgtccttcttgtgtttcctttcaaatatgttcttgcattctttacatgtgatcttttcacaagggagctagaattccggagggaaacggtgagagccttcatgaacttcgtgaaggaacggtgggaatcaatacatgctgcccctgtggtcgtgttgccatatgaaggcgctgaaagcagccccaagacactcccggcagaagtttcggggcaagcagaaccccagaatgtccaacgtgggagcggttatgtctcctcaaagaatggcatcagcagttgatccgtgcagctttgagggcatcttgctgtaaacttgtgtacagttaaacttgtatagattactcgagagggcagattaggtatagatcgtaccaattggtggattttgcagagtaatgttccatttacgtcgtagtgaagataactagcgtagacgagaacttaggagagaattttgggtccaattcgctgtcttggatcgttggtctggcagttagggatgtcaagtaagaattttgggtccaattcacggtcttggatcgttggtctgacagttaggaatgtcaagttgacagatgcatgtattcataatccgtttggaacgctgcaggatcggggaatatatatcagcggatgtgcctagacagacaagtgatctgggacgtggtttcagttcaggctgcagagaaagctaatgagatatcctgcacctagaaacctgcttaagtgcgttgatggcatcctgtccgtgtacagcgaacggccgttgattcccaaaggacagcagcaaacacattcggggtctcgcatatgaccgctcagcatggcactaggaggactgattggcacggcacggtaagaacatggcacgacaaatgtgcctcttagccgtgtcatgccagtaccggccctaagcattacatatgtaaaccctaaaatataattttaag

SEQ ID NO: 210907 - DNA, 3118 bp, Zea Mays
cgaaacataaacaaacaaccacggacccaatgaaatcgagggaaggttcacgacacgctgctccccaccactaaccgcactcgattgagcgccatgctgcagctccagccccctgggttcctgcccatcccgcgccggcgcgtcaccgcccgcgggcgtcgcgcccgccctgtcatcgccttcaactcccagtggaagatccccgacgtcgacacagatgcggtgcgggagcgagtgcggtcttggatgtctctggcgcggggcgcgatcgccgacgcggggcgcgcggcgcgggagggagggaggcacaaagaggagcccgagggtgggaagaagaagcagcggaaggaggtgaccgtggaggagcaggcgttcgttgcggtgccagaggtcaccgtggagccgcgggtgccccagggttggctctcgctggacgccgtcgtctccatcgagcagttcgccaggttgaatgggttgacggggagacaggtgcagaggatatttgaatcacttgctccagagcatctgcacaatgacgctcgaagcctggttgagtatagctgcttccgctacttggcaaaagataattctgacttccatccaaacttgaagggaaggcttgttggagaagatgcctttgcccgaattgctcctgctgttgcaggtgttgctgatgtttcaacagctcattatctctttagggctcttgttggtgcagaaaagggactttcatttgatctgtggacaacatatctagcggaacttttgaaggttcatcatggcaggcaaacacatcaaacgggagataattttttgtatgatgagaaagtcttatgcattggctctagtaaaaaaagacctgttctaaaatgggaggaaaataccgcatggccaggaaaccttaccttgacggacaaggcgctgtattttgaggccattggactgtcaggtaccaagaaaccaatgaggcttgaccttacaaatcagaattcaagggctgaaaagacgaaagttggaccatttggatccaaactatttgactctgctgtctcagtttcttctggttcaatgtcagatgaatggacattggagtttgttgatttcagtggggagatgagacgagatgtgtggctcgccttcatcagtgaaattatttcagtttatagattcattcgtgaatatggtccaggtggtgatgatccagcaatacataatgtgtatggtgcgtacaaagggaagaaaagagctgttagtagtgcagcgaacagtattgcaaggctccagtctctgcagttcatacggagattatatgaagatccagctaagctagtgcagttctcttacctgtccaacgcaccatttggtgatgttgttcttcagaccctagcagtgaacttttggggtgggcctctgactacaaaagccagatctgcaaatcatagatcaactcagtggcatagatcttcagaggacccatctagcggtcgcacacatgtttacgacatagatggcagcgtgtacttgcgcaagtggatgacgtcccccagctggacatctagccactcagccaatttttggagaaattcttctgtcaagtatggtataatattgagtaaatctttagttgtagctgataaaaaccttgtagaaaaggcaatggttgactgtaaagagaagagcaaagtagttgaaaggacacaagcgacaatagttgctgctacaatcgaaggtattccaagtaacattgacctcttcaaggagcttatgcttccttttgcaatagtggctgaaaatttcaagaaactgcaacgctgggaaaatccacgttcaacattttgttttctactattggttcatactgttattttcaggaacatgctttcttatgtatttcctttcaccttgatgacgatggccctttccatgcttgctgtcaaaggactgaaagaacaaggccggttaggtagatcttttggtaaagtgacgattagggatcaatcaccttcaaacacaattcagaagatcctagcccttaaagaggcaatggcctcagtggaaaattatctccagaatctgaatgtctccctgctgaagatccgcacgatccttctagctggccaacctgaggtgacaacacaggtcgcgtttgttctcctagcatcctcagccgtccttcttgtgtttcctttcaaatatgttcttgcattctttacatgtgatcttttcacaagggagctagaattccggagggaaacggtgagagccttcatgaacttcgtgaaggaacggtgggaatcaatacatgctgcccctgtggtcgtgttgccatatgaaggcgctgaaagcagccccaagacactcccggcagaagtttcggggcaagcagaaccccagaatgtccaacgtgggagcggttatgtctcctcaaagaatggcatcagcagttgatccgtgcagctttgagggcatcttgctgtaaacttgtgtacagttaaacttgtatagattactcgagagggcagattaggtatagatcgtaccaattggtggattttgcagagtaatgttccatttacgtcgtagtgaagataactagcgtagacgagaacttaggagagaattttgggtccaattcgctgtcttggatcgttggtctggcagttagggatgtcaagtaagaattttgggtccaattcacggtcttggatcgttggtctgacagttaggaatgtcaagttgacagatgcatgtattcataatccgtttggaacgctgcaggatcggggaatatatatcagcggatgtgcctagacagacaagtgatctgggacgtggtttcagttcaggctgcagagaaagctaatgagatatcctgcacctagaaacctgcttaagtgcgttgatggcatcctgtccgtgtacagcgaacggccgttgattcccaaaggacagcagcaaacacattcggggtctcgcatatgaccgctcagcatggcactaggaggactgattggcacggcacggtaagaacatggcacgacaaatgtgcctcttagccgtgtcatgccagtaccggccctaagcattacatatgtaaaccctaaaatataattttaag

SEQ ID NO: 210908 - DNA, 2948 bp, Zea Mays
aaacaaccacggacccaatgaaatcgagggaaggttcacgacacgctgctccccaccactaaccgcactcgattgagcgccatgctgcagctccagccccctgggttcctgcccatcccgcgccggcgcgtcaccgcccgcgggcgtcgcgcccgccctgtcatcgccttcaactcccagtggaagatccccgacgtcgacacaggttgaatgggttgacggggagacaggtgcagaggatatttgaatcacttgctccagagcatctgcacaatgacgctcgaagcctggttgagtatagctgcttccgctacttggcaaaagataattctgacttccatccaaacttgaaggagcttgcctttcaaaagcttatctttgtgactatgcttgcttgggaagatccatataacgaagacagcagtccactttcttcgctagacaactattctgtattgggaaggcttgttggagaagatgcctttgcccgaattgctcctgctgttgcaggtgttgctgatgtttcaacagctcattatctctttagggctcttgttggtgcagaaaagggactttcatttgatctgtggacaacatatctagcggaacttttgaaggttcatcatggcaggcaaacacatcaaacgggagataattttttgtatgatgagaaagtcttatgcattggctctagtaaaaaaagacctgttctaaaatgggaggaaaataccgcatggccaggaaaccttaccttgacggacaaggcgctgtattttgaggtaccaagaaaccaatgaggcttgaccttacaaatcagaattcaagggctgaaaagacgaaagttggaccatttggatccaaactatttgactctgctgtctcagtttcttctggttcaatgtcagatgaatggacattggagtttgttgatttcagtggggagatgagacgagatgtgtggctcgccttcatcagtgaaattatttcagtttatagattcattcgtgaatatggtccaggtggtgatgatccagcaatacataatgtgtatggtgcgtacaaagggaagaaaagagctgttagtagtgcagcgaacagtattgcaaggctccagtctctgcagttcatacggagattatatgaagatccagctaagctagtgcagttctcttacctgtccaacgcaccatttggtgatgttgttcttcagaccctagcagtgaacttttggggtgggcctctgactacaaaagccagatctgcaaatcatagatcaactcagtggcatagatcttcagaggacccatctagcggtcgcacacatgtttacgacatagatggcagcgtgtacttgcgcaagtggatgacgtcccccagctggacatctagccactcagccaatttttggagaaattcttctgtcaagtatggtataatattgagtaaatctttagttgtagctgataaaaaccttgtagaaaaggcaatggttgactgtaaagagaagagcaaagtagttgaaaggacacaagcgacaatagttgctgctacaatcgaaggtattccaagtaacattgacctcttcaaggagcttatgcttccttttgcaatagtggctgaaaatttcaagaaactgcaacgctgggaaaatccacgttcaacattttgttttctactattggttcatactgttattttcaggaacatgctttcttatgtatttcctttcaccttgatgacgatggccctttccatgcttgctgtcaaaggactgaaagaacaaggccggttaggtagatcttttggtaaagtgacgattagggatcaatcaccttcaaacacaattcagaagatcctagcccttaaagaggcaatggcctcagtggaaaattatctccagaatctgaatgtctccctgctgaagatccgcacgatccttctagctggccaacctgaggtgacaacacaggtcgcgtttgttctcctagcatcctcagccgtccttcttgtgtttcctttcaaatatgttcttgcattctttacatgtgatcttttcacaagggagctagaattccggagggaaacggtgagagccttcatgaacttcgtgaaggaacggtgggaatcaatacatgctgcccctgtggtcgtgttgccatatgaaggcgctgaaagcagccccaagacactcccggcagaagtttcggggcaagcagaaccccagaatgtccaacgtgggagcggttatgtctcctcaaagaatggcatcagcagttgatccgtgcagctttgagggcatcttgctgtaaacttgtgtacagttaaacttgtatagattactcgagagggcagattaggtatagatcgtaccaattggtggattttgcagagtaatgttccatttacgtcgtagtgaagataactagcgtagacgagaacttaggagagaattttgggtccaattcgctgtcttggatcgttggtctggcagttagggatgtcaagtaagaattttgggtccaattcacggtcttggatcgttggtctgacagttaggaatgtcaagttgacagatgcatgtattcataatccgtttggaacgctgcaggatcggggaatatatatcagcggatgtgcctagacagacaagtgatctgggacgtggtttcagttcaggctgcagagaaagctaatgagatatcctgcacctagaaacctgcttaagtgcgttgatggcatcctgtccgtgtacagcgaacggccgttgattcccaaaggacagcagcaaacacattcggggtctcgcatatgaccgctcagcatggcactaggaggactgattggcacggcacggtaagaacatggcacgacaaatgtgcctcttagccgtgtcatgccagtaccggccctaagcattacatatgtaaaccctaaaatataattttaag

SEQ ID NO: 210909 - DNA, 3175 bp, Zea Mays
cacggacccaatgaaatcgagggaaggttcacgacacgctgctccccaccactaaccgcactcgattgagcgccatgctgcagctccagccccctgggttcctgcccatcccgcgccggcgcgtcaccgcccgcgggcgtcgcgcccgccctgtcatcgccttcaactcccagtggaagatccccgacgtcgacacagatgcggtgcgggagcgagtgcggtcttggatgtctctggcgcggggcgcgatcgccgacgcggggcgcgcggcgcgggagggagggaggcacaaagaggagcccgagggtgggaagaagaagcagcggaaggaggtgaccgtggaggagcaggcgttcgttgcggtgccagaggtcaccgtggagccgcgggtgccccagggttggctctcgctggacgccgtcgtctccatcgagcagttcgccaggttgaatgggttgacggggagacaggtgcagaggatatttgaatcacttgctccagagcatctgcacaatgacgctcgaagcctggttgagtatagctgcttccgctacttggcaaaagataattctgacttccatccaaacttgaaggagcttgcctttcaaaagcttatctttgtgactatgcttgcttgggaagatccatataacgaagacagcagtccactttcttcgctagacaactattctgtattgggaaggcttgttggagaagatgcctttgcccgaattgctcctgctgttgcaggtgttgctgatgtttcaacagctcattatctctttagggctcttgttggtgcagaaaagggactttcatttgatctgtggacaacatatctagcggaacttttgaaggttcatcatggcaggcaaacacatcaaacgggagataattttttgtatgatgagaaagtcttatgcattggctctagtaaaaaaagacctgttctaaaatgggaggaaaataccgcatggccaggaaaccttaccttgacggacaaggcgctgtattttgaggccattggactgtcaggtaccaagaaaccaatgaggcttgaccttacaaatcagaattcaagggctgaaaagacgaaagttggaccatttggatccaaactatttgactctgctgtctcagtttcttctggttcaatgtcagatgaatggacattggagtttgttgatttcagtggggagatgagacgagatgtgtggctcgccttcatcagtgaaattatttcagtttatagattcattcgtgaatatggtccaggtggtgatgatccagcaatacataatgtgtatggtgcgtacaaagggaagaaaagagctgttagtagtgcagcgaacagtattgcaaggctccagtctctgcagttcatacggagattatatgaagatccagctaagctagtgcagttctcttacctgtccaacgcaccatttggtgatgttgttcttcagaccctagcagtgaacttttggggtgggcctctgactacaaaagccagatctgcaaatcatagatcaactcagtggcatagatcttcagaggacccatctagcggtcgcacacatgtttacgacatagatggcagcgtgtacttgcgcaagtggatgacgtcccccagctggacatctagccactcagccaatttttggagaaattcttctgtcaagtatggtataatattgagtaaatctttagttgtagctgataaaaaccttgtagaaaaggcaatggttgactgtaaagagaagagcaaagtagttgaaaggacacaagcgacaatagttgctgctacaatcgaaggagcttatgcttccttttgcaatagtggctgaaaatttcaagaaactgcaacgctgggaaaatccacgttcaacattttgttttctactattggttcatactgttattttcaggaacatgctttcttatgtatttcctttcaccttgatgacgatggccctttccatgcttgctgtcaaaggactgaaagaacaaggccggttaggtagatcttttggtaaagtgacgattagggatcaatcaccttcaaacacaattcagaagatcctagcccttaaagaggcaatggcctcagtggaaaattatctccagaatctgaatgtctccctgctgaagatccgcacgatccttctagctggccaacctgaggtgacaacacaggtcgcgtttgttctcctagcatcctcagccgtccttcttgtgtttcctttcaaatatgttcttgcattctttacatgtgatcttttcacaagggagctagaattccggagggaaacggtgagagccttcatgaacttcgtgaaggaacggtgggaatcaatacatgctgcccctgtggtcgtgttgccatatgaaggcgctgaaagcagccccaagacactcccggcagaagtttcggggcaagcagaaccccagaatgtccaacgtgggagcggttatgtctcctcaaagaatggcatcagcagttgatccgtgcagctttgagggcatcttgctgtaaacttgtgtacagttaaacttgtatagattactcgagagggcagattaggtatagatcgtaccaattggtggattttgcagagtaatgttccatttacgtcgtagtgaagataactagcgtagacgagaacttaggagagaattttgggtccaattcgctgtcttggatcgttggtctggcagttagggatgtcaagtaagaattttgggtccaattcacggtcttggatcgttggtctgacagttaggaatgtcaagttgacagatgcatgtattcataatccgtttggaacgctgcaggatcggggaatatatatcagcggatgtgcctagacagacaagtgatctgggacgtggtttcagttcaggctgcagagaaagctaatgagatatcctgcacctagaaacctgcttaagtgcgttgatggcatcctgtccgtgtacagcgaacggccgttgattcccaaaggacagcagcaaacacattcggggtctcgcatatgaccgctcagcatggcactaggaggactgattggcacggcacggtaagaacatggcacgacaaatgtgcctcttagccgtgtcatgccagtaccggccctaagcattacatatgtaaaccctaaaatataattttaag

SEQ ID NO: 210910 - DNA, 2931 bp, Zea Mays
atgaaatcgagggaaggttcacgacacgctgctccccaccactaaccgcactcgattgagcgccatgctgcagctccagccccctgggttcctgcccatcccgcgccggcgcgtcaccgcccgcgggcgtcgcgcccgccctgtcatcgccttcaactcccagtggaagatccccgacgtcgacacagatgcggtgcgggagcgagtgcggtcttggatgtctctggcgcggggcgcgatcgccgacgcggggcgcgcggcgcgggagggagggaggcacaaagaggagcccgagggtgggaagaagaagcagcggaaggaggtgaccgtggaggagcaggcgttcgttgcggtgccagaggtcaccgtggagccgcgggtgccccagggttggctctcgctggacgccgtcgtctccatcgagcagttcgccaggttgaatgggttgacggggagacaggtgcagaggatatttgaatcacttgctccagagcatctgcacaatgacgctcgaagcctggttgagtatagctgcttccgctacttggcaaaagataattctgacttccatccaaacttgaagggttcatcatggcaggcaaacacatcaaacgggagataattttttgtatgatgagaaagtcttatgcattggctctagtaaaaaaagacctgttctaaaatgggaggaaaataccgcatggccaggaaaccttaccttgacggacaaggcgctgtattttgaggccattggactgtcaggtaccaagaaaccaatgaggcttgaccttacaaatcagaattcaagggctgaaaagacgaaagttggaccatttggatccaaactatttgactctgctgtctcagtttcttctggttcaatgtcagatgaatggacattggagtttgttgatttcagtggggagatgagacgagatgtgtggctcgccttcatcagtgaaattatttcagtttatagattcattcgtgaatatggtccaggtggtgatgatccagcaatacataatgtgtatggtgcgtacaaagggaagaaaagagctgttagtagtgcagcgaacagtattgcaaggctccagtctctgcagttcatacggagattatatgaagatccagctaagctagtgcagttctcttacctgtccaacgcaccatttggtgatgttgttcttcagaccctagcagtgaacttttggggtgggcctctgactacaaaagccagatctgcaaatcatagatcaactcagtggcatagatcttcagaggacccatctagcggtcgcacacatgtttacgacatagatggcagcgtgtacttgcgcaagtggatgacgtcccccagctggacatctagccactcagccaatttttggagaaattcttctgtcaagtatggtataatattgagtaaatctttagttgtagctgataaaaaccttgtagaaaaggcaatggttgactgtaaagagaagagcaaagtagttgaaaggacacaagcgacaatagttgctgctacaatcgaaggtattccaagtaacattgacctcttcaaggagcttatgcttccttttgcaatagtggctgaaaatttcaagaaactgcaacgctgggaaaatccacgttcaacattttgttttctactattggttcatactgttattttcaggaacatgctttcttatgtatttcctttcaccttgatgacgatggccctttccatgcttgctgtcaaaggactgaaagaacaaggccggttaggtagatcttttggtaaagtgacgattagggatcaatcaccttcaaacacaattcagaagatcctagcccttaaagaggcaatggcctcagtggaaaattatctccagaatctgaatgtctccctgctgaagatccgcacgatccttctagctggccaacctgaggtgacaacacaggtcgcgtttgttctcctagcatcctcagccgtccttcttgtgtttcctttcaaatatgttcttgcattctttacatgtgatcttttcacaagggagctagaattccggagggaaacggtgagagccttcatgaacttcgtgaaggaacggtgggaatcaatacatgctgcccctgtggtcgtgttgccatatgaaggcgctgaaagcagccccaagacactcccggcagaagtttcggggcaagcagaaccccagaatgtccaacgtgggagcggttatgtctcctcaaagaatggcatcagcagttgatccgtgcagctttgagggcatcttgctgtaaacttgtgtacagttaaacttgtatagattactcgagagggcagattaggtatagatcgtaccaattggtggattttgcagagtaatgttccatttacgtcgtagtgaagataactagcgtagacgagaacttaggagagaattttgggtccaattcgctgtcttggatcgttggtctggcagttagggatgtcaagtaagaattttgggtccaattcacggtcttggatcgttggtctgacagttaggaatgtcaagttgacagatgcatgtattcataatccgtttggaacgctgcaggatcggggaatatatatcagcggatgtgcctagacagacaagtgatctgggacgtggtttcagttcaggctgcagagaaagctaatgagatatcctgcacctagaaacctgcttaagtgcgttgatggcatcctgtccgtgtacagcgaacggccgttgattcccaaaggacagcagcaaacacattcggggtctcgcatatgaccgctcagcatggcactaggaggactgattggcacggcacggtaagaacatggcacgacaaatgtgcctcttagccgtgtcatgccagtaccggccctaagcattacatatgtaaaccctaaaatataattttaag

SEQ ID NO: 210911 - DNA, 2416 bp, Zea Mays
attttacctaaaagactgaacagaacttgattgcgggactaacgagtaataagagttgttccaacttgcagaagtccaatttattatgggttctttatagtgctttgtgctcatgtactttaagctaacagaatggtttgacatttgtaaaacctctggtcatgtattccacacggctattgatttgctatttattgataagttcttagctccacgggcatcagaaataatggaagatgtgaactaattattccttccaactagtagggaattttcactgtgatgatagaatttgatggatatattacattcaagaagttataattatgagggcttaaaactaagtcccttaaatgattggcaatttctattcaatattgatacttgtacatgaaagctatgtcctgccataaattcttgctacgccacatgtaagttataattgctaaatgaaaaattattcatatttgttctagaacaataaaacttctgccagcatcaaaatcttttatgctggctggtaatatttgtgtaatgtgaagatttgtaacatttatgagctaaaactctattattggtacttattttagtttttattgtcaattgtttcttttactgagtgtgcatgttttgggattgtaagggtagtagtatttgtgacattgtctgtaaatttccataatttaatcttttaaatgatttctgtgtgcaatttaatctgcccccttcccttgtccactgactctatgaaagttcgctaatgccccaaggtgttttctgcttggtccatagattaattaatgatctatttgctctgcaattttagtctggagggaagcggaaaatgctgttaatcaggaactagttgctttggagaaagagctctcaacacaccgaagaactggctctattgattcgtttggactttacttgtatggcattgtcctacatgataaaggatgtgaaggtctaactcgaaagatcttggtagaacctgtcaatagctatccttggaactggagtgcttggtcagagctacaaactttatgcaccagcagtgacattttaaacaaattaaatctgaagaatcgctggatgaaagacttctttcttgctagtgcatatctggaactagagacgcatgaagaagacttctttcttgctagtgcagattctttctttggcttgtcttgcacaatagatgctggaccgcagaccgtcttgctaaaagaggactttcccatcccagtgcgtgtcccctttgtgaccaagaagaggaaacaatacaacatcttttcatctcttgcgtctttgcaagacagttctggtacttcttgttgagcaggtctgggttgcctaatctttcaccggacaacgctttttgcagcctagatgactggtggagcagggctgtggagaagattccccgtgatctccaatcaggagaaggagactgctaaaaatatattgcaagggataaaaatgttacagtcaggatttccatcaatggatattgaccattttgcactgtaaagtccacccgcagataagttggaacattggacagtaagtgtcaagaagtcaatagccaaaaagccaacagccggaagtcaaaagctagcttcgagccaaaatcccaaaactgcagtacaaacaaacaggccctgaagggaatgattctaacgagggctgcccaactgatggaagctcaattgcacatctcgatcgggaattacttccaatcttcggtcacaggctcacagcgtgatgcttattgtttgtatcctcgtcacgagactccatgctgctggatacgatgacctaccgcgcatgatgctggctcgtagttcctggagcttggcaacaaggagaaccaggcgcctacatggcgcgaagatgagcgtcattggaatgagccagacccctaatgcaagtatcaacatagctgtcttctgtgagtagagctctaaatatctgcgggtttggcttccttcaccggacagctatctggatagtgttctccccatggttgcttgcatatataagcttcattggaagaccttgccttgccttgcgtgcaatgtgcatgtcaaattattggttatctgtttatcagcacacttgtccaatgccttacctttgacatttcgtaaaactaagcactgcagattttaaaataaaaggctagagtgtagggcaacggtgtggtagtactttgcacagtgtgcatgatgtgctactggaataaaacaagtctgtttagtgatgatgcgcgatgcaagttgtcattttagcctacgtcaggatcgcgtgctgctggtttctcaccctattaggtttggtttatgtactctagtgtttaccccaattttttttgcatgtattgagctagattagagtgtttaccataattttt

SEQ ID NO: 210912 - DNA, 1902 bp, Zea Mays
cccggaagagagagagagaggatcatcaaaagggcaggccacaaaatatcctcaaagcctcccagaaaaattcctcccaccgcgcccgcgacagcgacgacgacggcgacgagcacggggcccctccaccgcctccgcctccgcctcgccgcgtgcggccaccgcgccgccccgacgtcgtcccctccgccctccccctcggccctcgacgcgccgccgcccgccctccgccgccgccgccgccgcggcgggctcggcctcctctggaagctcccctccgcccgcgcgccgccccgcccggctccgatggacgcgcgcgcgcccccgcctccgcagccccatccgccgcgcgccccgtcgccgcagcccccgcccgcgccgtccaggaggtacggcctgcacttctcggcgtccagcttcatccaggcgccgctcaccgcgctgctcgagtactccggcatcctccggcccgatcccggtggtggaatccaacagccagggaccggggccaggccgggcgaggtgtcgatccggattgtggcgcccggcgaggcgggcacgtcgtctgagagggccgaggaggtgatcgtcgaggaagaggaagaggatggacaggcaacgaggacgcgccccgaggacccatcacctgccgctggcggcggggagggcggcagggaatcctcgtcgtcgtaccagcggtacgacatacagcaggtggccaggtttctttgtgacaatttggattgctgcggtgatgttcaagtccaacgatatcctgtgtaagcagactgctctgaagagggagagaaaaattccagttcttgtcgggattacaatattatttgttgttcatgtatctggattttactggtgttacaagaacggggatcttataagacctctcatgatgcttcctccaaaagaaataccaccattttggcacgcaatattcatcatcttggtgaacgatacaatggtgcgccaaactgctatggttgtcaaatgtttactgctgatgtactataagaacagcagagggcgtagctatcgtaggcagggtcaaatgttgacgattgtggaatattttctacttttgtatcgtgcattattgcctacacctgtgtggtaccgttttttcctgaacaaggagtatggaagcctattttcgtctctaaccactggcttgtatctcactttcaagttgacatctgttgtggaaaaggttcagtcttttttgacggcattgagagcattatctcataaagacttccattatggttcatatgcaacaagtgagcaggtagttgctgctggagacttgtgtgcgatatgccaagaaaagatgcatgttcccatccttttgcgctgcaaacatatcttctgtgaagattgtgtatccgaatggttcgagagggagcgaacgtgcccgctgtgcagggcattggtgaagccagcagacctccgctcgttcagcgacggttcaacaagcctcttcttccagctattctagtccgagacagccaaaagagcggcaagccggagcgctccacccgatgatgcagatgttagctgtgtgtgtgcgtgtgttgctgcttgcaacgcctgcgagcagtgcggccctgatgcggtgctgggagagtgtacaccaagctgaagctgaaggcgtacatgattgtgtattgtgactgcacatattttcatcatcccctgtataggctctcgcgttgatgcttgagcacctgaggattttacctgaccatatacggcacaaattattacataaatagaaatggtgagtatatacaacgataaatcaatatggtccttgtttatgctgtgctctgtgttgggatttagaactagtcgataaatccttgtgatccttgcttatgccgtgcgccc

SEQ ID NO: 210913 - DNA, 2279 bp, Zea Mays
ctcgaacatagaaaacgaaacgaaacctgacacccacataaaaaaaggtgagaactagaaggaaccgctgtgtcacacacacacacaccacacggcggccggagcggcggagccaccataaattggtgctctctccgtccgaagtgctctctgaaattccccccaaatatcccagccactgccgtcgtgcagtcaaagtgtcaaaccatgccggcagtagcgttcgcgtcggctcctgccatattcgcctccgcctccgcgcgtccctgccgcagcgcggctccgggcatcctttcctccgactccgggcggccccgccgcggcgcgcgtggcgccgtccagtgtgaggtcgcctcctcctcggcaccgtcggcggctggaccccaggccgcccggtgggcccagaggaccgtggtcatcccgccacagcgccgcgggtgccacctcatcaccaacaagatcgtaaatgagatagggaatgacctggccgacttcaagtgtggcatggcgcatctgttctgtatgtatttattcataatgcatgcgtttcctgcactttgtggtgcatgattgcttttgtatcaatttctctcagttatggaagttacatcattatttggtgtcgatggtattactgttggccagaatcgttttaacacggagacgtttgcccataagataagcagcctacaagatggtcctagtatctggaattggtcgcattcccggttctttttatgccaaagctagtatggaaaattggaaactaaacccataagaagattttaagttgtgatcattgaatgatgaatggatcgtttaatatgcttgggagagaattcaagtggaactcattacaacaaccattgaaattctaagagctggttactttttttttttgtttagtttcatggagatgcaagttctgagtggtttgtagcagtggtctcttacatctatactatcagtgctggcaaattctgtgtctacttgtttttgttgtagcgatgacagtattttttattctagagtccatcttttggcatttatgcaaaaaaggtagaaaggtaaagaatttgcagttacttggctttgttgcgcattcaggtgtaggaagaaaaatatgaagcaatattcatgtacactggcctttgctgctaagaagttttgagtataatgaaaatatattcaattcatgtattttcatggttattctaattagaagagaaaagatctgaaaactcaaggcggcttatgtacccatttttttatgaagggaaattttattaaaaatttcaagcacattacatcgaggggatacaagcccttgaaatttcttctagcctctgtttaagaagcacacagtttaaaacaaataaagttgataaccacacactctaattgtaatcaatccattaaacctcatattatattagattggatttttatgtagacttttgtatatgaagtaagtatatttgagacgcagttctcaatatttttagcactagtaaaatggccatgctctacagtgcagcacacaagtgcgtcgttgactattaatgagaactacgactctgatgtccaggttgacactgaaacatttcttagtcgcattgttccagagggtccatctgctccatggaggcacaccatagaaggacctgatgacatgccagcacatatcaaatcatcaatgtttggttgttccctgatgattcctatcaccaatggacgtctcaacatgggaacttggcagggtatttggctctgtgaacatcgagattatgctactcctcgacagattgtgatcacgctgaatgggatctagcctaaggtgatctatgttaagagctggaaatgcaatgcagcgacttcgacatgtttaaatcagatgcactgaaactgaaactgtctttggcccagttgtgataggcgttccagtggagaatgttatttgtaatatgatgctagcatgaggggaacaaaatctcttaacgagcttcttctcatgttgagcttgtttagttatctttggtggtttaaagaaatggtttataagttgttagtgtcgtttggttcacgaaatgtaacgtaaatggtaatgataatgattcacactcaaataccgacggtaacaagtttgaataagttgatatctatttctagtgtggtatcaattacagttagacttaaataaacgtgatttaacgttatcgataacctattatgttactaatattatgctactaatatgtgaatcaaacgacaccttagtt

SEQ ID NO: 210914 - DNA, 2009 bp, Zea Mays
gatgcctctgccaacaaacaaagaacagacctatcgctacacagtccgccgtggctctctgcaattatggctgcctccacagcgtcgtcgtcatactctgccggtctaagcgccgcctgctgtgtgtctccgcgccatggcagcagcttcgtcaagccgcagcgctctggacggccggcggcggcggcgacggcgaccctgcccgcgtcaggcggcgaccagccgaacctatcgttagactactgctgtaggagtaagagtagggctggaagaggcgagcgaatcagggcttcagatgatgctgcgaccatcatggacgcgggcggctgggcagcacggcttgaagccccgccgccggtagccgtcgtcactggagcgtctagagggattggcagagccatagctgtagcacttggcggagcagggtgcaaggtggttgtgaactatgccaagtcaggcgtggaggccgaagaggtgtgcagagagatcgaggcgtccggtggaacggcggtgagcttcgctgccgacgtctcctgcgaagccgacgtcgagtccatgatgagggccttgtgtgttactactgcaggccattgatgcctggggaactctggatgtgctggtgaacaatgcaggctgcagcgacgctgatgatgaagaggaagaagggaaggatcatcaacatcgcatccgtctccgggatcatcggcaacgtcgggcaggccaactactgcgccgccaaggctggggtcatcggcctcaccaaggccatggccagggagtacggcggcagaaacatcaatgtgaacgccgtggcgccgggctgggtggcgtccgacatgaccgccggactaggggacggcgtggaacggaaggcgctggagaccataccattgggacggtttgggagaccagaagaggtcgccggcctggtggggttcctggctgttcatcctgctgctagctacgtcaccggacaggtgctcactattgatggtggcctgtccatttgagggttttctgatcctgccaacagaactacagagtcaagcacaacgacaacaaaaaaaggaaatcagaagctacagaaggcagcaaaagactgctggagtttgaaaacaaaatgcatcgataactaaactgaagaatcattgttaaaaagaagctatgcatgggagagataaataaagtaaatcgtcttgcttcggaagcgttgtttggcccaaggatgagaaaacgagaatggtattctgacgaatacgaggataactttttaaatttcattatcgttttttttaaatatcttctatctggaaacgggcccaacaagttggcgctccttccatggtctctgggccttcctagcgccatgcaagtcttcagcgtcttctgtgcgcaagtctaatctgcaaactagaatggcagcagtgagaatgaatttacacgaacgtcgactagtatgccggagaagatattgctgctcttcgataaggccaggaaatcagctgaagtcgtcagtttaccactgttctgtgctgccggatttcttttcagtccttcttgattgaacggcccaaatgaaggcgttagcgtggaacatgcatgctaactgtttgaaccaagaagcaagaacttgtgccaaactaatgagtaatgacacacttacgcttcagagtttgggtctcgttccgtagaagatctaatgagaagatgccagacccactctgtatttcattcaccgtgccagcttttgtcatgaacactgttgctgccgtcgtgccttttgtaaaatcttgggagtccaagcagaacggcactgtgcatcaacgtcggtgcagacggggaatataagtctttgtttgttttttttttcagaagattaatcggttcatcatttactctttgagtgtgtagtagataaacagcattgctcaaacatttctgagttatttggtaggaggttgggagttgattttctgtctattggtcagctatggcttaacaaccatccc

SEQ ID NO: 210915 - DNA, 1960 bp, Zea Mays
gcatgcatgcgtaggagtaagagtagggctggaagaggcgagcgaatcagggcttcagatgatgctgcgaccatcatggacgcgggcggctgggcagcacggcttgaagccccgccgccggtagccgtcgtcactggagcgtctagagggattggcagagccatagctgtagcacttggcggagcagggtgcaaggtggttgtgaactatgccaagtcaggcgtggaggccgaagaggtgtgcagagagatcgaggcgtccggtggaacggcggtgagcttcgctgccgacgtctcctgcgaagccgacgtcgagtccatgatgagggccgtgagtagagtagagtacaagattcatccatccggtgctgttgcatgagtttgttcatttacccgtgacgtacagttgtgtgttactactgcaggccattgatgcctggggaactctggatgtgctggtgaacaatgcagggattacacgtgacgcgctgctgatgcggatgaagaggacccagtggcaagaggtggtggatgtcaacctcaccggcgtttacctctgctcgcaggctgcagcgacgctgatgatgaagaggaagaagggaaggatcatcaacatcgcatccgtctccgggatcatcggcaacgtcgggcaggccaactactgcgccgccaaggctggggtcatcggcctcaccaaggccatggccagggagtacggcggcagaaacatcaatgcgagtagctagcgcttagtgaacgccgtggcgccgggctgggtggcgtccgacatgaccgccggactaggggacggcgtggaacggaaggcgctggagaccataccattgggacggtttgggagaccagaagaggtcgccggcctggtggggttcctggctgttcatcctgctgctagctacgtcaccggacaggtgctcactattgatggtggcctgtccatttgagggttttctgatcctgccaacagaactacagagtcaagcacaacgacaacaaaaaaaggaaatcagaagctacagaaggcagcaaaagactgctggagtttgaaaacaaaatgcatcgataactaaactgaagaatcattgttaaaaagaagctatgcatgggagagataaataaagtaaatcgtcttgcttcggaagcgttgtttggcccaaggatgagaaaacgagaatggtattctgacgaatacgaggataactttttaaatttcattatcgttttttttaaatatcttctatctggaaacgggcccaacaagttggcgctccttccatggtctctgggccttcctagcgccatgcaagtcttcagcgtcttctgtgcgcaagtctaatctgcaaactagaatggcagcagtgagaatgaatttacacgaacgtcgactagtatgccggagaagatattgctgctcttcgataaggccaggaaatcagctgaagtcgtcagtttaccactgttctgtgctgccggatttcttttcagtccttcttgattgaacggcccaaatgaaggcgttagcgtggaacatgcatgctaactgtttgaaccaagaagcaagaacttgtgccaaactaatgagtaatgacacacttacgcttcagagtttgggtctcgttccgtagaagatctaatgagaagatgccagacccactctgtatttcattcaccgtgccagcttttgtcatgaacactgttgctgccgtcgtgccttttgtaaaatcttgggagtccaagcagaacggcactgtgcatcaacgtcggtgcagacggggaatataagtctttgtttgttttttttttcagaagattaatcggttcatcatttactctttgagtgtgtagtagataaacagcattgctcaaacatttctgagttatttggtaggaggttgggagttgattttctgtctattggtcagctatggcttaacaaccatccc

SEQ ID NO: 210916 - DNA, 5917 bp, Zea Mays
gtgacactgagactgtgagaggtattccatgtaatgccataatttgtgatggcatttttcagcaactccgggagcaaggccgattcagaagggtacaacttgaatgaaaaggccgatgatgatggcatacacgagtcaatccgggatgggaatgatggcctgaactctaggcagtggaacttaaatgagaaagcagaggatgcttaccacagcgaagcagagcaatatgagtctggccagtcaggtttgtacgcatcaaggcagcatgttcagagaggaggcagatcgtctggtggtccatggggcacaaattttctgaaggattccaggtccaaacagacggccaaggaagttgcatcaaatagcggtagaggaatggatgctgctaactcgcatgatgacatggatggtagcagagaggatgatgaactgaatagagcaaatggtgaggtgcctgctgaggaaatgctctcagatgactattacgagcaggacggagaggatcagattgaatcgttgcatcgtggcgggatgaagcagtcaagctgttccacttctggtggagcagcaaagtctggctcacgacaaatgaagaagatgtcaaagtacaatgcttatgataacgatgagtataatgatgagaatgatgatgacagcgatgcagatgaagatgatcctgctgacatggattttgagccagacggcgaaacagacaaggctactgataaggataagtttatggatagtgagaattctgacggcgacgacgatgatgaccttgaactctcagatgatgaagatgattttgttgagaatcggaggcaacctaaacgacttaagattgtagcaactaaaacttccaagggaggacagttgcccatgccagttcaaccaaaacgaggggtgtctcacagtgatgaagaatatttttcaggaaaagactcagatgttcccagcgattcggatttcaaacacataccgaaaaaacctgacaggttgcatcagaaacctgtgggccgcagtgatgttgccccaatcagttctcataatgagcttagaacttctggaaggaggaggacggtgaaaaagatctcatatgctgaaagcgaagaaagtgatgatagtgaggagaagtcaaataagcgacaaaagctcatcaaggaggaaccggaagaggaggatggagaaacaattgaaaaagttctgtggcatcaacccaagggtgtagcagaagaggcaataaggaatcaccggtcagctcaacctactgttgccagcctaacatcggactttgaccaacaatgggatgaattagagttctatataaaatggaaaggccagtcttacctgcattgtcaatggaagatactatcagagctccaaagtgttagtggattcaagaaggtaataaactacacgaaaagagtttctgaggaacagaggtacaagagggcactatcacgtgaagaggttgaggttgaacggatatttgctgatagggtcagcaaagctgatggagatgatctggttcccgaatatttagtaaaatggcaaggacttccttatgcagaatctacctgggaaaaagatacagatattgattttgctcaagatgcgattgatgaatataaggctcgtgaagctgcctcagctatacttgggaaaacagtagatttccaacgaaagaaaagcaaagctagtttgaggaggcttgatggtcagccagaatggctaaaagctggcaagcttcgtgattatcagctggaaggactaaactttctcgtcaatgggtggagaaacgatactaatgttatacttgctgatgaaatgggtctgggaaaaactatccaatctgtatccatgcttggcttccttcataatgctcaagaaatcaatggcccatttcttgtagtcgtgccactgtcaacattgtcgaactgggcaaaggaatttcggaagtggctgcccaacatgaatgttgttgtttatgttggcaaccgtgccagcagagagatgtgccagcagcatgaatttttttcagacaaaaaaggtgggcgtcatgtaaaattccacacgttgataactacgtacgaggtgattctcaaagacaaagcggttctttccaagataaaatggaactatcttatggttgatgaagcccaccggttgaaaaattgtgaagcgtcactgtatacaacccttttggaattcagcactaagaacaagctgcttatcacgggaacacctttgcagaacagtgtggaagagctttgggcattacttcatttccttgatccagtcaaattcaacagcaaggatagttttgttgagagatacaaaaatttgagttccttcaacgaaactgagctcgcgaatctgcataaggaattgaggcctcatattctacggcgggttataaaagatgttgagaagtctttacctcctaaaatcgagaggattctacgtgttgagatgtcacccctccagaaacagtactacaagtggattttagagcggaattttcagaatctgaataaaggtgttcgtgggaatcaggtatcacttcttaacattgttgttgaattgaagaaatgctgcaaccatccattcttgtttgaaagtgccgatcatggttatggtggagatagcatcggtgatcggaataaagttgaacgtattgttatgagtagtgggaaacttgtcttgttggacaaactattggtgagactgcgggagactaaccatcgtgtgcttatattctcacagaatacctctctcttcggggatttcagtttcagaggcttgatggtagtacaagagcagatcttcgtcatcaagccatggaacactttaatgctcctggaagtgatgatttctgttttcttttatccacacgtgccggaggacttggtattaatctagcaactgcagatacagtgataatttttgattcagattggaatccacaaaatgatttgcaggttcttgatcacttggtcattcagaagctaaacgctgagggcaggcttgagaagaaagaatccaaaaaaggtggccccatatttgacaagaacgaactttcagctatcttgaggttcggtgcagaggaattgttcaaggaagacaagactgatgaagagaccaagaggaaccttgaaagtttggacattgatgaaattcttgagagagctgagaaagtcgagacaaagggtggtgaaggggaggaaggaaatgagcttcttagcgctttcaaggcatgtgatgtcgcaaacttttccagtgtcgaagatgatgcaacgttctggagtaggttaatacagccagatcctgcagatatagttcaggaaactttggcacctcgtgctgcacgaaataaaaagagctatattgaagatcctcagcttgacaaaaataataacaggaaaagacgggcagttgaaacacaagaaaagccaaggaggctttctggcagaactgtggaaacagttaattcattaccattggttgatggagcagtagctcaagtacgagagtggtcttttggtaatgttccaaagaaggacgcttctcgttttgtacgagcggtcaaaaaatttgggaatgcaacccagattggattaattgtggatgatgttggtggtgtacttgcgaaggtaccgcatgaagcgcagatagaactatttgatttgctggttgatggttgtcaggaagcagttaaggagaatacagacattaagggcacagttttggattttttcggtgtagctgtaaaggcctatgaattgctagctcgtgttgaagagcttcagttcttggcaaagcgaattgcacgttacaaagatccaatcaagcagtaccgcatccagctaccttataaaaagcctcagtggtcagcaagctgtggatggactgaaactgatgacgctagattgatggttggaattcattggtatggctacgggaattgggagaaaataaggttggatccaaagcttggcctgacaacaaaaattgcgccagcaacacttggagaaagggagacatttttaccacgtgctcccaacttggataaccgcgctagtgctctcctgcaaaaggagtatgctaagtttagcggtaagagcttaaaagtcaaaggaaacacccgccagacagtcaataacgacagtaatagtggagttcgatcaatgaggggccggcaaaaggatgtaccagaaaaagatgataataagccgaacaaagatgacattcagaagcgtagggtaatagtggaagctgaagcaagagaagaaggtgaaatttctgaatcggaggcagagaccaggtatcgtcaggacaaagaggagaagtggcttgaatggtgctctgaagttttagatgaggagcaggaaactttgaagcgcctggataggctgcagaatacaagtgtaaacctcccaaaggaaaaggttctttcaaggattcgcaagtatctcctgataattggggacaaaattggagaagttgtccggcaacacagtgaatcttataggcaatcccgcatggtcatgaggttatggaattatgttgccaccttttcaaacatgtctggggagcaactgcatgatctctatatgaaacttagtcaagaccaactggaaggtggagttggcccatctcatggtggcaatttcacatccattcctcccaataagggaggtaactcaaatcaacttcatccttcgagaaaccaaaggccaactaggtctctccagtacaattctgagtctttccataatgagagctctggaagttctgaagcctggaagcgtcgacggagagctgacacagataatcaatttgacacccagcctttgtgtcaacctccaattatgacaaatggaaataggttgcaggaatctagtagttctgcaggtattcttggttggggtccagttgaaattagacggtatggtaatgagaggccaaaacgtgctgttcatcctagtcatttccctactgggcatggacctttgctgtagctgaaggaagtagatgatgcgaacaaccttgttcattttggcataaccgttcccagtgaatttcagcttccatatagttataaatggtggatctccgtaggaattgaaattctttttccaaaacaaaaaggaataaagagcaacctcacctggatcacagttttgaattatatgccttaaaaggtaatgccaggactctagaggcgacttatggaattgttaacagctacactgaatatccttctgacaccatcacagcaacacaaatacatggtggcttgtgaactgccaagaggatcaatcgaggaagttttgcctgttcagttttgtgatctctcaacaatgatctatagttaaatctcaatacataaattatgctttacattgtaatatattgaaatatggttccgttatgctccctccctctcgatgtgttttgtgccgtttttctaccgtgttgatgtaaaagatgaaagaaatgcatgttctcattttgaggcaacaaaaagttgcagccgggagcataatagtgaaatgcgatggaattatcggatacttatcgattccatagtgttttccctgagacaatgtactgaatgaggtacggttataagaaatggtgataattagcttagtaggtgctcagccattctacaagtcatctggtagtccgaagttgcatgaggcctactttcccctggttgccccacttatgctcagtaagtatgcttctagggttgtatgatgatggcccaattgaatttttaatcctgtgtatgaatggtgatggccaaacacttaaatgtagcactgatttaataataggtaccagttttgtcctttttcaattctgttttctgttggtgttcaaaatgtatataattttaaaaaaggta

SEQ ID NO: 210917 - DNA, 6606 bp, Zea Mays
cggagagggagaaagaggatagagagagaaggaaaaaacttatctgccgcctctctatcgcgcgcgccgccgccgcgctgccgcgccgggagcctgtctccggcgatcgccgccttccagccccgttactgaccctcctccgatccgaatcctaggcgaaaaatcgcggaaaataccgcaaaaaatcgcggaaaatcgcccggtcctttttgaataaatcgcacgggcgttgcaccccgctcccttgctcccctcccaccgccggcgacggcgatcgcgcagactaataggtgccccgcggcgagccagaaaacctgcctcgtgccggtccgagcattcgtctctgtcggggggactgagcgcccgtcgcccacccgcctcctgctcctctcgtcggccgcggcaggaggagtgacactgagactgtgagaggtattccatgtaatgccataatttgtgatggcatttttcagcaactccgggagcaaggccgattcagaagggtacaacttgaatgaaaaggccgatgatgatggcatacacgagtcaatccgggatgggaatgatggcctgaactctaggcagtggaacttaaatgagaaagcagaggatgcttaccacagcgaagcagagcaatatgagtctggccagtcaggtttgtacgcatcaaggcagcatgttcagagaggaggcagatcgtctggtggtccatggggcacaaattttctgaaggattccaggtccaaacagacggccaaggaagttgcatcaaatagcggtagaggaatggatgctgctaactcgcatgatgacatggatggtagcagagaggatgatgaactgaatagagcaaatggtgaggtgcctgctgaggaaatgctctcagatgactattacgagcaggacggagaggatcagattgaatcgttgcatcgtggcgggatgaagcagtcaagctgttccacttctggtggagcagcaaagtctggctcacgacaaatgaagaagatgtcaaagtacaatgcttatgataacgatgagtataatgatgagaatgatgatgacagcgatgcagatgaagatgatcctgctgacatggattttgagccagacggcgaaacagacaaggctactgataaggataagtttatggatagtgagaattctgacggcgacgacgatgatgaccttgaactctcagatgatgaagatgattttgttgagaatcggaggcaacctaaacgacttaagattgtagcaactaaaacttccaagggaggacagttgcccatgccagttcaaccaaaacgaggggtgtctcacagtgatgaagaatatttttcaggaaaagactcagatgttcccagcgattcggatttcaaacacataccgaaaaaacctgacaggttgcatcagaaacctgtgggccgcagtgatgttgccccaatcagttctcataatgagcttagaacttctggaaggaggaggacggtgaaaaagatctcatatgctgaaagcgaagaaagtgatgatagtgaggagaagtcaaataagcgacaaaagctcatcaaggaggaaccggaagaggaggatggagaaacaattgaaaaagttctgtggcatcaacccaagggtgtagcagaagaggcaataaggaatcaccggtcagctcaacctactgttgccagcctaacatcggactttgaccaacaatgggatgaattagagttctatataaaatggaaaggccagtcttacctgcattgtcaatggaagatactatcagagctccaaagtgttagtggattcaagaaggtaataaactacacgaaaagagtttctgaggaacagaggtacaagagggcactatcacgtgaagaggttgaggtacatgacgtgggcaaggagatggagctggatcttattaaacaatatagtcaggttgaacggatatttgctgatagggtcagcaaagctgatggagatgatctggttcccgaatatttagtaaaatggcaaggacttccttatgcagaatctacctgggaaaaagatacagatattgattttgctcaagatgcgattgatgaatataaggctcgtgaagctgcctcagctatacttgggaaaacagtagatttccaacgaaagaaaagcaaagctagtttgaggaggcttgatggtcagccagaatggctaaaagctggcaagcttcgtgattatcagctggaaggactaaactttctcgtcaatgggtggagaaacgatactaatgttatacttgctgatgaaatgggtctgggaaaaactatccaatctgtatccatgcttggcttccttcataatgctcaagaaatcaatggcccatttcttgtagtcgtgccactgtcaacattgtcgaactgggcaaaggaatttcggaagtggctgcccaacatgaatgttgttgtttatgttggcaaccgtgccagcagagagatgtgccagcagcatgaatttttttcagacaaaaaaggtgggcgtcatgtaaaattccacacgttgataactacgtacgaggtgattctcaaagacaaagcggttctttccaagataaaatggaactatcttatggttgatgaagcccaccggttgaaaaattgtgaagcgtcactgtatacaacccttttggaattcagcactaagaacaagctgcttatcacgggaacacctttgcagaacagtgtggaagagctttgggcattacttcatttccttgatccagtcaaattcaacagcaaggatagttttgttgagagatacaaaaatttgagttccttcaacgaaactgagctcgcgaatctgcataaggaattgaggcctcatattctacggcgggttataaaagatgttgagaagtctttacctcctaaaatcgagaggattctacgtgttgagatgtcacccctccagaaacagtactacaagtggattttagagcggaattttcagaatctgaataaaggtgttcgtgggaatcaggtcaagcagttcctcacctgctattgctagctcaagaagtttctcacctggccgtgcattacctatcaaactggagcatgggcaaggccacaaggtatcacttcttaacattgttgttgaattgaagaaatgctgcaaccatccattcttgtttgaaagtgccgatcatggttatggtggagatagcatcggtgatcggaataaagttgaacgtattgttatgagtagtgggaaacttgtcttgttggacaaactattggtgagactgcgggagactaaccatcgtgtgcttatattctcacagatggttaagatgttggacatccttgcagaatacctctctcttcggggatttcagtttcagaggcttgatggtagtacaagagcagatcttcgtcatcaagccatggaacactttaatgctcctggaagtgatgatttctgttttcttttatccacacgtgccggaggacttggtattaatctagcaactgcagatacagtgataatttttgattcagattggaatccacaaaatgatttgcaggccatgagtagggcacataggattggccaacaggagacagttaatatctaccgcttcgtcacatgcaaaagtgttgaggaggatattttggaacgcgcaaagaaaaagatggttcttgatcacttggtcattcagaagctaaacgctgagggcaggcttgagaagaaagaatccaaaaaaggtggccccatatttgacaagaacgaactttcagctatcttgaggttcggtgcagaggaattgttcaaggaagacaagactgatgaagagaccaagaggaaccttgaaagtttggacattgatgaaattcttgagagagctgagaaagtcgagacaaagggtggtgaaggggaggaaggaaatgagcttcttagcgctttcaaggtcgcaaacttttccagtgtcgaagatgatgcaacgttctggagtaggttaatacagccagatcctgcagatatagttcaggaaactttggcacctcgtgctgcacgaaataaaaagagctatattgaagatcctcagcttgacaaaaataataacaggaaaagacgggcagttgaaacacaagaaaagccaaggaggctttctggcagaactgtggaaacagttaattcattaccattggttgatggagcagtagctcaagtacgagagtggtcttttggtaatgttccaaagaaggacgcttctcgttttgtacgagcggtcaaaaaatttgggaatgcaacccagattggattaattgtggatgatgttggtggtgtacttgcgaaggtaccgcatgaagcgcagatagaactatttgatttgctggttgatggttgtcaggaagcagttaaggagaatacagacattaagggcacagttttggattttttcggtgtagctgtaaaggcctatgaattgctagctcgtgttgaagagcttcagttcttggcaaagcgaattgcacgttacaaagatccaatcaagcagtaccgcatccagctaccttataaaaagcctcagtggtcagcaagctgtggatggactgaaactgatgacgctagattgatggttggaattcattggtatggctacgggaattgggagaaaataaggttggatccaaagcttggcctgacaacaaaaattgcgccagcaacacttggagaaagggagacatttttaccacgtgctcccaacttggataaccgcgctagtgctctcctgcaaaaggagtatgctaagtttagcggtaagagcttaaaagtcaaaggaaacacccgccagacagtcaataacgacagtaatagtggagttcgatcaatgaggggccggcaaaaggatgtaccagaaaaagatgataataagccgaacaaagatgacattcagaagcgtagggtaatagtggaagctgaagcaagagaagaaggtgaaatttctgaatcggaggcagagaccaggtatcgtcaggacaaagaggagaagtggcttgaatggtgctctgaagttttagatgaggagcaggaaactttgaagcgcctggataggctgcagaatacaagtgtaaacctcccaaaggaaaaggttctttcaaggattcgcaagtatctcctgataattggggacaaaattggagaagttgtccggcaacacagtgaatcttataggcaatcccgcatggtcatgaggttatggaattatgttgccaccttttcaaacatgtctggggagcaactgcatgatctctatatgaaacttagtcaagaccaactggaaggtggagttggcccatctcatggtggcaatttcacatccattcctcccaataagggaggtaactcaaatcaacttcatccttcgagaaaccaaaggccaactaggtctctccagtacaattctgagtctttccataatgagagctctggaagttctgaagcctggaagcgtcgacggagagctgacacagataatcaatttgacacccagcctttgtgtcaacctccaattatgacaaatggaaataggttgcaggaatctagtagttctgcaggtattcttggttggggtccagttgaaattagacggtatggtaatgagaggccaaaacgtgctgttcatcctagtcatttccctactgggcatggacctttgctgtagctgaaggaagtagatgatgcgaacaaccttgttcattttggcataaccgttcccagtgaatttcagcttccatatagttataaatggtggatctccgtaggaattgaaattctttttccaaaacaaaaaggaataaagagcaacctcacctggatcacagttttgaattatatgccttaaaaggtaatgccaggactctagaggcgacttatggaattgttaacagctacactgaatatccttctgacaccatcacagcaacacaaatacatggtggcttgtgaactgccaagaggatcaatcgaggaagttttgcctgttcagttttgtgatctctcaacaatgatctatagttaaatctcaatacataaattatgctttacattgtaatatattgaaatatggttccgttatgctccctccctctcgatgtgttttgtgccgtttttctaccgtgttgatgtaaaagatgaaagaaatgcatgttctcattttgaggcaacaaaaagttgcagccgggagcataatagtgaaatgcgatggaattatcggatacttatcgattccatagtgttttccctgagacaatgtactgaatgaggtacggttataagaaatggtgataattagcttagtaggtgctcagccattctacaagtcatctggtagtccgaagttgcatgaggcctactttcccctggttgccccacttatgctcagtaagtatgcttctagggttgtatgatgatggcccaattgaatttttaatcctgtgtatgaatggtgatggccaaacacttaaatgtagcactgatttaataataggtaccagttttgtcctttttcaattctgttttctgttggtgttcaaaatgtatataattttaaaaaaggta

SEQ ID NO: 210918 - DNA, 6518 bp, Zea Mays
cggagagggagaaagaggatagagagagaaggaaaaaacttatctgccgcctctctatcgcgcgcgccgccgccgcgctgccgcgccgggagcctgtctccggcgatcgccgccttccagccccgttactgaccctcctccgatccgaatcctaggcgaaaaatcgcggaaaataccgcaaaaaatcgcggaaaatcgcccggtcctttttgaataaatcgcacgggcgttgcaccccgctcccttgctcccctcccaccgccggcgacggcgatcgcgcagactaataggtgccccgcggcgagccagaaaacctgcctcgtgccggtccgagcattcgtctctgtcggggggactgagcgcccgtcgcccacccgcctcctgctcctctcgtcggccgcggcaggaggagtgacactgagactgtgagaggtattccatgtaatgccataatttgtgatggcatttttcagcaactccgggagcaaggccgattcagaagggtacaacttgaatgaaaaggccgatgatgatggcatacacgagtcaatccgggatgggaatgatggcctgaactctaggcagtggaacttaaatgagaaagcagaggatgcttaccacagcgaagcagagcaatatgagtctggccagtcaggtttgtacgcatcaaggcagcatgttcagagaggaggcagatcgtctggtggtccatggggcacaaattttctgaaggattccaggtccaaacagacggccaaggaagttgcatcaaatagcggtagaggaatggatgctgctaactcgcatgatgacatggatggtagcagagaggatgatgaactgaatagagcaaatggtgaggtgcctgctgaggaaatgctctcagatgactattacgagcaggacggagaggatcagattgaatcgttgcatcgtggcgggatgaagcagtcaagctgttccacttctggtggagcagcaaagtctggctcacgacaaatgaagaagatgtcaaagtacaatgcttatgataacgatgagtataatgatgagaatgatgatgacagcgatgcagatgatgatcctgctgacatggattttgagccagacggcgaaacagacaaggctactgataaggataagtttatggatagtgagaattctgacggcgacgacgatgatgaccttgaactctcagatgatgaagatgattttgttgagaatcggaggcaacctaaacgacttaagattgtagcaactaaaacttccaagggaggacagttgcccatgccagttcaaccaaaacgaggggtgtctcacagtgatgaagaatatttttcaggaaaagactcagatgttcccagcgattcggatttcaaacacataccgaaaaaacctgacaggttgcatcagaaacctgtgggccgcagtgatgttgccccaatcagttctcataatgagcttagaacttctggaaggaggaggacggtgaaaaagatctcatatgctgaaagcgaagaaagtgatgatagtgaggagaagtcaaataagcgacaaaagctcatcaaggaggaaccggaagaggaggatggagaaacaattgaaaaagttctgtggcatcaacccaagggtgtagcagaagaggcaataaggaatcaccggtcagctcaacctactgttgccagcctaacatcggactttgaccaacaatgggatgaattagagttctatataaaatggaaaggccagtcttacctgcattgtcaatggaagatactatcagagctccaaagtgttagtggattcaagaaggtaataaactacacgaaaagagtttctgaggaacagaggtacaagagggcactatcacgtgaagaggttgaggtacatgacgtgggcaaggagatggagctggatcttattaaacaatatagtcaggttgaacggatatttgctgatagggtcagcaaagctgatggagatgatctggttcccgaatatttagtaaaatggcaaggacttccttatgcagaatctacctgggaaaaagatacagatattgattttgctcaagatgcgattgatgaatataaggctcgtgaagctgcctcagctatacttgggaaaacagtagatttccaacgaaagaaaagcaaagctagtttgaggaggcttgatggtcagccagaatggctaaaagctggcaagcttcgtgattatcagctggaaggactaaactttctcgtcaatgggtggagaaacgatactaatgttatacttgctgatgaaatgggtctgggaaaaactatccaatctgtatccatgcttggcttccttcataatgctcaagaaatcaatggcccatttcttgtagtcgtgccactgtcaacattgtcgaactgggcaaaggaatttcggaagtggctgcccaacatgaatgttgttgtttatgttggcaaccgtgccagcagagagatgtgccagcagcatgaatttttttcagacaaaaaaggtgggcgtcatgtaaaattccacacgttgataactacgtacgaggtgattctcaaagacaaagcggttctttccaagataaaatggaactatcttatggttgatgaagcccaccggttgaaaaattgtgaagcgtcactgtatacaacccttttggaattcagcactaagaacaagctgcttatcacgggaacacctttgcagaacagtgtggaagagctttgggcattacttcatttccttgatccagtcaaattcaacagcaaggatagttttgttgagagatacaaaaatttgagttccttcaacgaaactgagctcgcgaatctgcataaggaattgaggcctcatattctacggcgggttataaaagatgttgagaagtctttacctcctaaaatcgagaggattctacgtgttgagatgtcacccctccagaaacagtactacaagtggattttagagcggaattttcagaatctgaataaaggtgttcgtgggaatcaggtatcacttcttaacattgttgttgaattgaagaaatgctgcaaccatccattcttgtttgaaagtgccgatcatggttatggtggagatagcatcggtgatcggaataaagttgaacgtattgttatgagtagtgggaaacttgtcttgttggacaaactattggtgagactgcgggagactaaccatcgtgtgcttatattctcacagatggttaagatgttggacatccttgcagaatacctctctcttcggggatttcagtttcagaggcttgatggtagtacaagagcagatcttcgtcatcaagccatggaacactttaatgctcctggaagtgatgatttctgttttcttttatccacacgtgccggaggacttggtattaatctagcaactgcagatacagtgataatttttgattcagattggaatccacaaaatgatttgcaggccatgagtagggcacataggattggccaacaggagacagttaatatctaccgcttcgtcacatgcaaaagtgttgaggaggatattttggaacgcgcaaagaaaaagatggttcttgatcacttggtcattcagaagctaaacgctgagggcaggcttgagaagaaagaatccaaaaaaggtggccccatatttgacaagaacgaactttcagctatcttgaggttcggtgcagaggaattgttcaaggaagacaagactgatgaagagaccaagaggaaccttgaaagtttggacattgatgaaattcttgagagagctgagaaagtcgagacaaagggtggtgaaggggaggaaggaaatgagcttcttagcgctttcaaggcatgtgatgtcgcaaacttttccagtgtcgaagatgatgcaacgttctggagtaggttaatacagccagatcctgcagatatagttcaggaaactttggcacctcgtgctgcacgaaataaaaagagctatattgaagatcctcagcttgacaaaaataataacaggaaaagacgggcagttgaaacacaagaaaagccaaggaggctttctggcagaactgtggaaacagttaattcattaccattggttgatggagcagtagctcaagtacgagagtggtcttttggtaatgttccaaagaaggacgcttctcgttttgtacgagcggtcaaaaaatttgggaatgcaacccagattggattaattgtggatgatgttggtggtgtacttgcgaaggtaccgcatgaagcgcagatagaactatttgatttgctggttgatggttgtcaggaagcagttaaggagaatacagacattaagggcacagttttggattttttcggtgtagctgtaaaggcctatgaattgctagctcgtgttgaagagcttcagttcttggcaaagcgaattgcacgttacaaagatccaatcaagcagtaccgcatccagctaccttataaaaagcctcagtggtcagcaagctgtggatggactgaaactgatgacgctagattgatggttggaattcattggtatggctacgggaattgggagaaaataaggttggatccaaagcttggcctgacaacaaaaattgcgccagcaacacttggagaaagggagacatttttaccacgtgctcccaacttggataaccgcgctagtgctctcctgcaaaaggagtatgctaagtttagcggtaagagcttaaaagtcaaaggaaacacccgccagacagtcaataacgacagtaatagtggagttcgatcaatgaggggccggcaaaaggatgtaccagaaaaagatgataataagccgaacaaagatgacattcagaagcgtagggtaatagtggaagctgaagcaagagaagaaggtgaaatttctgaatcggaggcagagaccaggtatcgtcaggacaaagaggagaagtggcttgaatggtgctctgaagttttagatgaggagcaggaaactttgaagcgcctggataggctgcagaatacaagtgtaaacctcccaaaggaaaaggttctttcaaggattcgcaagtatctcctgataattggggacaaaattggagaagttgtccggcaacacagtgaatcttataggcaatcccgcatggtcatgaggttatggaattatgttgccaccttttcaaacatgtctggggagcaactgcatgatctctatatgaaacttagtcaagaccaactggaaggtggagttggcccatctcatggtggcaatttcacatccattcctcccaataagggaggtaactcaaatcaacttcatccttcgagaaaccaaaggccaactaggtctctccagtacaattctgagtctttccataatgagagctctggaagttctgaagcctggaagcgtcgacggagagctgacacagataatcaatttgacacccagcctttgtgtcaacctccaattatgacaaatggaaataggttgcaggaatctagtagttctgcaggtattcttggttggggtccagttgaaattagacggtatggtaatgagaggccaaaacgtgctgttcatcctagtcatttccctactgggcatggacctttgctgtagctgaaggaagtagatgatgcgaacaaccttgttcattttggcataaccgttcccagtgaatttcagcttccatatagttataaatggtggatctccgtaggaattgaaattctttttccaaaacaaaaaggaataaagagcaacctcacctggatcacagttttgaattatatgccttaaaaggtaatgccaggactctagaggcgacttatggaattgttaacagctacactgaatatccttctgacaccatcacagcaacacaaatacatggtggcttgtgaactgccaagaggatcaatcgaggaagttttgcctgttcagttttgtgatctctcaacaatgatctatagttaaatctcaatacataaattatgctttacattgtaatatattgaaatatggttccgttatgctccctccctctcgatgtgttttgtgccgtttttctaccgtgttgatgtaaaagatgaaagaaatgcatgttctcattttgaggcaacaaaaagttgcagccgggagcataatagtgaaatgcgatggaattatcggatacttatcgattccatagtgttttccctgagacaatgtactgaatgaggtacggttataagaaatggtgataattagcttagtaggtgctcagccattctacaagtcatctggtagtccgaagttgcatgaggcctactttcccctggttgccccacttatgctcagtaagtatgcttctagggttgtatgatgatggcccaattgaatttttaatcctgtgtatgaatggtgatggccaaacacttaaatgtagcactgatttaataataggtaccagttttgtcctttttcaattctgttttctgttggtgttcaaaatgtatataattttaaaaaaggta

SEQ ID NO: 210919 - DNA, 6649 bp, Zea Mays
cggagagggagaaagaggatagagagagaaggaaaaaacttatctgccgcctctctatcgcgcgcgccgccgccgcgctgccgcgccgggagcctgtctccggcgatcgccgccttccagccccgttactgaccctcctccgatccgaatcctaggcgaaaaatcgcggaaaataccgcaaaaaatcgcggaaaatcgcccggtcctttttgaataaatcgcacgggcgttgcaccccgctcccttgctcccctcccaccgccggcgacggcgatcgcgcagactaataggtgccccgcggcgagccagaaaacctgcctcgtgccggtccgagcattcgtctctgtcggggggactgagcgcccgtcgcccacccgcctcctgctcctctcgtcggccgcggcaggaggagtgacactgagactgtgagaggtattccatgtaatgccataatttgtgatggcatttttcagcaactccgggagcaaggccgattcagaagggtacaacttgaatgaaaaggccgatgatgatggcatacacgagtcaatccgggatgggaatgatggcctgaactctaggcagtggaacttaaatgagaaagcagaggatgcttaccacagcgaagcagagcaatatgagtctggccagtcaggtttgtacgcatcaaggcagcatgttcagagaggaggcagatcgtctggtggtccatggggcacaaattttctgaaggattccaggtccaaacagacggccaaggaagttgcatcaaatagcggtagaggaatggatgctgctaactcgcatgatgacatggatggtagcagagaggatgatgaactgaatagagcaaatggtgaggtgcctgctgaggaaatgctctcagatgactattacgagcaggacggagaggatcagattgaatcgttgcatcgtggcgggatgaagcagtcaagctgttccacttctggtggagcagcaaagtctggctcacgacaaatgaagaagatgtcaaagtacaatgcttatgataacgatgagtataatgatgagaatgatgatgacagcgatgcagatgaagatgatcctgctgacatggattttgagccagacggcgaaacagacaaggctactgataaggataagtttatggatagtgagaattctgacggcgacgacgatgatgaccttgaactctcagatgatgaagatgattttgttgagaatcggaggcaacctaaacgacttaagattgtagcaactaaaacttccaagggaggacagttgcccatgccagttcaaccaaaacgaggggtgtctcacagtgatgaagaatatttttcaggaaaagactcagatgttcccagcgattcggatttcaaacacataccgaaaaaacctgacaggttgcatcagaaacctgtgggccgcagtgatgttgccccaatcagttctcataatgagcttagaacttctggaaggaggaggacggtgaaaaagatctcatatgctgaaagcgaagaaagtgatgatagtgaggagaagtcaaataagcgacaaaagctcatcaaggaggaaccggaagaggaggatggagaaacaattgaaaaagttctgtggcatcaacccaagggtgtagcagaagaggcaataaggaatcaccggtcagctcaacctactgttgccagcctaacatcggactttgaccaacaatgggatgaattagagttctatataaaatggaaaggccagtcttacctgcattgtcaatggaagatactatcagagctccaaagtgttagtggattcaagaaggtaataaactacacgaaaagagtttctgaggaacagaggtacaagagggcactatcacgtgaagaggttgaggttgaacggatatttgctgatagggtcagcaaagctgatggagatgatctggttcccgaatatttagtaaaatggcaaggacttccttatgcagaatctacctgggaaaaagatacagatattgattttgctcaagatgcgattgatgaatataaggctcgtgaagctgcctcagctatacttgggaaaacagtagatttccaacgaaagaaaagcaaagctagtttgaggaggcttgatggtcagccagaatggctaaaagctggcaagcttcgtgattatcagctggaaggactaaactttctcgtcaatgggtggagaaacgatactaatgttatacttgctgatgaaatgggtctgggaaaaactatccaatctgtatccatgcttggcttccttcataatgctcaagaaatcaatggcccatttcttgtagtcgtgccactgtcaacattgtcgaactgggcaaaggaatttcggaagtggctgcccaacatgaatgttgttgtttatgttggcaaccgtgccagcagagagatgtgccagcagcatgaatttttttcagacaaaaaaggtgggcgtcatgtaaaattccacacgttgataactacgtacgaggtgattctcaaagacaaagcggttctttccaagataaaatggaactatcttatggttgatgaagcccaccggttgaaaaattgtgaagcgtcactgtatacaacccttttggaattcagcactaagaacaagctgcttatcacgggaacacctttgcagaacagtgtggaagagctttgggcattacttcatttccttgatccagtcaaattcaacagcaaggatagttttgttgagagatacaaaaatttgagttccttcaacgaaactgagctcgcgaatctgcataaggaattgaggcctcatattctacggcgggttataaaagatgttgagaagtctttacctcctaaaatcgagaggattctacgtgttgagatgtcacccctccagaaacagtactacaagtggattttagagcggaattttcagaatctgaataaaggtgttcgtgggaatcagttatttcagttggcacatcttggaattgaatgcaatttggctgtctcagatcttgattggaacaatgttactattctttctcacctactattgctaggtcaagcagttcctcacctgctattgctagctcaagaagtttctcacctggccgtgcattacctatcaaactggagcatgggcaaggccacaaggtatcacttcttaacattgttgttgaattgaagaaatgctgcaaccatccattcttgtttgaaagtgccgatcatggttatggtggagatagcatcggtgatcggaataaagttgaacgtattgttatgagtagtgggaaacttgtcttgttggacaaactattggtgagactgcgggagactaaccatcgtgtgcttatattctcacagatggttaagatgttggacatccttgcagaatacctctctcttcggggatttcagtttcagaggcttgatggtagtacaagagcagatcttcgtcatcaagccatggaacactttaatgctcctggaagtgatgatttctgttttcttttatccacacgtgccggaggacttggtattaatctagcaactgcagatacagtgataatttttgattcagattggaatccacaaaatgatttgcaggccatgagtagggcacataggattggccaacaggagacagttaatatctaccgcttcgtcacatgcaaaagtgttgaggaggatattttggaacgcgcaaagaaaaagatggttcttgatcacttggtcattcagaagctaaacgctgagggcaggcttgagaagaaagaatccaaaaaaggtggccccatatttgacaagaacgaactttcagctatcttgaggttcggtgcagaggaattgttcaaggaagacaagactgatgaagagaccaagaggaaccttgaaagtttggacattgatgaaattcttgagagagctgagaaagtcgagacaaagggtggtgaaggggaggaaggaaatgagcttcttagcgctttcaaggtcgcaaacttttccagtgtcgaagatgatgcaacgttctggagtaggttaatacagccagatcctgcagatatagttcaggaaactttggcacctcgtgctgcacgaaataaaaagagctatattgaagatcctcagcttgacaaaaataataacaggaaaagacgggcagttgaaacacaagaaaagccaaggaggctttctggcagaactgtggaaacagttaattcattaccattggttgatggagcagtagctcaagtacgagagtggtcttttggtaatgttccaaagaaggacgcttctcgttttgtacgagcggtcaaaaaatttgggaatgcaacccagattggattaattgtggatgatgttggtggtgtacttgcgaaggtaccgcatgaagcgcagatagaactatttgatttgctggttgatggttgtcaggaagcagttaaggagaatacagacattaagggcacagttttggattttttcggtgtagctgtaaaggcctatgaattgctagctcgtgttgaagagcttcagttcttggcaaagcgaattgcacgttacaaagatccaatcaagcagtaccgcatccagctaccttataaaaagcctcagtggtcagcaagctgtggatggactgaaactgatgacgctagattgatggttggaattcattggtatggctacgggaattgggagaaaataaggttggatccaaagcttggcctgacaacaaaaattgcgccagcaacacttggagaaagggagacatttttaccacgtgctcccaacttggataaccgcgctagtgctctcctgcaaaaggagtatgctaagtttagcggtaagagcttaaaagtcaaaggaaacacccgccagacagtcaataacgacagtaatagtggagttcgatcaatgaggggccggcaaaaggatgtaccagaaaaagatgataataagccgaacaaagatgacattcagaagcgtagggtaatagtggaagctgaagcaagagaagaaggtgaaatttctgaatcggaggcagagaccaggtatcgtcaggacaaagaggagaagtggcttgaatggtgctctgaagttttagatgaggagcaggaaactttgaagcgcctggataggctgcagaatacaagtgtaaacctcccaaaggaaaaggttctttcaaggattcgcaagtatctcctgataattggggacaaaattggagaagttgtccggcaacacagtgaatcttataggcaatcccgcatggtcatgaggttatggaattatgttgccaccttttcaaacatgtctggggagcaactgcatgatctctatatgaaacttagtcaagaccaactggaaggtggagttggcccatctcatggtggcaatttcacatccattcctcccaataagggaggtaactcaaatcaacttcatccttcgagaaaccaaaggccaactaggtctctccagtacaattctgagtctttccataatgagagctctggaagttctgaagcctggaagcgtcgacggagagctgacacagataatcaatttgacacccagcctttgtgtcaacctccaattatgacaaatggaaataggttgcaggaatctagtagttctgcaggtattcttggttggggtccagttgaaattagacggtatggtaatgagaggccaaaacgtgctgttcatcctagtcatttccctactgggcatggacctttgctgtagctgaaggaagtagatgatgcgaacaaccttgttcattttggcataaccgttcccagtgaatttcagcttccatatagttataaatggtggatctccgtaggaattgaaattctttttccaaaacaaaaaggaataaagagcaacctcacctggatcacagttttgaattatatgccttaaaaggtaatgccaggactctagaggcgacttatggaattgttaacagctacactgaatatccttctgacaccatcacagcaacacaaatacatggtggcttgtgaactgccaagaggatcaatcgaggaagttttgcctgttcagttttgtgatctctcaacaatgatctatagttaaatctcaatacataaattatgctttacattgtaatatattgaaatatggttccgttatgctccctccctctcgatgtgttttgtgccgtttttctaccgtgttgatgtaaaagatgaaagaaatgcatgttctcattttgaggcaacaaaaagttgcagccgggagcataatagtgaaatgcgatggaattatcggatacttatcgattccatagtgttttccctgagacaatgtactgaatgaggtacggttataagaaatggtgataattagcttagtaggtgctcagccattctacaagtcatctggtagtccgaagttgcatgaggcctactttcccctggttgccccacttatgctcagtaagtatgcttctagggttgtatgatgatggcccaattgaatttttaatcctgtgtatgaatggtgatggccaaacacttaaatgtagcactgatttaataataggtaccagttttgtcctttttcaattctgttttctgttggtgttcaaaatgtatataattttaaaaaaggta

SEQ ID NO: 210920 - DNA, 6527 bp, Zea Mays
cggagagggagaaagaggatagagagagaaggaaaaaacttatctgccgcctctctatcgcgcgcgccgccgccgcgctgccgcgccgggagcctgtctccggcgatcgccgccttccagccccgttactgaccctcctccgatccgaatcctaggcgaaaaatcgcggaaaataccgcaaaaaatcgcggaaaatcgcccggtcctttttgaataaatcgcacgggcgttgcaccccgctcccttgctcccctcccaccgccggcgacggcgatcgcgcagactaataggtgccccgcggcgagccagaaaacctgcctcgtgccggtccgagcattcgtctctgtcggggggactgagcgcccgtcgcccacccgcctcctgctcctctcgtcggccgcggcaggaggagtgacactgagactgtgagaggtattccatgtaatgccataatttgtgatggcatttttcagcaactccgggagcaaggccgattcagaagggtacaacttgaatgaaaaggccgatgatgatggcatacacgagtcaatccgggatgggaatgatggcctgaactctaggcagtggaacttaaatgagaaagcagaggatgcttaccacagcgaagcagagcaatatgagtctggccagtcaggtttgtacgcatcaaggcagcatgttcagagaggaggcagatcgtctggtggtccatggggcacaaattttctgaaggattccaggtccaaacagacggccaaggaagttgcatcaaatagcggtagaggaatggatgctgctaactcgcatgatgacatggatggtagcagagaggatgatgaactgaatagagcaaatggtgaggtgcctgctgaggaaatgctctcagatgactattacgagcaggacggagaggatcagattgaatcgttgcatcgtggcgggatgaagcagtcaagctgttccacttctggtggagcagcaaagtctggctcacgacaaatgaagaagatgtcaaagtacaatgcttatgataacgatgagtataatgatgagaatgatgatgacagcgatgcagatgaagatgatcctgctgacatggattttgagccagacggcgaaacagacaaggctactgataaggataagtttatggatagtgagaattctgacggcgacgacgatgatgaccttgaactctcagatgatgaagatgattttgttgagaatcggaggcaacctaaacgacttaagattgtagcaactaaaacttccaagggaggacagttgcccatgccagttcaaccaaaacgaggggtgtctcacagtgatgaagaatatttttcaggaaaagactcagatgttcccagcgattcggatttcaaacacataccgaaaaaacctgacaggttgcatcagaaacctgtgggccgcagtgatgttgccccaatcagttctcataatgagcttagaacttctggaaggaggaggacggtgaaaaagatctcatatgctgaaagcgaagaaagtgatgatagtgaggagaagtcaaataagcgacaaaagctcatcaaggaggaaccggaagaggaggatggagaaacaattgaaaaagttctgtggcatcaacccaagggtgtagcagaagaggcaataaggaatcaccggtcagctcaacctactgttgccagcctaacatcggactttgaccaacaatgggatgaattagagttctatataaaatggaaaggccagtcttacctgcattgtcaatggaagatactatcagagctccaaagtgttagtggattcaagaaggtaataaactacacgaaaagagtttctgaggaacagaggtacaagagggcactatcacgtgaagaggttgaggttgaacggatatttgctgatagggtcagcaaagctgatggagatgatctggttcccgaatatttagtaaaatggcaaggacttccttatgcagaatctacctgggaaaaagatacagatattgattttgctcaagatgcgattgatgaatataaggctcgtgaagctgcctcagctatacttgggaaaacagtagatttccaacgaaagaaaagcaaagctagtttgaggaggcttgatggtcagccagaatggctaaaagctggcaagcttcgtgattatcagctggaaggactaaactttctcgtcaatgggtggagaaacgatactaatgttatacttgctgatgaaatgggtctgggaaaaactatccaatctgtatccatgcttggcttccttcataatgctcaagaaatcaatggcccatttcttgtagtcgtgccactgtcaacattgtcgaactgggcaaaggaatttcggaagtggctgcccaacatgaatgttgttgtttatgttggcaaccgtgccagcagagagatgtgccagcagcatgaatttttttcagacaaaaaaggtgggcgtcatgtaaaattccacacgttgataactacgtacgaggtgattctcaaagacaaagcggttctttccaagataaaatggaactatcttatggttgatgaagcccaccggttgaaaaattgtgaagcgtcactgtatacaacccttttggaattcagcactaagaacaagctgcttatcacgggaacacctttgcagaacagtgtggaagagctttgggcattacttcatttccttgatccagtcaaattcaacagcaaggatagttttgttgagagatacaaaaatttgagttccttcaacgaaactgagctcgcgaatctgcataaggaattgaggcctcatattctacggcgggttataaaagatgttgagaagtctttacctcctaaaatcgagaggattctacgtgttgagatgtcacccctccagaaacagtactacaagtggattttagagcggaattttcagaatctgaataaaggtgttcgtgggaatcaggtatcacttcttaacattgttgttgaattgaagaaatgctgcaaccatccattcttgtttgaaagtgccgatcatggttatggtggagatagcatcggtgatcggaataaagttgaacgtattgttatgagtagtgggaaacttgtcttgttggacaaactattggtgagactgcgggagactaaccatcgtgtgcttatattctcacagggcctcttcagtgtggtttggtttggttcaaacccgcactacgggtgccctaagagagaaagcaaaaaaatggttaagatgttggacatccttgcagaatacctctctcttcggggatttcagtttcagaggcttgatggtagtacaagagcagatcttcgtcatcaagccatggaacactttaatgctcctggaagtgatgatttctgttttcttttatccacacgtgccggaggacttggtattaatctagcaactgcagatacagtgataatttttgattcagattggaatccacaaaatgatttgcaggccatgagtagggcacataggattggccaacaggagacagttaatatctaccgcttcgtcacatgcaaaagtgttgaggaggatattttggaacgcgcaaagaaaaagatggttcttgatcacttggtcattcagaagctaaacgctgagggcaggcttgagaagaaagaatccaaaaaaggtggccccatatttgacaagaacgaactttcagctatcttgaggttcggtgcagaggaattgttcaaggaagacaagactgatgaagagaccaagaggaaccttgaaagtttggacattgatgaaattcttgagagagctgagaaagtcgagacaaagggtggtgaaggggaggaaggaaatgagcttcttagcgctttcaaggtcgcaaacttttccagtgtcgaagatgatgcaacgttctggagtaggttaatacagccagatcctgcagatatagttcaggaaactttggcacctcgtgctgcacgaaataaaaagagctatattgaagatcctcagcttgacaaaaataataacaggaaaagacgggcagttgaaacacaagaaaagccaaggaggctttctggcagaactgtggaaacagttaattcattaccattggttgatggagcagtagctcaagtacgagagtggtcttttggtaatgttccaaagaaggacgcttctcgttttgtacgagcggtcaaaaaatttgggaatgcaacccagattggattaattgtggatgatgttggtggtgtacttgcgaaggtaccgcatgaagcgcagatagaactatttgatttgctggttgatggttgtcaggaagcagttaaggagaatacagacattaagggcacagttttggattttttcggtgtagctgtaaaggcctatgaattgctagctcgtgttgaagagcttcagttcttggcaaagcgaattgcacgttacaaagatccaatcaagcagtaccgcatccagctaccttataaaaagcctcagtggtcagcaagctgtggatggactgaaactgatgacgctagattgatggttggaattcattggtatggctacgggaattgggagaaaataaggttggatccaaagcttggcctgacaacaaaaattgcgccagcaacacttggagaaagggagacatttttaccacgtgctcccaacttggataaccgcgctagtgctctcctgcaaaaggagtatgctaagtttagcggtaagagcttaaaagtcaaaggaaacacccgccagacagtcaataacgacagtaatagtggagttcgatcaatgaggggccggcaaaaggatgtaccagaaaaagatgataataagccgaacaaagatgacattcagaagcgtagggtaatagtggaagctgaagcaagagaagaaggtgaaatttctgaatcggaggcagagaccaggtatcgtcaggacaaagaggagaagtggcttgaatggtgctctgaagttttagatgaggagcaggaaactttgaagcgcctggataggctgcagaatacaagtgtaaacctcccaaaggaaaaggttctttcaaggattcgcaagtatctcctgataattggggacaaaattggagaagttgtccggcaacacagtgaatcttataggcaatcccgcatggtcatgaggttatggaattatgttgccaccttttcaaacatgtctggggagcaactgcatgatctctatatgaaacttagtcaagaccaactggaaggtggagttggcccatctcatggtggcaatttcacatccattcctcccaataagggaggtaactcaaatcaacttcatccttcgagaaaccaaaggccaactaggtctctccagtacaattctgagtctttccataatgagagctctggaagttctgaagcctggaagcgtcgacggagagctgacacagataatcaatttgacacccagcctttgtgtcaacctccaattatgacaaatggaaataggttgcaggaatctagtagttctgcaggtattcttggttggggtccagttgaaattagacggtatggtaatgagaggccaaaacgtgctgttcatcctagtcatttccctactgggcatggacctttgctgtagctgaaggaagtagatgatgcgaacaaccttgttcattttggcataaccgttcccagtgaatttcagcttccatatagttataaatggtggatctccgtaggaattgaaattctttttccaaaacaaaaaggaataaagagcaacctcacctggatcacagttttgaattatatgccttaaaaggtaatgccaggactctagaggcgacttatggaattgttaacagctacactgaatatccttctgacaccatcacagcaacacaaatacatggtggcttgtgaactgccaagaggatcaatcgaggaagttttgcctgttcagttttgtgatctctcaacaatgatctatagttaaatctcaatacataaattatgctttacattgtaatatattgaaatatggttccgttatgctccctccctctcgatgtgttttgtgccgtttttctaccgtgttgatgtaaaagatgaaagaaatgcatgttctcattttgaggcaacaaaaagttgcagccgggagcataatagtgaaatgcgatggaattatcggatacttatcgattccatagtgttttccctgagacaatgtactgaatgaggtacggttataagaaatggtgataattagcttagtaggtgctcagccattctacaagtcatctggtagtccgaagttgcatgaggcctactttcccctggttgccccacttatgctcagtaagtatgcttctagggttgtatgatgatggcccaattgaatttttaatcctgtgtatgaatggtgatggccaaacacttaaatgtagcactgatttaataataggtaccagttttgtcctttttcaattctgttttctgttggtgttcaaaatgtatataattttaaaaaaggta

SEQ ID NO: 210921 - DNA, 6688 bp, Zea Mays
cggagagggagaaagaggatagagagagaaggaaaaaacttatctgccgcctctctatcgcgcgcgccgccgccgcgctgccgcgccgggagcctgtctccggcgatcgccgccttccagccccgttactgaccctcctccgatccgaatcctaggcgaaaaatcgcggaaaataccgcaaaaaatcgcggaaaatcgcccggtcctttttgaataaatcgcacgggcgttgcaccccgctcccttgctcccctcccaccgccggcgacggcgatcgcgcagactaataggtgccccgcggcgagccagaaaacctgcctcgtgccggtccgagcattcgtctctgtcggggggactgagcgcccgtcgcccacccgcctcctgctcctctcgtcggccgcggcaggaggagtgacactgagactgtgagaggtattccatgtaatgccataatttgtgatggcatttttcagcaactccgggagcaaggccgattcagaagggtacaacttgaatgaaaaggccgatgatgatggcatacacgagtcaatccgggatgggaatgatggcctgaactctaggcagtggaacttaaatgagaaagcagaggatgcttaccacagcgaagcagagcaatatgagtctggccagtcaggtttgtacgcatcaaggcagcatgttcagagaggaggcagatcgtctggtggtccatggggcacaaattttctgaaggattccaggtccaaacagacggccaaggaagttgcatcaaatagcggtagaggaatggatgctgctaactcgcatgatgacatggatggtagcagagaggatgatgaactgaatagagcaaatggtgaggtgcctgctgaggaaatgctctcagatgactattacgagcaggacggagaggatcagattgaatcgttgcatcgtggcgggatgaagcagtcaagctgttccacttctggtggagcagcaaagtctggctcacgacaaatgaagaagatgtcaaagtacaatgcttatgataacgatgagtataatgatgagaatgatgatgacagcgatgcagatgaagatgatcctgctgacatggattttgagccagacggcgaaacagacaaggctactgataaggataagtttatggatagtgagaattctgacggcgacgacgatgatgaccttgaactctcagatgatgaagatgattttgttgagaatcggaggcaacctaaacgacttaagattgtagcaactaaaacttccaagggaggacagttgcccatgccagttcaaccaaaacgaggggtgtctcacagtgatgaagaatatttttcaggaaaagactcagatgttcccagcgattcggatttcaaacacataccgaaaaaacctgacaggttgcatcagaaacctgtgggccgcagtgatgttgccccaatcagttctcataatgagcttagaacttctggaaggaggaggacggtgaaaaagatctcatatgctgaaagcgaagaaagtgatgatagtgaggagaagtcaaataagcgacaaaagctcatcaaggaggaaccggaagaggaggatggagaaacaattgaaaaagttctgtggcatcaacccaagggtgtagcagaagaggcaataaggaatcaccggtcagctcaacctactgttgccagcctaacatcggactttgaccaacaatgggatgaattagagttctatataaaatggaaaggccagtcttacctgcattgtcaatggaagatactatcagagctccaaagtgttagtggattcaagaaggtaataaactacacgaaaagagtttctgaggaacagaggtacaagagggcactatcacgtgaagaggttgaggttgaacggatatttgctgatagggtcagcaaagctgatggagatgatctggttcccgaatatttagtaaaatggcaaggacttccttatgcagaatctacctgggaaaaagatacagatattgattttgctcaagatgcgattgatgaatataaggctcgtgaagctgcctcagctatacttgggaaaacagtagatttccaacgaaagaaaagcaaagctagtttgaggaggcttgatggtcagccagaatggctaaaagctggcaagcttcgtgattatcagctggaaggactaaactttctcgtcaatgggtggagaaacgatactaatgttatacttgctgatgaaatgggtctgggaaaaactatccaatctgtatccatgcttggcttccttcataatgctcaagaaatcaatggcccatttcttgtagtcgtgccactgtcaacattgtcgaactgggcaaaggaatttcggaagtggctgcccaacatgaatgttgttgtttatgttggcaaccgtgccagcagagagatgtgccagcagcatgaatttttttcagacaaaaaaggtgggcgtcatgtaaaattccacacgttgataactacgtacgaggtgattctcaaagacaaagcggttctttccaagataaaatggaactatcttatggttgatgaagcccaccggttgaaaaattgtgaagcgtcactgtatacaacccttttggaattcagcactaagaacaagctgcttatcacgggaacacctttgcagaacagtgtggaagagctttgggcattacttcatttccttgatccagtcaaattcaacagcaaggatagttttgttgagagatacaaaaatttgagttccttcaacgaaactgagctcgcgaatctgcataaggaattgaggcctcatattctacggcgggttataaaagatgttgagaagtctttacctcctaaaatcgagaggattctacgtgttgagatgtcacccctccagaaacagtactacaagtggattttagagcggaattttcagaatctgaataaaggtgttcgtgggaatcagttatttcagttggcacatcttggaattgaatgcaatttggctgtctcagatcttgattggaacaatgttactattctttctcacctactattgctaggtcaagcagttcctcacctgctattgctagctcaagaagtttctcacctggccgtgcattacctatcaaactggagcatgggcaaggccacaaggcaagacttggctgttgtgagccaaatctgctctcccatgtatcacttcttaacattgttgttgaattgaagaaatgctgcaaccatccattcttgtttgaaagtgccgatcatggttatggtggagatagcatcggtgatcggaataaagttgaacgtattgttatgagtagtgggaaacttgtcttgttggacaaactattggtgagactgcgggagactaaccatcgtgtgcttatattctcacagatggttaagatgttggacatccttgcagaatacctctctcttcggggatttcagtttcagaggcttgatggtagtacaagagcagatcttcgtcatcaagccatggaacactttaatgctcctggaagtgatgatttctgttttcttttatccacacgtgccggaggacttggtattaatctagcaactgcagatacagtgataatttttgattcagattggaatccacaaaatgatttgcaggccatgagtagggcacataggattggccaacaggagacagttaatatctaccgcttcgtcacatgcaaaagtgttgaggaggatattttggaacgcgcaaagaaaaagatggttcttgatcacttggtcattcagaagctaaacgctgagggcaggcttgagaagaaagaatccaaaaaaggtggccccatatttgacaagaacgaactttcagctatcttgaggttcggtgcagaggaattgttcaaggaagacaagactgatgaagagaccaagaggaaccttgaaagtttggacattgatgaaattcttgagagagctgagaaagtcgagacaaagggtggtgaaggggaggaaggaaatgagcttcttagcgctttcaaggtcgcaaacttttccagtgtcgaagatgatgcaacgttctggagtaggttaatacagccagatcctgcagatatagttcaggaaactttggcacctcgtgctgcacgaaataaaaagagctatattgaagatcctcagcttgacaaaaataataacaggaaaagacgggcagttgaaacacaagaaaagccaaggaggctttctggcagaactgtggaaacagttaattcattaccattggttgatggagcagtagctcaagtacgagagtggtcttttggtaatgttccaaagaaggacgcttctcgttttgtacgagcggtcaaaaaatttgggaatgcaacccagattggattaattgtggatgatgttggtggtgtacttgcgaaggtaccgcatgaagcgcagatagaactatttgatttgctggttgatggttgtcaggaagcagttaaggagaatacagacattaagggcacagttttggattttttcggtgtagctgtaaaggcctatgaattgctagctcgtgttgaagagcttcagttcttggcaaagcgaattgcacgttacaaagatccaatcaagcagtaccgcatccagctaccttataaaaagcctcagtggtcagcaagctgtggatggactgaaactgatgacgctagattgatggttggaattcattggtatggctacgggaattgggagaaaataaggttggatccaaagcttggcctgacaacaaaaattgcgccagcaacacttggagaaagggagacatttttaccacgtgctcccaacttggataaccgcgctagtgctctcctgcaaaaggagtatgctaagtttagcggtaagagcttaaaagtcaaaggaaacacccgccagacagtcaataacgacagtaatagtggagttcgatcaatgaggggccggcaaaaggatgtaccagaaaaagatgataataagccgaacaaagatgacattcagaagcgtagggtaatagtggaagctgaagcaagagaagaaggtgaaatttctgaatcggaggcagagaccaggtatcgtcaggacaaagaggagaagtggcttgaatggtgctctgaagttttagatgaggagcaggaaactttgaagcgcctggataggctgcagaatacaagtgtaaacctcccaaaggaaaaggttctttcaaggattcgcaagtatctcctgataattggggacaaaattggagaagttgtccggcaacacagtgaatcttataggcaatcccgcatggtcatgaggttatggaattatgttgccaccttttcaaacatgtctggggagcaactgcatgatctctatatgaaacttagtcaagaccaactggaaggtggagttggcccatctcatggtggcaatttcacatccattcctcccaataagggaggtaactcaaatcaacttcatccttcgagaaaccaaaggccaactaggtctctccagtacaattctgagtctttccataatgagagctctggaagttctgaagcctggaagcgtcgacggagagctgacacagataatcaatttgacacccagcctttgtgtcaacctccaattatgacaaatggaaataggttgcaggaatctagtagttctgcaggtattcttggttggggtccagttgaaattagacggtatggtaatgagaggccaaaacgtgctgttcatcctagtcatttccctactgggcatggacctttgctgtagctgaaggaagtagatgatgcgaacaaccttgttcattttggcataaccgttcccagtgaatttcagcttccatatagttataaatggtggatctccgtaggaattgaaattctttttccaaaacaaaaaggaataaagagcaacctcacctggatcacagttttgaattatatgccttaaaaggtaatgccaggactctagaggcgacttatggaattgttaacagctacactgaatatccttctgacaccatcacagcaacacaaatacatggtggcttgtgaactgccaagaggatcaatcgaggaagttttgcctgttcagttttgtgatctctcaacaatgatctatagttaaatctcaatacataaattatgctttacattgtaatatattgaaatatggttccgttatgctccctccctctcgatgtgttttgtgccgtttttctaccgtgttgatgtaaaagatgaaagaaatgcatgttctcattttgaggcaacaaaaagttgcagccgggagcataatagtgaaatgcgatggaattatcggatacttatcgattccatagtgttttccctgagacaatgtactgaatgaggtacggttataagaaatggtgataattagcttagtaggtgctcagccattctacaagtcatctggtagtccgaagttgcatgaggcctactttcccctggttgccccacttatgctcagtaagtatgcttctagggttgtatgatgatggcccaattgaatttttaatcctgtgtatgaatggtgatggccaaacacttaaatgtagcactgatttaataataggtaccagttttgtcctttttcaattctgttttctgttggtgttcaaaatgtatataattttaaaaaaggta

SEQ ID NO: 210922 - DNA, 6512 bp, Zea Mays
cggagagggagaaagaggatagagagagaaggaaaaaacttatctgccgcctctctatcgcgcgcgccgccgccgcgctgccgcgccgggagcctgtctccggcgatcgccgccttccagccccgttactgaccctcctccgatccgaatcctaggcgaaaaatcgcggaaaataccgcaaaaaatcgcggaaaatcgcccggtcctttttgaataaatcgcacgggcgttgcaccccgctcccttgctcccctcccaccgccggcgacggcgatcgcgcagactaataggtgccccgcggcgagccagaaaacctgcctcgtgccggtccgagcattcgtctctgtcggggggactgagcgcccgtcgcccacccgcctcctgctcctctcgtcggccgcggcaggaggagtgacactgagactgtgagaggtattccatgtaatgccataatttgtgatggcatttttcagcaactccgggagcaaggccgattcagaagggtacaacttgaatgaaaaggccgatgatgatggcatacacgagtcaatccgggatgggaatgatggcctgaactctaggcagtggaacttaaatgagaaagcagaggatgcttaccacagcgaagcagagcaatatgagtctggccagtcaggtttgtacgcatcaaggcagcatgttcagagaggaggcagatcgtctggtggtccatggggcacaaattttctgaaggattccaggtccaaacagacggccaaggaagttgcatcaaatagcggtagaggaatggatgctgctaactcgcatgatgacatggatggtagcagagaggatgatgaactgaatagagcaaatggtgaggtgcctgctgaggaaatgctctcagatgactattacgagcaggacggagaggatcagattgaatcgttgcatcgtggcgggatgaagcagtcaagctgttccacttctggtggagcagcaaagtctggctcacgacaaatgaagaagatgtcaaagtacaatgcttatgataacgatgagtataatgatgagaatgatgatgacagcgatgcagatgaagatgatcctgctgacatggattttgagccagacggcgaaacagacaaggctactgataaggataagtttatggatagtgagaattctgacggcgacgacgatgatgaccttgaactctcagatgatgaagatgattttgttgagaatcggaggcaacctaaacgacttaagattgtagcaactaaaacttccaagggaggacagttgcccatgccagttcaaccaaaacgaggggtgtctcacagtgatgaagaatatttttcaggaaaagactcagatgttcccagcgattcggatttcaaacacataccgaaaaaacctgacaggttgcatcagaaacctgtgggccgcagtgatgttgccccaatcagttctcataatgagcttagaacttctggaaggaggaggacggtgaaaaagatctcatatgctgaaagcgaagaaagtgatgatagtgaggagaagtcaaataagcgacaaaagctcatcaaggaggaaccggaagaggaggatggagaaacaattgaaaaagttctgtggcatcaacccaagggtgtagcagaagaggcaataaggaatcaccggtcagctcaacctactgttgccagcctaacatcggactttgaccaacaatgggatgaattagagttctatataaaatggaaaggccagtcttacctgcattgtcaatggaagatactatcagagctccaaagtgttagtggattcaagaaggtaataaactacacgaaaagagtttctgaggaacagaggtacaagagggcactatcacgtgaagaggttgaggtacatgacgtgggcaaggagatggagctggatcttattaaacaatatagtcaggttgaacggatatttgctgatagggtcagcaaagctgatggagatgatctggttcccgaatatttagtaaaatggcaaggacttccttatgcagaatctacctgggaaaaagatacagatattgattttgctcaagatgcgattgatgaatataaggctcgtgaagctgcctcagctatacttgggaaaacagtagatttccaacgaaagaaaagcaaagctagtttgaggaggcttgatggtcagccagaatggctaaaagctggcaagcttcgtgattatcagctggaaggactaaactttctcgtcaatgggtggagaaacgatactaatgttatacttgctgatgaaatgggtctgggaaaaactatccaatctgtatccatgcttggcttccttcataatgctcaagaaatcaatggcccatttcttgtagtcgtgccactgtcaacattgtcgaactgggcaaaggaatttcggaagtggctgcccaacatgaatgttgttgtttatgttggcaaccgtgccagcagagagatgtgccagcagcatgaatttttttcagacaaaaaaggtgggcgtcatgtaaaattccacacgttgataactacgtacgaggtgattctcaaagacaaagcggttctttccaagataaaatggaactatcttatggttgatgaagcccaccggttgaaaaattgtgaagcgtcactgtatacaacccttttggaattcagcactaagaacaagctgcttatcacgggaacacctttgcagaacagtgtggaagagctttgggcattacttcatttccttgatccagtcaaattcaacagcaaggatagttttgttgagagatacaaaaatttgagttccttcaacgaaactgagctcgcgaatctgcataaggaattgaggcctcatattctacggcgggttataaaagatgttgagaagtctttacctcctaaaatcgagaggattctacgtgttgagatgtcacccctccagaaacagtactacaagtggattttagagcggaattttcagaatctgaataaaggtgttcgtgggaatcaggtatcacttcttaacattgttgttgaattgaagaaatgctgcaaccatccattcttgtttgaaagtgccgatcatggttatggtggagatagcatcggtgatcggaataaagttgaacgtattgttatgagtagtgggaaacttgtcttgttggacaaactattggtgagactgcgggagactaaccatcgtgtgcttatattctcacagatggttaagatgttggacatccttgcagaatacctctctcttcggggatttcagtttcagaggcttgatggtagtacaagagcagatcttcgtcatcaagccatggaacactttaatgctcctggaagtgatgatttctgttttcttttatccacacgtgccggaggacttggtattaatctagcaactgcagatacagtgataatttttgattcagattggaatccacaaaatgatttgcaggccatgagtagggcacataggattggccaacaggagacagttaatatctaccgcttcgtcacatgcaaaagtgttgaggaggatattttggaacgcgcaaagaaaaagatggttcttgatcacttggtcattcagaagctaaacgctgagggcaggcttgagaagaaagaatccaaaaaaggtggccccatatttgacaagaacgaactttcagctatcttgaggttcggtgcagaggaattgttcaaggaagacaagactgatgaagagaccaagaggaaccttgaaagtttggacattgatgaaattcttgagagagctgagaaagtcgagacaaagggtggtgaaggggaggaaggaaatgagcttcttagcgctttcaaggtcgcaaacttttccagtgtcgaagatgatgcaacgttctggagtaggttaatacagccagatcctgcagatatagttcaggaaactttggcacctcgtgctgcacgaaataaaaagagctatattgaagatcctcagcttgacaaaaataataacaggaaaagacgggcagttgaaacacaagaaaagccaaggaggctttctggcagaactgtggaaacagttaattcattaccattggttgatggagcagtagctcaagtacgagagtggtcttttggtaatgttccaaagaaggacgcttctcgttttgtacgagcggtcaaaaaatttgggaatgcaacccagattggattaattgtggatgatgttggtggtgtacttgcgaaggtaccgcatgaagcgcagatagaactatttgatttgctggttgatggttgtcaggaagcagttaaggagaatacagacattaagggcacagttttggattttttcggtgtagctgtaaaggcctatgaattgctagctcgtgttgaagagcttcagttcttggcaaagcgaattgcacgttacaaagatccaatcaagcagtaccgcatccagctaccttataaaaagcctcagtggtcagcaagctgtggatggactgaaactgatgacgctagattgatggttggaattcattggtatggctacgggaattgggagaaaataaggttggatccaaagcttggcctgacaacaaaaattgcgccagcaacacttggagaaagggagacatttttaccacgtgctcccaacttggataaccgcgctagtgctctcctgcaaaaggagtatgctaagtttagcggtaagagcttaaaagtcaaaggaaacacccgccagacagtcaataacgacagtaatagtggagttcgatcaatgaggggccggcaaaaggatgtaccagaaaaagatgataataagccgaacaaagatgacattcagaagcgtagggtaatagtggaagctgaagcaagagaagaaggtgaaatttctgaatcggaggcagagaccaggtatcgtcaggacaaagaggagaagtggcttgaatggtgctctgaagttttagatgaggagcaggaaactttgaagcgcctggataggctgcagaatacaagtgtaaacctcccaaaggaaaaggttctttcaaggattcgcaagtatctcctgataattggggacaaaattggagaagttgtccggcaacacagtgaatcttataggcaatcccgcatggtcatgaggttatggaattatgttgccaccttttcaaacatgtctggggagcaactgcatgatctctatatgaaacttagtcaagaccaactggaaggtggagttggcccatctcatggtggcaatttcacatccattcctcccaataagggaggtaactcaaatcaacttcatccttcgagaaaccaaaggccaactaggtctctccagtacaattctgagtctttccataatgagagctctggaagttctgaagcctggaagcgtcgacggagagctgacacagataatcaatttgacacccagcctttgtgtcaacctccaattatgacaaatggaaataggttgcaggaatctagtagttctgcaggtattcttggttggggtccagttgaaattagacggtatggtaatgagaggccaaaacgtgctgttcatcctagtcatttccctactgggcatggacctttgctgtagctgaaggaagtagatgatgcgaacaaccttgttcattttggcataaccgttcccagtgaatttcagcttccatatagttataaatggtggatctccgtaggaattgaaattctttttccaaaacaaaaaggaataaagagcaacctcacctggatcacagttttgaattatatgccttaaaaggtaatgccaggactctagaggcgacttatggaattgttaacagctacactgaatatccttctgacaccatcacagcaacacaaatacatggtggcttgtgaactgccaagaggatcaatcgaggaagttttgcctgttcagttttgtgatctctcaacaatgatctatagttaaatctcaatacataaattatgctttacattgtaatatattgaaatatggttccgttatgctccctccctctcgatgtgttttgtgccgtttttctaccgtgttgatgtaaaagatgaaagaaatgcatgttctcattttgaggcaacaaaaagttgcagccgggagcataatagtgaaatgcgatggaattatcggatacttatcgattccatagtgttttccctgagacaatgtactgaatgaggtacggttataagaaatggtgataattagcttagtaggtgctcagccattctacaagtcatctggtagtccgaagttgcatgaggcctactttcccctggttgccccacttatgctcagtaagtatgcttctagggttgtatgatgatggcccaattgaatttttaatcctgtgtatgaatggtgatggccaaacacttaaatgtagcactgatttaataataggtaccagttttgtcctttttcaattctgttttctgttggtgttcaaaatgtatataattttaaaaaaggta

SEQ ID NO: 210923 - DNA, 6354 bp, Zea Mays
tgagagccggagagggagaaagaggatagagagagaaggaaaaaacttatctgccgcctctctatcgcgcgcgccgccgccgcgctgccgcgccgggagcctgtctccggcgatcgccgccttccagccccgttactgaccctcctccgatccgaatcctaggcgaaaaatcgcggaaaataccgcaaaaaatcgcggaaaatcgcccggtcctttttgaataaatcgcacgggcgttgcaccccgctcccttgctcccctcccaccgccggcgacggcgatcgcgcagactaataggtgccccgcggcgagccagaaaacctgcctcgtgccggtccgagcattcgtctctgtcggggggactgagcgcccgtcgcccacccgcctcctgctcctctcgtcggccgcggcaggaggagtgacactgagactgtgagaggtattccatgtaatgccataatttgtgatggcatttttcagcaactccgggagcaaggccgattcagaagggtacaacttgaatgaaaaggccgatgatgatggcatacacgagtcaatccgggatgggaatgatggcctgaactctaggcagtggaacttaaatgagaaagcagaggatgcttaccacagcgaagcagagcaatatgagtctggccagtcaggtttgtacgcatcaaggcagcatgttcagagaggaggcagatcgtctggtggtccatggggcacaaattttctgaaggattccaggtccaaacagacggccaaggaagttgcatcaaatagcggtagaggaatggatgctgctaactcgcatgatgacatggatggtagcagagaggatgatgaactgaatagagcaaatggtgaggtgcctgctgaggaaatgctctcagatgactattacgagcaggacggagaggatcagattgaatcgttgcatcgtggcgggatgaagcagtcaagctgttccacttctggtggagcagcaaagtctggctcacgacaaatgaagaagatgtcaaagtacaatgcttatgataacgatgagtataatgatgagaatgatgatgacagcgatgcagatgaagatgatcctgctgacatggattttgagccagacggcgaaacagacaaggctactgataaggataagtttatggatagtgagaattctgacggcgacgacgatgatgaccttgaactctcagatgatgaagatgattttgttgagaatcggaggcaacctaaacgacttaagattgtagcaactaaaacttccaagggaggacagttgcccatgccagttcaaccaaaacgaggggtgtctcacagtgatgaagaatatttttcaggaaaagactcagatgttcccagcgattcggatttcaaacacataccgaaaaaacctgacaggttgcatcagaaacctgtgggccgcagtgatgttgccccaatcagttctcataatgagcttagaacttctggaaggaggaggacggtgaaaaagatctcatatgctgaaagcgaagaaagtgatgatagtgaggagaagtcaaataagcgacaaaagctcatcaaggaggaaccggaagaggaggatggagaaacaattgaaaaagttctgtggcatcaacccaagggtgtagcagaagaggcaataaggaatcaccggtcagctcaacctactgttgccagcctaacatcggactttgaccaacaatgggatgaattagagttctatataaaatggaaaggccagtcttacctgcattgtcaatggaagatactatcagagctccaaagtgttagtggattcaagaaggtaataaactacacgaaaagagtttctgaggaacagaggtacaagagggcactatcacgtgaagaggttgaggttgaacggatatttgctgatagggtcagcaaagctgatggagatgatctggttcccgaatatttagtaaaatggcaaggacttccttatgcagaatctacctgggaaaaagatacagatattgattttgctcaagatgcgattgatgaatataaggctcgtgaagctgcctcagctatacttgggaaaacagtagatttccaacgaaagaaaagcaaagctagtttgaggaggcttgatggtcagccagaatggctaaaagctggcaagcttcgtgattatcagctggaaggactaaactttctcgtcaatgggtggagaaacgatactaatgttatacttgctgatgaaatgggtctgggaaaaactatccaatctgtatccatgcttggcttccttcataatgctcaagaaatcaatggcccatttcttgtagtcgtgccactgtcaacattgtcgaactgggcaaaggaatttcggaagtggctgcccaacatgaatgttgttgtttatgttggcaaccgtgccagcagagagatgtgccagcagcatgaatttttttcagacaaaaaaggtgggcgtcatgtaaaattccacacgttgataactacgtacgaggtgattctcaaagacaaagcggttctttccaagataaaatggaactatcttatggttgatgaagcccaccggttgaaaaattgtgaagcgtcactgtatacaacccttttggaattcagcactaagaacaagctgcttatcacgggaacacctttgcagaacagtgtggaagagctttgggcattacttcatttccttgatccagtcaaattcaacagcaaggatagttttgttgagagatacaaaaatttgagttccttcaacgaaactgagctcgcgaatctgcataaggaattgaggcctcatattctacggcgggttataaaagatgttgagaagtctttacctcctaaaatcgagaggattctacgtgttgagatgtcacccctccagaaacagtactacaagtggattttagagcggaattttcagaatctgaataaaggtgttcgtgggaatcaggtatcacttcttaacattgttgttgaattgaagaaatgctgcaaccatccattcttgtttgaaagtgccgatcatggttatggtggagatagcatcggtgatcggaataaagttgaacgtattgttatgagtagtgggaaacttgtcttgttggacaaactattggtgagactgcgggagactaaccatcgtgtgcttatattctcacagatggttaagatgttggacatccttgcagaatacctctctcttcggggatttcagtttcagaggcttgatggtagtacaagagcagatcttcgtcatcaagccatggaacactttaatgctcctggaagtgatgatttctgttttcttttatccacacgtgccggaggacttggtattaatctagcaactgcagatacagtgataatttttgattcagattggaatccacaaaatgatttgcaggttcttgatcacttggtcattcagaagctaaacgctgagggcaggcttgagaagaaagaatccaaaaaaggtggccccatatttgacaagaacgaactttcagctatcttgaggttcggtgcagaggaattgttcaaggaagacaagactgatgaagagaccaagaggaaccttgaaagtttggacattgatgaaattcttgagagagctgagaaagtcgagacaaagggtggtgaaggggaggaaggaaatgagcttcttagcgctttcaaggtcgcaaacttttccagtgtcgaagatgatgcaacgttctggagtaggttaatacagccagatcctgcagatatagttcaggaaactttggcacctcgtgctgcacgaaataaaaagagctatattgaagatcctcagcttgacaaaaataataacaggaaaagacgggcagttgaaacacaagaaaagccaaggaggctttctggcagaactgtggaaacagttaattcattaccattggttgatggagcagtagctcaagtacgagagtggtcttttggtaatgttccaaagaaggacgcttctcgttttgtacgagcggtcaaaaaatttgggaatgcaacccagattggattaattgtggatgatgttggtggtgtacttgcgaaggtaccgcatgaagcgcagatagaactatttgatttgctggttgatggttgtcaggaagcagttaaggagaatacagacattaagggcacagttttggattttttcggtgtagctgtaaaggcctatgaattgctagctcgtgttgaagagcttcagttcttggcaaagcgaattgcacgttacaaagatccaatcaagcagtaccgcatccagctaccttataaaaagcctcagtggtcagcaagctgtggatggactgaaactgatgacgctagattgatggttggaattcattggtatggctacgggaattgggagaaaataaggttggatccaaagcttggcctgacaacaaaaattgcgccagcaacacttggagaaagggagacatttttaccacgtgctcccaacttggataaccgcgctagtgctctcctgcaaaaggagtatgctaagtttagcggtaagagcttaaaagtcaaaggaaacacccgccagacagtcaataacgacagtaatagtggagttcgatcaatgaggggccggcaaaaggatgtaccagaaaaagatgataataagccgaacaaagatgacattcagaagcgtagggtaatagtggaagctgaagcaagagaagaaggtgaaatttctgaatcggaggcagagaccaggtatcgtcaggacaaagaggagaagtggcttgaatggtgctctgaagttttagatgaggagcaggaaactttgaagcgcctggataggctgcagaatacaagtgtaaacctcccaaaggaaaaggttctttcaaggattcgcaagtatctcctgataattggggacaaaattggagaagttgtccggcaacacagtgaatcttataggcaatcccgcatggtcatgaggttatggaattatgttgccaccttttcaaacatgtctggggagcaactgcatgatctctatatgaaacttagtcaagaccaactggaaggtggagttggcccatctcatggtggcaatttcacatccattcctcccaataagggaggtaactcaaatcaacttcatccttcgagaaaccaaaggccaactaggtctctccagtacaattctgagtctttccataatgagagctctggaagttctgaagcctggaagcgtcgacggagagctgacacagataatcaatttgacacccagcctttgtgtcaacctccaattatgacaaatggaaataggttgcaggaatctagtagttctgcaggtattcttggttggggtccagttgaaattagacggtatggtaatgagaggccaaaacgtgctgttcatcctagtcatttccctactgggcatggacctttgctgtagctgaaggaagtagatgatgcgaacaaccttgttcattttggcataaccgttcccagtgaatttcagcttccatatagttataaatggtggatctccgtaggaattgaaattctttttccaaaacaaaaaggaataaagagcaacctcacctggatcacagttttgaattatatgccttaaaaggtaatgccaggactctagaggcgacttatggaattgttaacagctacactgaatatccttctgacaccatcacagcaacacaaatacatggtggcttgtgaactgccaagaggatcaatcgaggaagttttgcctgttcagttttgtgatctctcaacaatgatctatagttaaatctcaatacataaattatgctttacattgtaatatattgaaatatggttccgttatgctccctccctctcgatgtgttttgtgccgtttttctaccgtgttgatgtaaaagatgaaagaaatgcatgttctcattttgaggcaacaaaaagttgcagccgggagcataatagtgaaatgcgatggaattatcggatacttatcgattccatagtgttttccctgagacaatgtactgaatgaggtacggttataagaaatggtgataattagcttagtaggtgctcagccattctacaagtcatctggtagtccgaagttgcatgaggcctactttcccctggttgccccacttatgctcagtaagtatgcttctagggttgtatgatgatggcccaattgaatttttaatcctgtgtatgaatggtgatggccaaacacttaaatgtagcactgatttaataataggtaccagttttgtcctttttcaattctgttttctgttggtgttcaaaatgtatataattttaaaaaaggta

SEQ ID NO: 210924 - DNA, 2063 bp, Zea Mays
aaaccacgacatcctcaagcaagggcgagcctgaatttgttgtgctgggctagacagaccggctcatgttggcaaaatattctgggccgtatcatgttggcaaaaatatactgactccggtccgcaactccggatgtgtcggcgaccaggcaaagctccgtgtcctctcgtctcgtgtgactgacgaccaggtgggagggccataaggcctttagcgcggcggcggcaatggcgcccacggcctgcctccggacccccttcttccccgcccgtgcccgatccaccaacgccaccccgttctcgccacaccgccgcttttctctcaaatgcagcgcctccaacggtgacaactccaaccccaactccatctccatctctcccacctcgccgcctcggctaacggtgtcggacggcgtcgagtctgtggacgttaacgggttgcgtcgcccgccagcgcccgcctccgtccccgccgcccgcgatccccactggctgcctcgtccgctcacaagtgcggacgtcatggaggtggacgggaaggggctcaaggttgcttaccagggttgtgctggagcgtacagcgaagcagcagcaaagaaggcgtacccgaattgtgagactgtgccctgtgagcacttcgacactgcatttcaggctgttcaaaactgggtagctgatagggccgtactgccacttgagaattcattgggaggtagcatacataggaattatgatcttttgcttcggcatagtttgcacattgtaggagaagttcgccttgcggttcgccattgcttattagccaatcctggcgtgaagattgaaaacctgaaaagtgctatgagtcatccccaggctcttgcgcaatgtgagcacacattaacatcactaggaattgagcatagagaagctgttgacgacactgctggtgcagcaaagattgttgcagaacatatgctccaggacactggtgctattgctagttcgttggcggctaaactgtatggattggatgttcttgctgagaatattcaggatgacaaagataatgtcacccgttttatgatgctagctcgagaacccatcatacctcgcactgataaaccatttaagacaagcatagtcttttcactagaagaaggacctggacagctctttaaggcacttgctgtatttgcactgagggacatcaacctcacaaagattgaaagtcgtccacacaaggaaaggcctcttcgggtatctgatgactgttcctcactcttaaagaactttgattaccttttttatgttgaccttgaagcatcaatggctgatccaaagactcagaatgctcttggaaatctgaaggagtttgcaacatttttaagagttcttggaagctatcctacagatgtgaatgaaccttagattgaaagtactgcagattacatactggattagcaggaataggcaaaatgagtaaaaggatctactctagaccagtagggaccggtgcattcgaggctcacatttggttgtgatattgagaggaaagtctgatgttttgctggtgatttttctgatgatttaagtcttctccaatctcctatggataccaaagggttgaatattcggaaatacttcaatgtacaaggtttatatgtttcatgttggagaatctgtgtcatggtagcatgcaggttgctaaagcacagttacagtgaaataatgggacaatgtctaagaacaccgccctttttttgtgacaatataataagaactgaataactgatgtttccatgtctgggcgattgggccggcgttcctcaaaaatcatatttgctgtcattacgcgctccatgcacatacatctggcggtggtcacgttggccaagcatcgccaaactttccttctgtagaaggaagtcatttggcgcttcttatttttttctattgatggaacggattttggtgctccttgattgccttgatcagtgccaggtcaaattcggcagttcaagtttcgagcaggttagtcggtttggttcaggttcctgtgaggagcttttataagaatctgg

SEQ ID NO: 210925 - DNA, 2009 bp, Zea Mays
ctgggctagacagaccggctcatgttggcaaaatattctgggccgtatcatgttggcaaaaatatactgactccggtccgcaactccggatgtgtcggcgaccaggcaaagctccgtgtcctctcgtctcgtgtgactgacgaccaggtgggagggccataaggcctttagcgcggcggcggcaatggcgcccacggcctgcctccggacccccttcttccccgcccgtgcccgatccaccaacgccaccccgttctcgccacaccgccgcttttctctcaaatgcagcgcctccaacggtgacaactccaaccccaactccatctccatctctcccacctcgccgcctcggctaacggtgtcggacggcgtcgagtctgtggacgttaacgggttgcgtcgcccgccagcgcccgcctccgtccccgccgcccgcgatccccactggctgcctcgtccgctcacaagtgcggacgtcatggaggtggacgggaaggggctcaaggttgcttaccagggttgtgctggagcgtacagcgaagcagcagcaaagaaggcgtacccgaattgtgagactgtgccctgtgagcacttcgacactgcatttcaggctgttcaaaactgggtagctgatagggccgtactgccacttgagaattcattgggaggtagcatacataggaattatgatcttttgcttcggcatagtttgcacattgtaggagaagttcgccttgcggttcgccattgcttattagccaatcctggcgtgaagattgaaaacctgaaaagtgctatgagtcatccccaggctcttgcgcaatgtgagcacacattaacatcactaggaattgagcatagagaagctgttgacgacactgctggtgcagcaaagcattctttcctagattgttgcagaacatatgctccaggacactggtgctattgctagttcgttggcggctaaactgtatggattggatgttcttgctgagaatattcaggatgacaaagataatgtcacccgttttatgatgctagctcgagaacccatcatacctcgcactgataaaccatttaagacaagcatagtcttttcactagaagaaggacctggacagctctttaaggcacttgctgtatttgcactgagggacatcaacctcacaaagattgaaagtcgtccacacaaggaaaggcctcttcgggtatctgatgactgttcctcactcttaaagaactttgattaccttttttatgttgaccttgaagcatcaatggctgatccaaagactcagaatgctcttggaaatctgaaggagtttgcaacatttttaagagttcttggaagctatcctacagatgtgaatgaaccttagattgaaagtactgcagattacatactgagtaaaaggatctactctagaccagtagggaccggtgcattcgaggctcacatttggttgtgatattgagaggaaagtctgatgttttgctggtgatttttctgatgatttaagtcttctccaatctcctatggataccaaagggttgaatattcggaaatacttcaatgtacaaggtttatatgtttcatgttggagaatctgtgtcatggtagcatgcaggttgctaaagcacagttacagtgaaataatgggacaatgtctaagaacaccgccctttttttgtgacaatataataagaactgaataactgatgtttccatgtctgggcgattgggccggcgttcctcaaaaatcatatttgctgtcattacgcgctccatgcacatacatctggcggtggtcacgttggccaagcatcgccaaactttccttctgtagaaggaagtcatttggcgcttcttatttttttctattgatggaacggattttggtgctccttgattgccttgatcagtgccaggtcaaattcggcagttcaagtttcgagcaggttagtcggtttggttcaggttcctgtgaggagcttttataagaatctgg

SEQ ID NO: 210926 - DNA, 682 bp, Zea Mays
cgtcacggactcacgctacgcgttcgtccgacatccctaggcttcaccgctggccggattagcaggaataggcaaaatgagtaaaaggatctactctagaccagtagggaccggtgcattcgaggctcacatttggttgtgatattgagaggaaagtctgatgttttgctggtgatttttctgatgatttaagtcttctccaatctcctatggataccaaagggttgaatattcggaaatacttcaatgtacaaggtttatatgtttcatgttggagaatctgtgtcatggtagcatgcaggttgctaaagcacagttacagtgaaataatgggacaatgtctaagaacaccgccctttttttgtgacaatataataagaactgaataactgatgtttccatgtctgggcgattgggccggcgttcctcaaaaatcatatttgctgtcattacgcgctccatgcacatacatctggcggtggtcacgttggccaagcatcgccaaactttccttctgtagaaggaagtcatttggcgcttcttatttttttctattgatggaacggattttggtgctccttgattgccttgatcagtgccaggtcaaattcggcagttcaagtttcgagcaggttagtcggtttggttcaggttcctgtgaggagcttttataagaatctgg

SEQ ID NO: 210927 - DNA, 1492 bp, Zea Mays
ctcggcaggttcagccaaatcattcgcccgtggatccaggaggatccgtcacccacccgtagcatttcagcttgatggatccaagtaggcattcaatggcagccaacaactctgcaaagccgtcgtggctgggtgccagaatctcgcggcgcatgcaacggggctcgagtgccggtgcccggcgccatcgatccagcagcgcctctatataagccccgcgcgcgcccgcaggtgcagtgtcccagtgctacactcgcatgaactagcatcggccgctgctcctctctttctcctccaatcgtcggtggtctttttcgggcctgaaacatacgggagctagcagaggagagagctagcaaaggaagagatcgatcgagagaggtagtaggcaagatgagcggcaaggctctcctagttgtcgccgtcgtcctcttggtgggcgtagcctctcggtgctcgggcagcaggggcctgcatcagcagggcgatcacgttgctgaacagaagtcttgctgctggtgagctaataatcttgtgccgtacgtacgtgctgtctattattttgtccaaagtccaaacagacggtaccggcaatgggtacggaggtggcggcggcgggtacggcggtgatggggggcggcggcggcggcggcggctacacgcccgggtactctggcaccgggacctgcgactactggaagagccacccggacgcgatcgtctcgtgcgtcgggtcgctgggcagcgtcctcggctccctgggcgacgcgtgcagcgccttcttcgggggcaagctgcagacgctgcaggacgcgctgtgcaacgcccgcgccgacggctacggcgacctcctccgcgagggcgccgcggcctacctcaactccgtcgccgccgccgccgctggcaagtacgcctacaccacgcagcaggtcaaggactgcatcgccgccgcgctctcgtccgaggccgccgccgccgcgcaggccgccatgttcaacaaggccaactacgcctgccactattactagctagctagtcctcacagtttgccttcgatcgtctatctgcgtcgtctttccatgatgatgcatgacgacgcgcgcccgtctccttgtctggagcagtagtagtgatgcttgctttcttgtcgttgtttgctgatgtgagaaataagacgatgctgggtagtaatagtaatataataacggtcgttgttcttacgaaatgcaccggtggatactcgcgcttgtttctgtctcgtcagcgctactggttgttgatatgcaatcataataattgtttggctatagacaaaaaaatgggtttttcaccaattttaaaaaccaaaaaatagcgataataattatgtaagtggatctacaagttggaaaacacagtagtacataatgacaataaataattacgtgagtggatctacaagttgaagagttgagaagagaatatgtgcatgaggttgattagaacgaaatta

SEQ ID NO: 210928 - DNA, 4809 bp, Zea Mays
ctaaacattagtccctaaaaaccaaacacccccttaagcttgtaagtgtatgcattattatgcctactgagcatctccaagagtttccaaaaactaatcctgatcttgagtttttttggtaagattgaaaataactgctctcaactcccaatcttgggaaaatggattcaattcaacgtgtaggtggatgtgggaagggaataagcaggacagggttcccaatgcaaatgtaaagagagaaaggaagtacaaaagcgtgatgatgtttaccttttccaattgcatgccattgagcaattaaagcagccgggggtatctaattagagctgaccctctccccacttgaagcacatttaatcatcccttttttgtgtggttctgcctaggaaggtcatttggatatgtgtgacaaccagcgcagtgccatttacattaggatggtaaattgtgcatcaagagaagatagggcttgatttctatgattgagcaaaggtgatgctgagcccttcttttttttctttctgtcttttcaactattcttcacttcaaagttttccaaccaagaaaaaattgcttaggtgctgatgtcagaacttggcattaggggcatgttgatgttgaaattgaagttatcttactatgtcacagcagccagcagcagcatcaaagaacaataatgattttcttgctctaagatttatttcggttgtaaacgaaattcaaatctttcttccacccattcagtccaaatactttgtttttcatgtgaatttgaactgatttatttataggaatttgttagtggaatacaggaatattgcagaaatcagcgttttttttcacaggagaaatgtgggtttcaggaaaaaagcactgcattccaaaggggacctgaaattcgtgctagattcatgtacaattcttacattccaaagaggcccaaatgccagcaagctaggatcactggtctctcttggacctgtgcttcctggtgccatccttcctgctccatcaaccatcatgttgactttatgaagctgatcagatggggatgcttgggaaccatggagtgggtttgctttggcttctggttcgggttttattaggtgatatgggatctagcctgtaatcgatgtttttttatttgtttcattgtaattttatatcctccattgccctcattcctccacctagccaacagccacctgggacctccacttctctagggcctccctttctgtgtcatgacacattggcatggaggctctatagcagctgccagtgggtccatggcagcagcaaggggtgggaattgagttggggttcatttaggctatggttggtggattgggctgccagcgtggtggtctggagaacatatggggaaatctgcgttccaaacaggcccgaaactacatcctcttatctcttcccccaccatgctttttgcaaacaagtgggacatgtttcacttttttctggtgtttacatatacaaaagatttttatggtttatatcatgatgccttatgagttatggcttccttttttgttttgtactattgagtcattgagtggtagtgatgattggacttttcatttgagaacttctgcattctagcatcttctgagctggttcctggaatcttctattctgtttgttctataggttgctcttcacttgccttcctgctgtatttgaatatgggtcattgttagtgggactaataatatgccaagttagttcacttccatctcataagttcctactgaagtgctcgtcaagaacgaagaagataaaatttattctcacctggggcaatgatcaacaaccatggctgacataagcgcctttgagcaatcaaggctgctatgggaaccaaactggaatcctcttatttttgaaacctttttaattatgttctaattgaggtggttttgtccgtggatggtcatgccattcttcatgggtgataaccagggcaggtccacttatcagaacaaattgaaccggtgatcagagttgatgaggatacagtcgaatgaatgagcaaaggcgaagctgagcccccccacaccccacccaaaaaaagatcatgaaagaaaaggaaaggaaaaatgaagtccgatatgttgtttcatgttttgttgtataacatgtattcaaaaagtttcccccttttgttgcgtttgtcttaacataatgtattcgcacttgaattttgttcatttttaggccgaaacgtttcctaatttccgccgttgattctgctgagtgtttgtgttggccttggtttgcatgatggatacttttggttattgttcgtcccagaatttatcgcagtaatttcatgagatgttagatcatgtactccagttggagcagggtgagtttgaacttaggagggcattgtgttttcacaattactacctttggggccatcgcagctataatcgccattcagggtgcagcactgatccattttggtagttcctatacaatttgtgttttctgatcttttgtttcttgtcttttaaccttcctttcttgtttgacactgttctttagtgtctgatgatcagactcaccaaccctatagagctatcacggtgcaacatcctgaattgttagctttgttattttgctcaaattgctggcaaactaggatgggtttgaccaacaagtaaccagtttgcaacgaattgttgccgttgctgctgctgtggtggtgtagtatgttatatatattcgaccgaatgttcccaagttcatttagaggggtgggagtacatggtgcttctacaaatattgtgtcgatactggggcagccagccttggcattaatggtcacaaatcctaattgtgtgccctgaccttgatgaatcttggttgattaaacaaatagagagacatacgaaattactatcatgagtgtggctgtacttttttggtcatttgtgtgaaaacctgtccatgtgtgcgcagttcacatgggaacgagctatttcttatcatgaggaacatagcctgcatgtttaggtcatggctcataagttactgcaaaggctaagattagttaggagtcaatactatactttattgggggatataatcattcaatcagtgaaacagcacaaggtcaacttattagaacttcgccctctgatctctgctgcatgttgctcctcccactgattgaaccacacgagctctcatgaagttgtcgccttgcatccttcttaggtaaccatcaccacccttctcaggtaaccatcccagatagtgttcctctcgtttgctaactgatctgtgctgctgagttttgcctccatgatatgtgctatctatctagctaagaagttctagaaggaacagcctagttcggcagtttacgagtttctgatgaatctggtggcctggacagtcgtttttatgaaataccttccataaatggtctgtacatcactgtcggtgtctttggggaactaaatcgtagctggattaaagattcattcacggcaatcatttgtactgctatagcgcattcttgtatgaaactaaaggcctgtagcagtaatagtgtttcctgttattggagttttttttcctgcgcatatcgatctgagccttacaaattgttaccagccaactatctaatcaatgcctcagccatgaaagagtaaatttacaagcttatttgtagatgatgcttttcattttgcagcagtgtgtagtccatggttattttggggaaagttctcacgatctaaatctctggcagctggtgatcgatctgtcagtttcggaattggagagctaatgcgtagacatccatgaggttacagtgtcttatcaatcagaggttggggccatcacctggtcatggacattcctctgagatttatggccctggagatggagtaggtggatgccatctatcttgctgttcttatggtggacaccgtggtaaatatcatgcttgccacaaccattcatcggaatgggccaggcacaacatttcacctgaacctggtcctatcagatcttactggataacgaaaaggacttcctccgatcatgtttctcattgtgcaaaaggatctgacagacagatacgcccagcaggaggttataggaagaattattctgctaaccaggggagtggcagtcagaacagaccgtatcatgatgatagctatctaccaactaaattcctggatgaccattttcctgagatagatgctgcaaaacatcagtcttacttatgcgattttcaatcttcaaattttcatgattgctttgatagcagtcagaaattcagaaatgcttataatgacaaggtagtaaaaaggaaatttataaaacaagatttccttggaaacacttacaatggtgcttgtgttggtaaatatgatagaaacagttgcaggaaaaggaatgcatatcattttggtggagagaaaaccaggaagaatgacacaaataaggacaggtctaaaaggcttcgctgcccccttgagcaggaccaacggcaacaggttgagtgcaacgagatgagaaatgatagtcgggagggaaatgttgaaatgaccaggttagtgtgtcaagatggagcaaaacggaacttcaaccaaaagaagaatgctacagctcctgcttctagtgactcaacaaagtgtgatgggaaaaatatattaagtcccaagtgcagcaaaactattgcttcatcacacacaccaaatttgagcgaaggaagtaatgacatggatccaaaatctgacaactacgttgatggttgcactgaaagag

SEQ ID NO: 210929 - DNA, 1587 bp, Zea Mays
ctgatgcgcttgagtgacattaaagagtgatgttgatggcactaccctggcttgtattgcattttcctgcccaagtttaagaactctcgagattaccatggctgctgatgctgtcaacaggatgactggggaggatctaagtcgttttgtttcggagaagtcttctctctcagccctcaaaattggtggttgctctaatttggatattcttaatctgtgctcttcaagcctttcaattctttggttgtcagatctttgttccctttcgaaatcggttatgaactgtcctaatatgagcgagctatcactgtgcttcacagaacatagtagtgattgtaccaatctgattactttgatggatggcctaggtcgtacatgtcctaacttggaaaaaatgcacatatcatcaaaacaattatctaatgaagctgtatgtgctctagagaatgctaatctcaggggactgttcatgctatccctgattctaggttcaaaaataactgatgcagctgttgcatctattgttcggtcatgtgcaagcttggagttacttgatttaagtggatctagcattagtgacaatggtgttgggatgatatgtaaagcataccctcgtactttatcaaggctgctccttgctctttgcccaaatgtgaccacacgtgggatccagctagccacagcacagttgccatgtcttcaactcatggactgtggaatgagcctatgtgctaatgtgaagaatgaaaaagagggtccatattttggtgaaatcaatggaggtattagaattattcgaaaactgtccatcttaaagaggcaacctattcaccaaaagcttattataaagcatgggaatttgaagaagctcagcctgtggggctgttctgcattagatgctctatatctaaattgtccagagttaaatgatctcaatcttaactcttgcacaaatctacatccagaacgtctgcttcttcagtgcccaaatttaaagaatgtctatgcatccggatgccaagatatgttgattggagcaatcagaaatcagttgaaccatctcttccatgcaagcggctagcggatggctccaaacgggttcaactccctcagttcctaaagcagcagccgtcgaaggacaacaaattaattgaattgagccagacccagtgcactgtgcatcttggttcataataacaccaccagagccagttaacggagcattgtacacaccgaattatgtgaatcatgcaccacataacattatcaattcgttgtatacttctgtattgcatcagaacctgtagtgattgttgtataagctgctaattgctgcatggacatgtctgaatccatcatggatttcttgcgaccgttagtctgttctaggaaacattatataggaataattcgtaaccatgacccgtattctctagggaaaaaaaataatgatcctaggtcactcattttggttggtgttattctgttattcttccgcatgagctatctatggactttggttcttcaatctctacttttaaataggccccgtttggatcatttgaagatcatttgaatcgaattcca

SEQ ID NO: 210930 - DNA, 5850 bp, Zea Mays
ctttgatgtcatctatagaagaccgctctttgttgaggactaccagatttgcgagaagaagggtcattcgatgcgttgtagcaagtccaggttgtcctaataggaaatctaggacagcgtctcccaacgtaaaagtagctgcttatagcaactatgcgccaagactcctcgttgagtcaagctccaagaagagcgaacaccatgatagcagcagacaccgtgaagaaactattgatacatacaatgggctgtcaggttctgatgcagcagaattgacaagtaatagagatgtagaaattgaagtggatttgcagcacatttctgaggaggaattgccaggaaaagtatcgattaatgcatcattaggagaaatggaaacagtggatgaagctgaggtcgaggaggataagtttgaggtagatacctcaggaattgtattgcgcaatgttgcagttcgggaagtggatccaaaggatgaacataatgctaaagatgtatttgtggtagattcgtcaggaactgcaccagataatgctgcagtggaggaagtggtagatgaagctgaggttgaagaggatatggttgatgtggatatcttgggacttgacttgaataatgcaacgatcgaggaaattgatttgatggaagaggctttactggagaacttcgacgtggattcaccaggcaatgcttctagtggtcgaacctatgggggtgtggatgagttgggtgagctgccttcaacatccgtggattgcatcgccattaacggaaaacgtagaagtttgaagcctaagcccttgccaattgtcaggttccaggaacaagaacagatagttttaagcattgttgacgaagaagggttgattgctagttcatgtgaagaaggccaaccggtggtagattacgataagcaagaggaaaactctaccgctttcgatgaacagaagcaattaactgatgatttccctgaagaaggcatatctatagttcacttccctgagccaaacaatgatattgttggatcctcaaaattcttggagcaaaaacaagaattggatggttcttataaacaagatcgatcaaccactggattgcatgaacaagatcagtctgttgttagttcacacggacaagataaatcaattgttggtgtgcctcagcaaatccagtacaatgatcaatctattgctggttctcatagacaagatcaatcaattgccggtgcacctgagcaaatccaatccgttgctggctatataaaaccaaatcaatctattgttggttcttgtaaacaacatgaattgattattcctgagcctaagaaaatcgaatccatcatcagttacaatgaaatagatcaatctattgttggttctcacaaacaagacaaatctgttgttagtgtgcctgagcaaatccaatccattgttagtcacagcaaaccaaatcaatctactgttgattcttatagacaagctgaatcaattattggtgtgcctgagaaagtccaatccatcaccagttacgataaactagaccagtccattgttggttctcttaaacaagatgagcctattattagcgtgcctgagaaaatccaatccattgtccattacactaaaccaaatcagtctattgttggcttgcccaaacaacaacaatcaattgttcatatcgttgaaccaaaacagtccatagatggtttccctaaacaagatctatcaatcgttggtatctccaatgagtttcaaacaaagcaactggctactgttgggactcatgatggattgcttatgaagggtgtggaagctaaggagacatctcaaaagactgaaggggatacacttcaggcaacgttcaatgtcgacaacttgtcacagaaacaggaaggcttaactaaagaagcagacgagataacaattattgagaaaatcaatgatgaagaccttgtgatgattgaagaacagaaaagcatagccatgaatgaagaacagacgattgttaccgaagaagacattccaatggctaaggttgagataggaattgacaaggccaaatttttacatctgctttctgaagaagagagttcatgggatgaaaatgaagtgggaataattgaggctgatgaacagtatgaagtcgatgagacatctatgtccactgaacaagatatccaggaatcacctaatgatgatttggatccacaagcactatggagtatgcttcaagagcttgctgaaaaaaattattcgctgggaaacaagttgtttacttatccagatgtattgaaagctgattcaacaattgatctctatttcaatcgtgatctatcagctgtggccaatgagcctgatgtacttatcaaaggagcattcaatgggtggaagtggagatttttcactgaaaaattgcacaagagcgagctggcaggggactggtggtgctgcaaactatacattcctaagcaggcatacagaatggactttgtgttttttaacggacacacggtatatgaaaataataacaataatgatttcgtgatacaaatagaaagcaccatggatgaaaatttatttgaggatttcttggctgaagaaaagcaacgagaacttgagaaccttgcaaatgaggaagctgaaaggaggagacaaactgatgagcagcggcgaatggaggaagaaagggccgcagataaagctgacagggtacaagccaaggttgaggtagagacgaagaagaataaattgtgcaatgtattgggtttagccagagctcctgttgataatttatggtacattgagcccatcacgactggacaagaggctactgtcagattgtattataacataaactcaagacctctagttcacagtactgagatatggatgcatggtggctataacaattggattgatggactctcttttgctgaaaggcttgttcatcatcatgacaaagattgtgattggtggtttgtagatgttgtcgtgcctgaaagaacatatgtattggactgggtttttgctgacggcccaccagggagtgcaaggaattatgacaacaatggaggacatgattttcatgctacccttccaaataacatgactgaggaagagtattggatggaagaagaacaaaggatctatacaaggcttcaacaagagaggagggaaagggaggaggctattaaaaggaaggctgagagaaatgcaaaaatgaaagctgagatgaaggaaaagactatgagaatgttcctggtttctcagaaacacattgtttacaccgaaccacttgaaatacatgctggaactactattgatgtgctttataatccttctaatacagttctaactggaaagccagaggtttggtttcgatgttcatttaatcgttggatgtatccaggtggggtgttgccacctcagaagatggtacaagcagaaaatggttcacacctaaaagtaacagtttacgttccacgagatgcctatatgatggactttgttttctcggagtcagaagaaggtggaatttatgataacagaaatgggttagactatcatattcctgtttttgggtcaattgcaaaggaaccacctatgcacattgtccacatcgctgttgagatggcaccaatcgcaaaggttggaggtcttggtgatgttgtcactagtctttcacgtgctgtgcaagatttaggacacaatgtggaggttattcttccaaagtacggttgcttgaatctaagcaatgtcaagaatctacacatccatcagagtttttcttggggtggttctgaaataaaagtgtggcgtggactagtcgaaggcctttgtgtttacttcctggaacctcaaaatgggatgtttggagtcggatatgtatatggcagggacgatgaccgccgatttggcttcttctgtcgttctgctctagagtttctcctccaaagtggatcttctcctaacataatacattgccatgattggtcaagtgctcctgttgcctggctacacaaggaaaactacgcgaagtctagcttggcaaatgcacgggtggtattcaccatccacaatcttgaatttggagcgcatcatattggcaaagcaatgagatattgtgataaagccacaactgtctctaatacatattcaaaggaagtgtcaggtcatggtgccatcgttcctcatcttgggaaattctatggcattctgaatggaattgatccagatatatgggatccgtacaatgacaactttatcccggtccactacacttgtgagaatgtggttgaaggcaagagggctgctaagagggcactgcagcagaagtttgggttacagcaaatcgatgtccccgtcgtaggaatcgtcactcgcctgacagcccaaaaggggatccacctgatcaagcatgcgattcaccgtacactcgaacggaacggacaggtggttttgcttggttcagcgccggactctcgaatccaagctgattttgtcaacctggcgaataagctccacggcgtaaaccatgggcaagtgaggctttccttgacctacgacgagcctctctcgcatctgatatacgctggctctgacttcattctggtcccatctatatttgagccttgcggcctaactcagctcgtcgccatgcggtatgggaccatcccgattgtccgcaagactggagggctgatctctcgtgctgctgctcgtcagggctcttcgacactgtcttcgatgtggacaatgacaaggaacgagcccgagatcgaggccttgagcccaacgggtttagctttgacggagctgatagcaacggtgttgactacgcgctgaacagggcgatctcagcttggttcgatgcccggagctggttccactccctttgcaagagagtcatggagcaggactggtcgtggaaccgacctgccctcgactacatcgagctctaccgttcagcgtccaaattgtaataatccaaccaacggccaatgtagtgtgttgtctgcaggtctcagatgcagccattcagcttttgcaggttcctgggcattgctgtacagcctccttgtctttagttagctccattccccgaggagcacagtgcaattttttatcctcagttattatgcatagattgtctcagtagaatgctttcttcgggcatgtatgtttgtttcctctgttgttgaattctggtgttaagtcgtgtataggaatctacaggaaatgaaaaagtccatttcctgcttcaaccttttagggctaccatgcacatgagacctttcaaatgcaaagaatattaggactagactactagtctgtgaactctatttttttccaaggatttctattttttcaaggaaaaataaactaatttttcttcggaaaatggaaatctttttaaaaaatggggttcccaaactagcccgtagagtatagatctagaattggtctagtggtttctcaagaaaaaaaaacatacgccttttcttgtcatatgcttatttaagtttattttgtacaaactttgagatccttcaaaaacaccccaatggctggtgtagtgaccagtgaaataaagaggatcaatggggaggaatcccccacctctctcccgcagatgtcacccagcaccggccaacctcacctgtccagtgaaattaaggttggttgcgacgacagcccatcaatggaaaccaacctcgccccgtgtcgggatctaccttcctcaccaccacgccgatctcaccttccataggagctacctaggcactgttacctattataggtacatgacattgtacatctttgtatgaacttacatcaatgccaaaaatcc

SEQ ID NO: 210931 - DNA, 546 bp, Zea Mays
gaacatatccgtcaagcgccgtcaagcgcagcgtacgtgaagcagcacgcgtggggcaagcgaaggcggtggcggcgacgcgagattctcctctccggcgtcaatctcttccggcggccaccttctccccgattatccctgcaccagttcgagttggagaagacgaacttccaccgtcttgggaccctataccctctcctttagaattgcattggcgcaattgatggcactcatgtgcctatatcgatatcaccagataaagccgctccatttaggaataggaagggaacccttactcaaaatgtaatggtagcgtgtgattttgatctcaatgtaactttcatatccactaggtgggaggggtccgcgacggatgctagagttctcagagctgcaatgaacagtggctttcaagtgcccccggggaagttttatttagtagatggcggttatgccaacacaccatctttccttgccccatatcgcggagtcaggtatcatttgaaggagtatggggcaggtcgccgaagaccacaaaactacaag

SEQ ID NO: 210932 - DNA, 2876 bp, Zea Mays
gaaacaaaagtatgttctgtctgccaggtaggtcccgccggaacggatcccctgcttcttctaccgaaatcgttgcttccgacgcaccagggccgcgcgccgccggcgaccttgccgtggcccttctacaaaaccgacccgcgccggagctccgccgtcggatgtggcggagacggcgtcaatggcgtcctcctctgctgccgagtccagctcccgcctctctgatcgagcgaggaggtcggcgctgggactcagattcatggtgctcctgatgcacgtgctgttcgttggcgctgtcttcatcctcgatccgaccctcgactggcgaatccacggggagccgtggtatatagggttgtatggagtgcttgttctgctcacgctagtgcaatacttctatacagctggctcatgtccagggtatgttattgatgtaatgagagctggttccatgatgcatgcaaccttcgtcaacactgctgctctttcaaatcaaattcaagaaatggaaacataaattctccgacgagtcgtgctcaactacagaaacttagcacgatgactcctacatcttcatgggcacagatggttatggatctttatcctccagggtcaagcagcagggattggacttgcacttactgcaggattgttcaggtattcttgtatcctcacgcgctaaatgttctctaagttttacaagtaagtaggaattaatatagttttgttatacaaaaattgagttggttgcatgagttattaactttgagttatgcaccaccaatttgtttgactaaaatttaagaataatatacattcaatacatccttcaaaatttaccaagtctgttaaaaaaactatgtaaaagtctgaaatgaatttgtggtatgtttgattatatttgtcagtgtagttaaagttactagaagatttgctcttcacatccttgattggctagtggtttatttaccagtttgtgacattcaaagattcgtttctgatcatgaaggttatttgtgcattaagaatcttctaaaacttaatacattgattggttgatgagtaactgattcgcaatgcagcgggcacaggacctctctcttagaaaagtaaacttatgctatcttatttgctcagaattgttcctccaaaatctcatggtttcatgctaatttcatctattatgtctttagaaagtttcccataccttgttgcttctgatagtcagagttaaagttttgctaccaacatctttttgcagccacctcgcacccgacactgccatgactgtgataaatgtgtccttcaatttgatcatcactgtatatggcttggaacatgcattggcaaaaggaaccattgtcgttttttgtgagcttttaatgtgttttcacctatatgttccattcacttgcacgtcagttgtggtgtgatgtgttataaactcactgtttgcgtacacagccgtttaacccacgtacacagcggttatttgtgtaaatgctacagtggcttattgtgtccatttaatcagccatttataccgtttagcccaattaaatagccaaaaaggttgtgactgtttagtcatttaaatgtttaggctaacactgtataaactaccatacttgttgcggaaacactatagttatttctttgattcggacactgataaactttctttggagtatctatagatgttttccagagttgtagttttgtgactgaaagtacatattgatcagaccaatgttatcgagtatttacattgtgcaccattaaacagatagaacataaatgccactgagtatttcagaaccaacacccctcctcttgtaatataatgatttaccttatttattgacataacataactactgcttctactactttattgtgaattgtgattacacattgagacttccatgttgtctctcgccatgctgtacgattgcagtatgatactattgttttaatctcttggttcttatggttgtataaccgcctttactaggtggtacatatttgaagaaacaatcttgtgtatctggactgctgctctctgcatcgagtcattgtgtttagatgtggacaaggcctggtggaaggactttgttggtgttatcctgttggcagcgcttatccttatcctgatattcctactactattgtggttatttcattcgtacattgctctaacaaatcaaacaacctacgaaattgccagaaggaagcgaatattctacctaaggggagtccctgaaagagttcttccattcagcaaaggcatatgcagaaatctctacgatttctgctgttctagccagaagggatatattctggaagctgtgcccccaagtgaagagctggaagctagagctgcccgttacacgtgccgagatgtcatttgctgtcgttgctgctgataggttgtaccatagcattctgcccgtatagcccagttgcgctgttctctgttcaaggttaagttaatggaagcaaattttagtgacctgcgaccgttagatgcccccagagttcattatttgtgcatagtcatttgtacatttcactcagaaaaatgtgcgctctgagatccagttgttcacattctgtatggctttgaattcaaataggttttcaggacagagaactgatctgtacttcagttttttagtcgaaatgtgtgttggtaatttattttaagattttcttatatttattcctagccatatattttatatttatttatcttgagggcttgtgttgtaacacccactttgtaattgctaggaataataccagtagaggaacaatttctctttatgagagttggatctttatgcatcatcttatgtgaacatcatgcccaaaac

SEQ ID NO: 210933 - DNA, 1523 bp, Zea Mays
gaaacaaaagtatgttctgtctgccaggtaggtcccgccggaacggatcccctgcttcttctaccgaaatcgttgcttccgacgcaccagggccgcgcgccgccggcgaccttgccgtggcccttctacaaaaccgacccgcgccggagctccgccgtcggatgtggcggagacggcgtcaatggcgtcctcctctgctgccgagtccagctcccgcctctctgatcgagcgaggaggtcggcgctgggactcagattcatggtgctcctgatgcacgtgctgttcgttggcgctgtcttcatcctcgatccgaccctcgactggcgaatccacggggagccgtggtatatagggttgtatggagtgcttgttctgctcacgctagtgcaatacttctatacagctggctcatgtccagggtatgttattgatgtaatgagagctggttccatgatgcatgcaaccttcgtcaacactgctgctctttcaaagcagtcaaattcaagaaatggaaacataaattctccgacgagtcgtgctcaactacagaaacttagcacgatgactcctacatcttcatgggcacagatggttatggatctttatcctccagggtcaagcagcagggattggacttgcacttactgcaggattgttcaggtggtacatatttgaagaaacaatcttgtgtatctggactgctgctctctgcatcgagtcattgtgtttagatgtggacaaggcctggtggaaggactttgttggtgttatcctgttggcagcgcttatccttatcctgatattcctactactattgtggttatttcattcgtacattgctctaacaaatcaaacaacctacgaaattgccagaaggaagcgaatattctacctaaggggagtccctgaaagagttcttccattcagcaaaggcatatgcagaaatctctacgatttctgctgttctagccagaagggatatattctggaagctgtgcccccaagtgaagagctggaagctagagctgcccgttacacgtgccgagatgtcatttgctgtcgttgctgctgataggttgtaccatagcattctgcccgtatagcccagttgcgctgttctctgttcaaggttaagttaatggaagcaaattttagtgacctgcgaccgttagatgcccccagagttcattatttgtgcatagtcatttgtacatttcactcagaaaaatgtgcgctctgagatccagttgttcacattctgtatggctttgaattcaaataggttttcaggacagagaactgatctgtacttcagttttttagtcgaaatgtgtgttggtaatttattttaagattttcttatatttattcctagccatatattttatatttatttatcttgagggcttgtgttgtaacacccactttgtaattgctaggaataataccagtagaggaacaatttctctttatgagagttggatctttatgcatcatcttatgtgaacatcatgcccaaaac

SEQ ID NO: 210934 - DNA, 1519 bp, Zea Mays
gaaacaaaagtatgttctgtctgccaggtaggtcccgccggaacggatcccctgcttcttctaccgaaatcgttgcttccgacgcaccagggccgcgcgccgccggcgaccttgccgtggcccttctacaaaaccgacccgcgccggagctccgccgtcggatgtggcggagacggcgtcaatggcgtcctcctctgctgccgagtccagctcccgcctctctgatcgagcgaggaggtcggcgctgggactcagattcatggtgctcctgatgcacgtgctgttcgttggcgctgtcttcatcctcgatccgaccctcgactggcgaatccacggggagccgtggtatatagggttgtatggagtgcttgttctgctcacgctagtgcaatacttctatacagctggctcatgtccagggtatgttattgatgtaatgagagctggttccatgatgcatgcaaccttcgtcaacactgctgctctttcaaatcaaattcaagaaatggaaacataaattctccgacgagtcgtgctcaactacagaaacttagcacgatgactcctacatcttcatgggcacagatggttatggatctttatcctccagggtcaagcagcagggattggacttgcacttactgcaggattgttcaggtggtacatatttgaagaaacaatcttgtgtatctggactgctgctctctgcatcgagtcattgtgtttagatgtggacaaggcctggtggaaggactttgttggtgttatcctgttggcagcgcttatccttatcctgatattcctactactattgtggttatttcattcgtacattgctctaacaaatcaaacaacctacgaaattgccagaaggaagcgaatattctacctaaggggagtccctgaaagagttcttccattcagcaaaggcatatgcagaaatctctacgatttctgctgttctagccagaagggatatattctggaagctgtgcccccaagtgaagagctggaagctagagctgcccgttacacgtgccgagatgtcatttgctgtcgttgctgctgataggttgtaccatagcattctgcccgtatagcccagttgcgctgttctctgttcaaggttaagttaatggaagcaaattttagtgacctgcgaccgttagatgcccccagagttcattatttgtgcatagtcatttgtacatttcactcagaaaaatgtgcgctctgagatccagttgttcacattctgtatggctttgaattcaaataggttttcaggacagagaactgatctgtacttcagttttttagtcgaaatgtgtgttggtaatttattttaagattttcttatatttattcctagccatatattttatatttatttatcttgagggcttgtgttgtaacacccactttgtaattgctaggaataataccagtagaggaacaatttctctttatgagagttggatctttatgcatcatcttatgtgaacatcatgcccaaaac

SEQ ID NO: 210935 - DNA, 2880 bp, Zea Mays
gaaacaaaagtatgttctgtctgccaggtaggtcccgccggaacggatcccctgcttcttctaccgaaatcgttgcttccgacgcaccagggccgcgcgccgccggcgaccttgccgtggcccttctacaaaaccgacccgcgccggagctccgccgtcggatgtggcggagacggcgtcaatggcgtcctcctctgctgccgagtccagctcccgcctctctgatcgagcgaggaggtcggcgctgggactcagattcatggtgctcctgatgcacgtgctgttcgttggcgctgtcttcatcctcgatccgaccctcgactggcgaatccacggggagccgtggtatatagggttgtatggagtgcttgttctgctcacgctagtgcaatacttctatacagctggctcatgtccagggtatgttattgatgtaatgagagctggttccatgatgcatgcaaccttcgtcaacactgctgctctttcaaagcagtcaaattcaagaaatggaaacataaattctccgacgagtcgtgctcaactacagaaacttagcacgatgactcctacatcttcatgggcacagatggttatggatctttatcctccagggtcaagcagcagggattggacttgcacttactgcaggattgttcaggtattcttgtatcctcacgcgctaaatgttctctaagttttacaagtaagtaggaattaatatagttttgttatacaaaaattgagttggttgcatgagttattaactttgagttatgcaccaccaatttgtttgactaaaatttaagaataatatacattcaatacatccttcaaaatttaccaagtctgttaaaaaaactatgtaaaagtctgaaatgaatttgtggtatgtttgattatatttgtcagtgtagttaaagttactagaagatttgctcttcacatccttgattggctagtggtttatttaccagtttgtgacattcaaagattcgtttctgatcatgaaggttatttgtgcattaagaatcttctaaaacttaatacattgattggttgatgagtaactgattcgcaatgcagcgggcacaggacctctctcttagaaaagtaaacttatgctatcttatttgctcagaattgttcctccaaaatctcatggtttcatgctaatttcatctattatgtctttagaaagtttcccataccttgttgcttctgatagtcagagttaaagttttgctaccaacatctttttgcagccacctcgcacccgacactgccatgactgtgataaatgtgtccttcaatttgatcatcactgtatatggcttggaacatgcattggcaaaaggaaccattgtcgttttttgtgagcttttaatgtgttttcacctatatgttccattcacttgcacgtcagttgtggtgtgatgtgttataaactcactgtttgcgtacacagccgtttaacccacgtacacagcggttatttgtgtaaatgctacagtggcttattgtgtccatttaatcagccatttataccgtttagcccaattaaatagccaaaaaggttgtgactgtttagtcatttaaatgtttaggctaacactgtataaactaccatacttgttgcggaaacactatagttatttctttgattcggacactgataaactttctttggagtatctatagatgttttccagagttgtagttttgtgactgaaagtacatattgatcagaccaatgttatcgagtatttacattgtgcaccattaaacagatagaacataaatgccactgagtatttcagaaccaacacccctcctcttgtaatataatgatttaccttatttattgacataacataactactgcttctactactttattgtgaattgtgattacacattgagacttccatgttgtctctcgccatgctgtacgattgcagtatgatactattgttttaatctcttggttcttatggttgtataaccgcctttactaggtggtacatatttgaagaaacaatcttgtgtatctggactgctgctctctgcatcgagtcattgtgtttagatgtggacaaggcctggtggaaggactttgttggtgttatcctgttggcagcgcttatccttatcctgatattcctactactattgtggttatttcattcgtacattgctctaacaaatcaaacaacctacgaaattgccagaaggaagcgaatattctacctaaggggagtccctgaaagagttcttccattcagcaaaggcatatgcagaaatctctacgatttctgctgttctagccagaagggatatattctggaagctgtgcccccaagtgaagagctggaagctagagctgcccgttacacgtgccgagatgtcatttgctgtcgttgctgctgataggttgtaccatagcattctgcccgtatagcccagttgcgctgttctctgttcaaggttaagttaatggaagcaaattttagtgacctgcgaccgttagatgcccccagagttcattatttgtgcatagtcatttgtacatttcactcagaaaaatgtgcgctctgagatccagttgttcacattctgtatggctttgaattcaaataggttttcaggacagagaactgatctgtacttcagttttttagtcgaaatgtgtgttggtaatttattttaagattttcttatatttattcctagccatatattttatatttatttatcttgagggcttgtgttgtaacacccactttgtaattgctaggaataataccagtagaggaacaatttctctttatgagagttggatctttatgcatcatcttatgtgaacatcatgcccaaaac

SEQ ID NO: 210936 - DNA, 2272 bp, Zea Mays
gaaacaaaagtatgttctgtctgccaggtaggtcccgccggaacggatcccctgcttcttctaccgaaatcgttgcttccgacgcaccagggccgcgcgccgccggcgaccttgccgtggcccttctacaaaaccgacccgcgccggagctccgccgtcggatgtggcggagacggcgtcaatggcgtcctcctctgctgccgagtccagctcccgcctctctgatcgagcgaggaggtcggcgctgggactcagattcatggtgctcctgatgcacgtgctgttcgttggcgctgtcttcatcctcgatccgaccctcgactggcgaatccacggggagccgtggtatatagggttgtatggagtgcttgttctgctcacgctagtgcaatacttctatacagctggctcatgtccagggtatgttattgatgtaatgagagctggttccatgatgcatgcaaccttcgtcaacactgctgctctttcaaatcaaattcaagaaatggaaacataaattctccgacgagtcgtgctcaactacagaaacttagcacgatgactcctacatcttcatgggcacagatggttatggatctttatcctccagggtcaagcagcagggattggacttgcacttactgcaggattgttcagccacctcgcacccgacactgccatgactgtgataaatgtgtccttcaatttgatcatcactgtatatggcttggaacatgcattggcaaaaggaaccattgtcgttttttgtgagcttttaatgtgttttcacctatatgttccattcacttgcacgtcagttgtggtgtgatgtgttataaactcactgtttgcgtacacagccgtttaacccacgtacacagcggttatttgtgtaaatgctacagtggcttattgtgtccatttaatcagccatttataccgtttagcccaattaaatagccaaaaaggttgtgactgtttagtcatttaaatgtttaggctaacactgtataaactaccatacttgttgcggaaacactatagttatttctttgattcggacactgataaactttctttggagtatctatagatgttttccagagttgtagttttgtgactgaaagtacatattgatcagaccaatgttatcgagtatttacattgtgcaccattaaacagatagaacataaatgccactgagtatttcagaaccaacacccctcctcttgtaatataatgatttaccttatttattgacataacataactactgcttctactactttattgtgaattgtgattacacattgagacttccatgttgtctctcgccatgctgtacgattgcagtatgatactattgttttaatctcttggttcttatggttgtataaccgcctttactaggtggtacatatttgaagaaacaatcttgtgtatctggactgctgctctctgcatcgagtcattgtgtttagatgtggacaaggcctggtggaaggactttgttggtgttatcctgttggcagcgcttatccttatcctgatattcctactactattgtggttatttcattcgtacattgctctaacaaatcaaacaacctacgaaattgccagaaggaagcgaatattctacctaaggggagtccctgaaagagttcttccattcagcaaaggcatatgcagaaatctctacgatttctgctgttctagccagaagggatatattctggaagctgtgcccccaagtgaagagctggaagctagagctgcccgttacacgtgccgagatgtcatttgctgtcgttgctgctgataggttgtaccatagcattctgcccgtatagcccagttgcgctgttctctgttcaaggttaagttaatggaagcaaattttagtgacctgcgaccgttagatgcccccagagttcattatttgtgcatagtcatttgtacatttcactcagaaaaatgtgcgctctgagatccagttgttcacattctgtatggctttgaattcaaataggttttcaggacagagaactgatctgtacttcagttttttagtcgaaatgtgtgttggtaatttattttaagattttcttatatttattcctagccatatattttatatttatttatcttgagggcttgtgttgtaacacccactttgtaattgctaggaataataccagtagaggaacaatttctctttatgagagttggatctttatgcatcatcttatgtgaacatcatgcccaaaac

SEQ ID NO: 210937 - DNA, 757 bp, Zea Mays
cgagaatggtaagcacgcgcggcttcatggacggacagataaggaagacgaggcgtcggttctgattccattccatggcttctcctcttgcatgcttattaaatgcaggttgcctgtcgttcttgtgcccgtgtatcccgttcggacaggtggcagaggtcttggacaagggcatgacatcctgtggtctggccggcctcctctactgtttgctgctgcatgccggggtggctgtggtcccgtgccactgcatctacacctgcacctaccgtcgcaagctccgggcggcgtacgacctgccgccggagccgtgcgccgattgctgcgtccacatgtggtgcgggccatgcgccatctcccagatgtaccgggagctcaagaacagaggcgccgacccggccatgggatgggaagtgctctcgaaaaagacgactatggctcctgtaccaatgcaagacatgacgcgctgacgacagcaactcgatctcctagcaaaccaggattacgtgttgcatatatgcacagtttgtgtgttatgtggctatgtcagcaagtaaatggatcggagtctatgagtggataaaattaagtggatgtgttcgcgtcttagtaataagtgaataaaatttcataagtgttactaaaataggtaaatagggtacatgtatgtttggatcccattatgaactatttgtaataatagctatatatacaaaagttgtggaattagcttgtagtaaaagaaaaataagtgata

SEQ ID NO: 210938 - DNA, 4759 bp, Zea Mays
gtgttgtgttgtgttgtgttgcgtgctgtggagggggaggaggagatggggaagggggcaggagcagcggagccgtcgacggtggtgctggccgtcaacggcaagcgctacgaggcggccggcgtggctccgtccacgtcgctgctggagttcctccgcagccagacgcccgtcagaggccccaagctcggatgcggcgaaggtggctgcggtgcatgcgtggtcctcgtctccaagtacgacccggccacggacgaggtgaccgagttctctgccagctcctgcctgacgctgctccacagcgtggaccgctgctcagtgaccaccagcgagggaatcggcaacaccagggatggctaccaccccgtgcagcagcgcctctccggcttccacgcctcgcagtgcggcttctgcacacccggcatgtgcatgtccatcttctccgcccttgtcaaggccgacaacaagtccgatcgcccggaccctcctgctggcttctccaagatcactacctcggaggcagagaaggctgtctcgggcaacctttgtcgttgcaccggatacagacccattgttgacacctgcaaaagctttgcctctgatgttgacctcgaggacctaggcctcaactgtttctggaagaagggcgaagaacctgcagaagtcagcaggctgccggggtacaacagcggtgccgtctgcacctttccagagtttctcaaatccgaaatcaagtctactatgaagcaggtgaacgatgtccccattgcagcctcaggtgatggctggtaccatcctaagagcattgaagagcttcacaggttgtttgattccagctggtttgatgacagttctgtgaagattgttgcttcaaacactgggtctggagtgtacaaggatcaggacctctacgacaagtacattgacatcaaaggaatcccagagctttcagtcatcaataaaaacgacaaaggaattgagcttggatcagttgtgtccatctctaaagctattgaagtgctgtcagatggaaatttggtcttcagaaagattgctgatcacctcaacaaagtggcttcaccgtttgttcggaacactgcaaccataggaggaaacataatgatggcacaaaggttgccatttgaatcggatgttgcaaccgtgctcctagctgcgggttcgacagtcacagtccaggtggcttccaaaaggctgtgcttcactctggaggaattcttggaacaacctccatgtgattctaggaccctgctgctgagcatatttatcccagaatggggttcagactatgtcacctttgagactttccgagccgccccacgaccatttggaaatgctgtctcttatgtaaactctgctttcttggcaaggacatcaggcagccttctaattgaggatatatgcttggcatttggtgcctacggagtcgatcatgccatcagagctaagaaggttgaagatttcttgaagggaaaatcgctgagctcatttgtgatacttgaagcaattaaactactcaaagataccgtttcaccatcagaaggcactacacatcatgaatacagggtcagcttggctgtcagtttcttgttcagtttcttatcttcccttgccaacagttcgagtgcaccatcaaatattgatactcccaatgggtcatatactcatgaaactggtagcaatgtggactcacctgagaggcatattaaggttgacagcaatgatttgccaattcgttcaagacaagaaatggttttcagcgatgagtacaagcctgttggcaagccgatcaagaaagtcggggcagagatccaagcatcaggtatatactcttatactgatacataaactgatttagcttgaacttccaaacttgttccactgttagtgaacctcgtctattttctatactccacaaaacaatcatctcatggctccttttttttgtctttagtgcaatagtttcgtcagccagaaccatctcataagtttctgtcccagcatgctctattgattgtatttcctcccttaaaaaatgccaaaccatattcatttttcttatacaggggaggctgtgtacgttgatgatatccctgctcccaaggattgcctctatggagcatttatctacagcacacatcctcatgctcatgtgagaagtatcaacttcaaatcatccttggcttcacagaaggtcatcacagttataaccgcaaaggatattccaagcggtggagaaaatattggaagcagcttcctgatgcaaggagaagcactatttgcagatccaatcgctgaatttgctggtcaaaatattggtgtcgtgattgctgaaacacaaagatatgctaatatggctgcaaagcaagctgttgttgagtatagcacagaaaatctgcagccaccaattctgacaatagaagatgccatccaaagaaacagctacatccaaattcccccatttttagctccaaagccagttggtgactacaacaaagggatggctgaagcagaccacaagattctatcagcagaggtaaaacttgaatcccagtactacttctacatggaaactcaagcagcactagcgattcctgatgaagataactgcataacaatctattcctcgacacaaatgcctgagctcacacaaaatttgatagcaaggtgtcttggcattccatttcacaatgtccgtgtcatcagcagaagagtaggaggaggctttggtggaaaggcaatgaaagcaacgcatactgcatgtgcatgtgcccttgctgccttcaagctgcggcgtccagttaggatgtacctcgatcgcaagacggacatgataatggctggagggagacatccaatgaaggcgaagtactctgttgggttcaagtcagatggcaagatcacagccttgcacctagatcttggaatcaatgctggaatatcaccagatgtgagtccattgatgccacgtgctatcataggagctctcaaaaagtacaactggggcactcttgaatttgacaccaaggtctgcaagacaaatgtctcatcaaagtcagcaatgcgagctcctggagatgtgcagggctctttcatcgctgaagccatcatcgagcatgttgcctcagcactcgcactagacactaacaccgtcaggaggaagaaccttcatgattttgaaagccttgaagttttctatggagaaagtgcaggtgaagcttctacatacagcctggtttccatgtttgacaagctggccttgtctccagaataccagcacagggctgcaatgattgagcagttcaatagcagcaacaaatggaagaaacgcggcatttcttgtgtgccagccacttatgaggttaatcttcgaccaactccaggcaaggtgtcaatcatgaatgatggttccatcgctgtcgaggttggaggaattgagataggtcaaggattgtggactaaagtgaagcagatgacggcctttggactgggacagctgtgtcctgatggtggcgaatgccttctggacaaggttcgggttatccaggcagacacattaagcctgatccaaggaggtatgactgctgggagcaccacttctgaaactagctgtgaagcagttcggcaatcgtgtgttgcacttgttgagaggctgaagcctatcaaggagagtctcgaagctaagtccaacacagtggaatggagtgccttgattgctcaggcaagcatggcgagtgtgaacctatcagcacaggcgtactggactcctgatccatctttcaagagctacttgaactacggagctggcaccagtgaggtggaagttgatatcctaacaggagcaaccacaattctgcgaagcgacctggtgtatgactgcgggcagagcctaaaccctgctgtagacttgggccagatcgagggctgctttgtccaaggaatagggttcttcacgaacgaggactacaagacgaattccgacggcttggtcatccacgacggcacatggacgtacaagatccccacggtggataatatcccgaaggagttcaatgttgagatgtttaacagcgcccctgacaagaagcgtgtcctatcttccaaagcgtcgggcgagccgccgctggttctcgcagcctcggtgcactgcgcgatgagggaggccatcagggcggcgaggaaggagttctcggtcagcaccagccccgcgaaatccgccgtcacattccagatggacgtgccggcgacgatgcccgtcgtcaaggagctctgcggcctcgacgtcgtggagaggtacctcgagaacgtgtctgccgccagtgccggcccaaacacagcgaaagcatagatccagcaggcctcagggtgcagtcggcgcactgccagagatgatgtgtgctgccctgatgtacagacagtacagtacagaggagagagaattgggggaactcaggaactgcgaggagcgatgaacagtatatagagtgaaaaataaaagtgcttcgtactaataatcactagaaaaaattatgcacatctcccacgcactaccggcacgactgttgaatattttgtaaaataagatgtcataagctatttattttctgtatgattagatcagcaaataatttaattcaagtataaatcacagaaatccgctattgtgcaccgaaaaataaaatcctgataagcattaaacaccaagctaggaaattgatgcagcaaacacacataatatccc

SEQ ID NO: 210939 - DNA, 5284 bp, Zea Mays
ggccttggcgccttgcactgcagctgcgaagacgctttcgcatcctagccgctggcgacgtcagcgcgtgcatcaacaacactggccggctggctggaggatcggagcaggtcagcgactcgtatatataaacaggagggcaccacaccatcgatcggctccccgcgcagagggcgttgtgttgtgttgtgttgtgttgcgtgctgtggagggggaggaggagatggggaagggggcaggagcagcggagccgtcgacggtggtgctggccgtcaacggcaagcgctacgaggcggccggcgtggctccgtccacgtcgctgctggagttcctccgcagccagacgcccgtcagaggccccaagctcggatgcggcgaaggtggctgcggtgcatgcgtggtcctcgtctccaagtacgacccggccacggacgaggtgaccgagttctctgccagctcctgcctgacgctgctccacagcgtggaccgctgctcagtgaccaccagcgagggaatcggcaacaccagggatggctaccaccccgtgcagcagcgcctctccggcttccacgcctcgcagtgcggcttctgcacacccggcatgtgcatgtccatcttctccgcccttgtcaaggccgacaacaagtccgatcgcccggaccctcctgctggcttctccaagatcactacctcggaggcagagaaggctgtctcgggcaacctttgtcgttgcaccggatacagacccattgttgacacctgcaaaagctttgcctctgatgttgacctcgaggacctaggcctcaactgtttctggaagaagggcgaagaacctgcagaagtcagcaggctgccggggtacaacagcggtgccgtctgcacctttccagagtttctcaaatccgaaatcaagtctactatgaagcaggtgaacgatgtccccattgcagcctcaggtgatggctggtaccatcctaagagcattgaagagcttcacaggttgtttgattccagctggtttgatgacagttctgtgaagattgttgcttcaaacactgggtctggagtgtacaaggatcaggacctctacgacaagtacattgacatcaaaggaatcccagagctttcagtcatcaataaaaacgacaaaggaattgagcttggatcagttgtgtccatctctaaagctattgaagtgctgtcagatggaaatttggtcttcagaaagattgctgatcacctcaacaaagtggcttcaccgtttgttcggaacactgcaaccataggaggaaacataatgatggcacaaaggttgccatttgaatcggatgttgcaaccgtgctcctagctgcgggttcgacagtcacagtccaggtggcttccaaaaggctgtgcttcactctggaggaattcttggaacaacctccatgtgattctaggaccctgctgctgagcatatttatcccagaatggggttcagactatgtcacctttgagactttccgagccgccccacgaccatttggaaatgctgtctcttatgtaaactctgctttcttggcaaggacatcaggcagccttctaattgaggatatatgcttggcatttggtgcctacggagtcgatcatgccatcagagctaagaaggttgaagatttcttgaagggaaaatcgctgagctcatttgtgatacttgaagcaattaaactactcaaagataccgtttcaccatcagaaggcactacacatcatgaatacagggtcagcttggctgtcagtttcttgttcagtttcttatcttcccttgccaacagttcgagtgcaccatcaaatattgatactcccaatgggtcatatactcatgaaactggtagcaatgtggactcacctgagaggcatattaaggttgacagcaatgatttgccaattcgttcaagacaagaaatggttttcagcgatgagtacaagcctgttggcaagccgatcaagaaagtcggggcagagatccaagcatcaggtatatactcttatactgatacataaactgatttagcttgaacttccaaacttgttccactgttagtgaacctcgtctattttctatactccacaaaacaatcatctcatggctccttttttttgtctttagtgcaatagtttcgtcagccagaaccatctcataagtttctgtcccagcatgctctattgattgtatttcctcccttaaaaaatgccaaaccatattcatttttcttatacaggggaggctgtgtacgttgatgatatccctgctcccaaggattgcctctatggagcatttatctacagcacacatcctcatgctcatgtgagaagtatcaacttcaaatcatccttggcttcacagaaggtcatcacagttataaccgcaaaggatattccaagcggtggagaaaatattggaagcagcttcctgatgcaaggagaagcactatttgcagatccaatcgctgaatttgctggtcaaaatattggtgtcgtgattgctgaaacacaaagatatgctaatatggctgcaaagcaagctgttgttgagtatagcacagaaaatctgcagccaccaattctgacaatagaagatgccatccaaagaaacagctacatccaaattcccccatttttagctccaaagccagttggtgactacaacaaagggatggctgaagcagaccacaagattctatcagcagaggtaaaacttgaatcccagtactacttctacatggaaactcaagcagcactagcgattcctgatgaagataactgcataacaatctattcctcgacacaaatgcctgagctcacacaaaatttgatagcaaggtgtcttggcattccatttcacaatgtccgtgtcatcagcagaagagtaggaggaggctttggtggaaaggcaatgaaagcaacgcatactgcatgtgcatgtgcccttgctgccttcaagctgcggcgtccagttaggatgtacctcgatcgcaagacggacatgataatggctggagggagacatccaatgaaggcgaagtactctgttgggttcaagtcagatggcaagatcacagccttgcacctagatcttggaatcaatgctggaatatcaccagatgtgagtccattgatgccacgtgctatcataggagctctcaaaaagtacaactggggcactcttgaatttgacaccaaggtctgcaagacaaatgtctcatcaaagtcagcaatgcgagctcctggagatgtgcagggctctttcatcgctgaagccatcatcgagcatgttgcctcagcactcgcactagacactaacaccgtcaggaggaagaaccttcatgattttgaaagccttgaagttttctatggagaaagtgcaggtgaagcttctacatacagcctggtttccatgtttgacaagctggccttgtctccagaataccagcacagggctgcaatgattgagcagttcaatagcagcaacaaatggaagaaacgcggcatttcttgtgtgccagccacttatgaggttaatcttcgaccaactccaggcaaggtgtcaatcatgaatgatggttccatcgctgtcgaggttggaggaattgagataggtcaaggattgtggactaaagtgaagcagatgacggcctttggactgggacagctgtgtcctgatggtggcgaatgccttctggacaaggttcgggttatccaggcagacacattaagcctgatccaaggaggtatgactgctgggagcaccacttctgaaactagctgtgaagcagttcggcaatcgtgtgttgcacttgttgagaggctgaagcctatcaaggagagtctcgaagctaagtccaacacagtggaatggagtgccttgattgctcaggtgaggataataacttaactctaactctgttggtaacatgccacttaatatgattgaaagagatgccaagaaataaagttactcaaatctgtttgcctcccttcattccatcattaatgtattgcagtcggtagcaatgtcaaataagtttaaggaactggaactcaatatcaagcagtttaaattattcatgacatttgttcctcatttacaggcaagcatggcgagtgtgaacctatcagcacaggcgtactggactcctgatccatctttcaagagctacttgaactacggagctggcaccagtgaggtatccttgatccaaaatacaatactaacagcacaagcgcaattagcaagcgattttgttggaggttgcagatttgcagctaaagttctttaaacctgacatttcattgggattttgcaaatggtcatcgcaggtggaagttgatatcctaacaggagcaaccacaattctgcgaagcgacctggtgtatgactgcgggcagagcctaaaccctgctgtagacttgggccagatcgagggctgctttgtccaaggaatagggttcttcacgaacgaggactacaagacgaattccgacggcttggtcatccacgacggcacatggacgtacaagatccccacggtggataatatcccgaaggagttcaatgttgagatgtttaacagcgcccctgacaagaagcgtgtcctatcttccaaagcgtcgggcgagccgccgctggttctcgcagcctcggtgcactgcgcgatgagggaggccatcagggcggcgaggaaggagttctcggtcagcaccagccccgcgaaatccgccgtcacattccagatggacgtgccggcgacgatgcccgtcgtcaaggagctctgcggcctcgacgtcgtggagaggtacctcgagaacgtgtctgccgccagtgccggcccaaacacagcgaaagcatagatccagcaggcctcagggtgcagtcggcgcactgccagagatgatgtgtgctgccctgatgtacagacagtacagtacagaggagagagaattgggggaactcaggaactgcgaggagcgatgaacagtatatagagtgaaaaataaaagtgcttcgtactaataatcactagaaaaaattatgcacatctcccacgcactaccggcacgactgttgaatattttgtaaaataagatgtcataagctatttattttctgtatgattagatcagcaaataatttaattcaagtataaatcacagaaatccgctattgtgcaccgaaaaataaaatcctgataagcattaaacaccaagctaggaaattgatgcagcaaacacacataatatccc

SEQ ID NO: 210940 - DNA, 3370 bp, Zea Mays
ctcgtttcccccgcaggcccgcactcgcaaatctcctccccgcgcggcgcgcctgcacctcccggtccggcgagaggccaccgcccgcgcggccgcgctcctcacactaccacccgccccctctacgcaaggcctagaagcgccgcctccacggctgcacctccgccagttgcgctcctcgcctcgccgctgcctccgtagccgtcgcgggcgccaccatgccgctccggttggatatcaagaggaagctcgcgcagaggtcggagagggtgaagtccgtggatctgcatccgacagagccatggattttgtcgagtctttactcaggaagcgtttgtgtatggaactaccagactcagacaatggtgaaatcatttgaagtcacggatttaccagttcgttcggctaaatttattgcacgtaagcaatgggttgttgctggtgccgacgatatgttcatccgtgtgtacaactataacacaatggacaaggtcaaggtttttgaagctcacactgattacattagatgtgtggctgttcatccaacccagccctttgtgatatcatcatccgatgacatgctgattaagctgtgggattgggataaaggctgggtgtgtactcaaatattcgaagggcattctcactatgtgatgcaagttacatttaacccaaaagataccaacacctttgctagtgcttccctggatcgcacaataaagatatggagtcttggttcccctgatccaaatttcacactagatggccattcgaaaggtgtgaactgtgttgattacttcactggtggtgaccgaccatacttaattactggctctgatgatcagactgcaaaggtttgggactaccaaacaaagagctgcgttcaaacacttgaaggacatgcacataatgtttctgctgtatgtttccacccagagctacctataataattactggttcagaggatgggacagttcgaatgtggcattctactacctacaggctcgagaacactcttaactatggccttgagcgagtttgggctttagggtatatgaaagggtcaagaagggttgtgattggatacgatgaagggacaataatgataaaaattggtcgtgaagttcctgttgctagcatggatagcagtggaaaaattatatgggcaaagcataatgaaatccaaactgttaatatcaagagtgttggtgcagacaatgagatcgcagatggtgatcggttaccgttggccgtgaaggagttgggaagctgtgacctttatccacaaagtttaaggcacaatccgaatgggagatttgtagttgtatgtggagatggagaatacataatatacacagccttagcatggagaaacagatcatttgggtctgcacttgaatttgtttggtcaactgatggagaatatgccatcagagaaagcacctcgaggataaagatatacagtaaaaatttccaggagaagaaaagtataaggccatccttttccgctgaacggatatttggtggagtgttacttgctatgtgtacaaatgacttcatttgcttctatgattgggcagaatgcagattgatacgtcgaatcgatgtcaatgtgaagaatctttactgggctgacagtggtgatttagtaacaattgcaagtgatacgtcattctacattttgaaatataatagggatgtagtttcatctcatttggatagagggggttcagctggtgaggaaggtgtggaagatgcctttgaactgcttcatgagatcaacgaacgtgtccggactgggctatgggttggcgattgtttcatctacaataattcttcatggcgtcttaattactgtgtaggaggacaggtcacaactttgtttcacttggatcggccaatgtatttattaggatatcttgcaaaccaaagccgtgtctatcttattgataagcaatttaatgttgtggggtatactttactccttagtttgatcgaatataaaacacttgtaatgcgtggggatttcgatcgcgcgaatgatgttttatcatctataccaaaggaacaatatgacagtgtggcgcgtttcttggaatcacggggaatgttggaggaagccctcgagatagcaactgacactaattacagatttgacctggctgtgcaacttggtcgacttgaaattgcgaaggcgattgctaccgaggtgcaaagtgagtccaagtggaagatattaggggagttagctatgtcaagtggaaagcttgagatggcagaggagtgtcttctacatgctatggacctcagtggtttgttgcttttgtattcttcccttggggatgctgaaggcattaacaaattggcatctgtagccaaagaacaaggaaagaacaatgttgctttcctttgtttcttcatgctaggaaagctggaagagtgtcttcaattgctaatagaaagcaatcgtattccggaagcagcattgatggcaagatcttatcttcccagcaaagtccctgagattgtagcattgtggaaaaaggatctccagaaggtaaactcaaaagcagcagagtcgctggctgatcctaatgagtacccaaacttatttgaagactggcagattgctctcaacgtagaagctgctgttgcctctaaaaggagtatctatccatcggccgaggagtacatgattcatgctgaaaggtcaaatgagagtttagtggaagcttttaaaaatatgcatgtacatgaagagatggtaccagatgataatgaagatactgttcacgaggttattgaggatggtggagtagagagtcaagaagatgctgttgaggtcgatgcagaggatgacggagtagaagaaagtcaagatgaagctgttgaggttgaggctgagggttcaagtgatggtgctgtccttgtgaatggaaacagtagcgaggaacagtggggtacgaaaaatgaagaaccatcagcataaaagctgtagttgagcaagttgctgactgagcaatagtggattaacggatcagcaacttcgcttcagcggtgtagtttgtaaaggaaattttgtgcttccctttctacatgtagatcaggccttaggcgtcgaagacattttatagcctaccatgaggtactcgtttcacggagatggtatatgatataggtgatcggagtgatattttacatggtgcatatagtagcttgtcgaactgagaatgttttacctgtgatgtacatcggacttgggagctttgtatcattgtgttacaccttttcaatggtggcgaataaatttacagcagatgttttcaatagccttttagtaaatgtgtgaacgatttgcgttgtgctatg

SEQ ID NO: 210941 - DNA, 3565 bp, Zea Mays
aatgttctaatcgtgatgaaagcttgccctgcgctgtgcgtgtaggatgcgcaaattaccaaaagggccctgggctactgagttggcggctgctctctcggtggtcccaaagggaagagggggaaccgggcagagagcagcgcaggacaagacaggcagagaagtcgctagccagactagtctgcgcggtgatccgtcttccctggggtgttccgccgtcctgcagcagaggcagggggttgccgctctcgccgccgcacgctgcggctctgctctgctccgcctgatccttcctgcggcccttgttttttcctctcgtttcaggtggccagccttggttttgcagaactcattcagtggcctctgctgaaaagtgttcaatggcgtcaggagccaccttaagctgggttaaaaccccatttgacacccgaagatttcatgacctatctaatctaagtttccgctgccgaaacccttttggatcaattcagccctggtggctgcaaactgatcaagactcatccctaatcaaggttcgcgtggctgctgattattcagactcaatgccagattcaaagtacacgagagatcggggttatcaccctcttgaagaagttaaagaacgtccaaagaagaaggacctgttgctgacagatattgaaacagctagaacagtagtagaggtatggtaacctggtgcaactaaatagtgtgtttcttatgcacctagctatttaatgtttcataggtatggttatggcctgtagtatagagttcttcaaactaatccaaatatttgttgtaaaaacctgcacaaattcctccaggcgcgtaacaaacaaaatgatggtttatacctttataagacatgccagtgagtatctgagcctaggtaacgtttgcaatcttccttctctaggcaaatagcaaggggttgcttgtatttcctgctagggtacacaatgaacctcatggacatgtttcttggtcggagtttcaatatgttgttgatgaatatggagacattttctttgaagtacctgacagtgagaacatcctggaagatgatactgcaaacaatcctgtgttttgattggaatggatggacccattattggagaaagtagtgtggcgattagtgatttcagtgattacatggatggtgaaaattttatggacgttcctgatgagcaccacaccaaggtttgctaacaagttattttccctgctttcatcaggtactatgggtcattcttcttagtagcaagtagcgctatcattattgatgtttcctttgtgaaatgtccagattgatacagaaataactgatattctcatagagtgggggatgcctgcaacaatgcgtgcaatacatccgatttactttgccaaatgtttgacaaaggtaagcgataaataattatttgaagagtgcagacaccacaaaccagcagcacttggaatagtgaaaatggtcaagctgataaagatgctattaacgaaaggacagacccagtgggcagtggcccgttctggtggctcccacatgagtagggtctagacaaggaataatcaaggcaagctttactcctgcattttgcagagaggctgcattgaactaggacctttggctcagtgagaaggcttcgcaccactgcaccaggcttgcccttcaataaagatgctattaatgattcattgaattcagcttacatcatgcacgatttgaatgtgaaccttcaaatcatgcactttagattgcagtctccagaccactccggttgcccatatcaagttctgaaaaaaaaggcaaagatagaaaatcaagatggtctcatgttagcttcagaatatggtatctttcaggagggatagcaaatatcagtaaaacaaaagaaagattggcaacagtttgatgtctttctcggagtatcccttttcccatcaattagtatttgataaaaactctgctaaaactagaatatatttagcttttgtatatatgccaatccgaactttttaatttgttctgaactttcatgtgccagtctgttgtagagtaaaaactttaccaaagcatttctccgagcataagtggtcacaagagcatagctctaaatgtgtccctcatcaaatctctcaagttgcagagaactaggcaatcacgttacctgctcttttactgcacaggccattcataataataatggggagaagatggatagtccatcaaacggtctctctattgtaggatatctgagacctgctttcatagaggaagagtcttacttgaggagcatgtttcatggtgacaatggtggttattcatctgactggaaagtaaatgaaaccgatgaatacaacagagaaactcggccagtttctggaaccaatcgcctcattggtaatttagttggttgaaatcttgcacgtcagctatccactttactccaatttttattttactagtactaagcaaatattcagatgatgataaatcaagatttgacttcaatcatgctgaaactagaactgattcaatgatctacaagctggagataatgacaattgaactgttttccatgtatggaaagcagtttaagattgatccacaagattttcaagattcagaaccagatattcttgcaaattctgcttcatcgataatagaacggatcaaagaaaacagtgatcagtgtgccgcggctctcaggtcgctctgtcgccggaaaaagggcctcactgtcgaggaggcaagcttgattggtgttgacagccttggtattgatgtaagagccttttctggcttggaagttaagactgttcgattttcattcaatgcacaggcgctctctgaacgttcagctgaaaagaagatcaggcgaatgcttttcccccgttaccagcgtaaaaacgtgaaagcctctactgaagatgagtcttaacctatcagctgtttttcctgagaaagcatgcaaacacctggttcaaagacaaggtgtcaagggaatcaacacaatatcatcttatgcgagtttgctaggagatagcgcacaacctgtcgactatgagaatgaccaaaaacatcagagtaataaggtttgccatgcatggtctctaacatgcttccaagaatatagtttggtttctgacagataataaaaaaaaaacgaataaggtgccagttcatgtataaaagatgaactgcgactttatgctggcggaaactgattagctgaccaagctttgtcagctacaaattcccagtaataataacgagctgcgaggtgaaagggcagagtaataaggtctcgttggcctaaatcagttcttagtttcttacccacaacctgtaactaactttgttgtctcttttcatgtagacataaatgtcatgcaacgcaactgcgattatggcattgttttgttgaactatacataaaagaaaacttgataaagtttcgagtgcttttagctgtcagattctactgtgctcgattgcactactgtactcgtgtactgtaagaaaagactgaccagttattttccaggaaaattaaagaac

SEQ ID NO: 210942 - DNA, 1417 bp, Zea Mays
taacaagttattttccctgctttcatcagattgatacagaaataactgatattctcatagagtgggggatgcctgcaacaatgcgtgcaatacatccgatttactttgccaaatgtttgacaaaggccattcataataataatggggagaagatggatagtccatcaaacggtctctctattgtaggatatctgagacctgctttcatagaggaagagtcttacttgaggagcatgtttcatggtgacaatggtggttattcatctgactggaaagtaaatgaaaccgatgaatacaacagagaaactcggccagtttctggaaccaatcgcctcattgatgatgataaatcaagatttgacttcaatcatgctgaaactagaactgattcaatgatctacaagctggagataatgacaattgaactgttttccatgtatggaaagcagtttaagattgatccacaagattttcaagattcagaaccagatattcttgcaaattctgcttcatcgataatagaacggatcaaagaaaacagtgatcagtgtgccgcggctctcaggtcgctctgtcgccggaaaaagggcctcactgtcgaggaggcaagcttgattggtgttgacagccttggtattgatgtaagagccttttctggcttggaagttaagactgttcgattttcattcaatgcacaggcgctctctgaacgttcagctgaaaagaagatcaggcgaatgcttttcccccgttaccagcgtaaaaacgtgaaagcctctactgaagatgagtcttaacctatcagctgtttttcctgagaaagcatgcaaacacctggttcaaagacaaggtgtcaagggaatcaacacaatatcatcttatgcgagtttgctaggagatagcgcacaacctgtcgactatgagaatgaccaaaaacatcagagtaataaggtttgccatgcatggtctctaacatgcttccaagaatatagtttggtttctgacagataataaaaaaaaaacgaataaggtgccagttcatgtataaaagatgaactgcgactttatgctggcggaaactgattagctgaccaagctttgtcagctacaaattcccagtaataataacgagctgcgaggtgaaagggcagagtaataaggtctcgttggcctaaatcagttcttagtttcttacccacaacctgtaactaactttgttgtctcttttcatgtagacataaatgtcatgcaacgcaactgcgattatggcattgttttgttgaactatacataaaagaaaacttgataaagtttcgagtgcttttagctgtcagattctactgtgctcgattgcactactgtactcgtgtactgtaagaaaagactgaccagttattttccaggaaaattaaagaac

SEQ ID NO: 210943 - DNA, 1096 bp, Zea Mays
cgcaagcctggaacgcgtgagcgtcgtgccagtgtgcgcgtcacaggaccggagtgggtgtagctgtgtgcgtggtgttcctgcctgtctggtggaccagctgcgtctggtggtggaattccttatgtatcgtgaagtctgaactggaaaggatatcaaacaaacaaaggaaatatctatttcgaccagttcctatatatctctctgtcgtcgtcctcctccaacctttaccccaattccttctgttggtatagatcggcgctgttaacaattggtatcagagctccaacgatcctcggaccttcttcctccatggctactgcttcatcaccgatcgacgcccagctcactcaagcgctggaacaccaaacccgtgccattctcgccgagctcgacaaacgcttttccgccatcgattccaagtgggagctccgcgtcggtgccctggagtcccaagcgaaagagttcgcccgccaccacgaggacatctcctccacgatccgggcggatgtcgaggcgcacctctcagcggccgatgcggataccctggaccggatccgctactgggaggcatccacaggtttcggcgacggcgcagcgacgctcggattcggaggcatcgcaagaagcaagcagatccggacggtttgggttggcttcggccacgcagaaccgttgggcctgcctttggaccaggccgtcactgggccagtatcgtcgccgccttagcgtcactcacactgacaaaaaaaaaagagagagagagagagagatgaaaaaacagctctctcatcgaacttcgatggggagagcgtgcagcggcacacgaagttttttttataaaaaaaaggcgtgcagcacaccgatcaatgtggcatctctccatatccagtagtataggcgcacagcaggtacagccacgcacatcggcacatggagaattggagacacgatccgtcgccgccattctttcatgtggacaattctcatctcgacgacggttcgcgtgcaccggcaccaagaaaatgttatctgaaccctgaaaaaaaaacacatgcgtctcaggacttccgcgcatgcatctgacgacttggaa

SEQ ID NO: 210944 - DNA, 3011 bp, Zea Mays
ggtatagatcggcgctgttaacaattggtatcagagctccaacgatcctcggaccttcttcctccatggctactgcttcatcaccgatcgacgcccagctcactcaagcgctggaacaccaaacccgtgccattctcgccgagctcgacaaacgcttttccgccatcgattccaagtgggagctccgcgtcggtgccctggagtcccaagcgaaagagttcgcccgccaccacgaggacatctcctccacgatccgggcggatgtcgaggcgcacctctcagcggccgatgcggataccctggaccggatccgctactgggaggcatccacaggtgctcgcgttaccgccctggagtccgccatccacctgctcgatacttggcgtcctcgaatggggtcttcagtggatgctttccacacctccatggatacagttcacgctgaactgtccaaaatggagatccaatggtccaatggagcgcgcgttgacggcttctccaggcccagcctccttgacgcgcgcgaatcggcaccggcgcgctcacctgcgcccgtcagcttcgccgatggctcatgttttgggccccgcctttcctctactaaccgggactgtggatttgggccctatgtggtcgatctccacttcccggtcaagggtacgtggtctcctcaaccccatggttcatttgagtttcctgcccaccataatttcagtcctggagaactagagcgtcgtggactctcgagtcgcgggttgggtggccttcctaaacttagtttcccagtattcaatggtacttgtcgcaaattatggcaaaaacggtgtgaagactattttgatatgtatgccaccgaagagataatgtgggtcaaagtcgctactatgcacttccaaggtgtagttgcacgctggctgcagtcaattgagcttgtttgtcgtcgctctcttggcgccagttttgccaattcgtccatgaaagatttggccgccagcaacatgaattggttatccgccagcttttccacataaaacagacctctactgtccaggattacattgatcgtttttgcgagctagttgatttgctggtcacctatgaacacacaacagaccctttatactacactatgagatttgttgatggcctgcgcgatgatatcaaatgtgttattcttgtccaacgacctggcgatctcgatactgcctgctccttggccttgttgcaggaagcagcggagcctgctcgtgccgaccgttcttatacggctcggccaatgctgaagcctgtcgcggctcgctgggatcaacctcgaactgggactagtgacaactccaagcactccctcgctgctgctccaactgctgattctaaagtggcttctcttcgtgcctatcgccatgctagaggtctctgccaatattgtgctgagaaatggagcaaaggccacaagtgtgctgagacagtgcagttgcatgttgttcaagagttatgggatatgttgtctgttgatcagccagagtctaagggggagtttgaggattctgttgaccagttaatgctcttattatccaaggaatctatgtcggctaatacactatctaaggcattcagaatttgtggacaactgcaaggcatggagatgttgatgctgcttgattcagggagttcccatagttttttgaattcagtccgcaccaccgacttatcaggttttgttccgttggacacgcccttgtcggtcagagtagccaatggcaatgtcttgctttgttcagtggagctacctaatgcagaatggtcagtgcagggtgtcactttttcttccacatttaaagtcctgcctctacccttttatgatatcattttgggcatggattggcttgaaaatctgagcccaatgacagtggattggaaacacaagtggttgtcagtcccactggctggcagtacagtgcttttgcaaggttgtcacccattagtccctgtgggaactttgctggaggtcccacaggtggctgttaattcagccgaatagattcagttattgtctattgaggagttgcagttgcccgaacatgtgctgcacttacttcgtgtattccaagacttatttcaatcaccatctactttgccacctagcaggtcctgtgatcacactattcctcttattgaagcagctcgaccagttaatattcgaccctatcggttttctcctgcgatgaaggatgagatcgagtctcaagtggctgaaatgttgcaaactggattaattcaacatagtcacagctcgttttcctctccagtgctgcgggtcaaaaagaaggattcttcttggcgtttttgcgtcgattacaggcatcttaatgctcttactatcaagtccaagtaccctgtcccaattattgatgagctactcgatgagctgtttggtgcatcctggttttctatattggaccttagggcgggtttccaccagattttattgaaagagggtttcggcgacggcgcagcgacgctcggattcggaggcatcgcaagaagcaagcagatccggacggtttgggttggcttcggccacgcagaaccgttgggcctgcctttggaccaggccgtcactgggccagtatcgtcgccgccttagcgtcactcacactgacaaaaaaaaaagagagagagagagagagatgaaaaaacagctctctcatcgaacttcgatggggagagcgtgcagcggcacacgaagttttttttataaaaaaaaggcgtgcagcacaccgatcaatgtggcatctctccatatccagtagtataggcgcacagcaggtacagccacgcacatcggcacatggagaattggagacacgatccgtcgccgccattctttcatgtggacaattctcatctcgacgacggttcgcgtgcaccggcaccaagaaaatgttatctgaaccctgaaaaaaaaacacatgcgtctcaggacttccgcgcatgcatctgacgacttggaa

SEQ ID NO: 210945 - DNA, 767 bp, Zea Mays
ataacaattctgattacgcgactcgctgatcgccagcttgtggtcgcgatgccgtacaccggatatcctctagcgccttcccacaatcgcgcttctgcggttctgccgccgacgtccgcgccgccgacgtccgcgcccgcgtccctcgctgctttgccctctccaccctccgccatcaccgccgcggcgtccttctgtaccggatccgtcgcagccaccactccgcagatccgctgggttgacgtccacggagctgctccggggatgtcgtcctccgcttccagcgtcgagggcgacgccgccggagagttcacggaggtcgtaatcgtgcgtcacggcgagacgtcatggaacgcctcgcgcatcatacagggacacttggatgcagagcttaatgatattggaaggcagcaagctgttgcggttgctcatcgtctttctaaagaagtgaaaccagttgccatatactcttctgatctgaagcgagcagcagagactgcgcaaacaattgcaagaatttgcaatgtgccaaatgtcgtgttcgatccagcactgagagaaagacacattggagatctgcaaggcatgacgcttcaagatgctgctacagagaggccagaggcatacaaagcttttatgtcccacaagagaaatcaacaagttcctggtggtggagagagtcttgatcaactgtcggagcgatgtgtgtcttttctgtacgacattgttggtaaacacaaagacacggctgcttgggtcgttttatt

SEQ ID NO: 210946 - DNA, 1528 bp, Zea Mays
tgatactgctagtagttcctaaagttgggttatctgctgcaaactatgctaagaatttattgcgtgtcactgttcttcttcaatatgtcccccgtatcatcagattcgtaccacttcttgatggtcagtccaccaatggattcatatttgagtcagcatgggctaattttgtgatcaaccttctaatgtttattttggcgggacatgtggttggttcatgttggtatctctttggcttacagactgtggacgtggcattgggagtggactgtacagacagcagtggttcaatgactcgggtgcagaagcttgttttaacactggaaatgatgctactttccaatatggaatttatgagcaggctgttttgctcactacagaagacagtgctgtaaaacgatatatatattcattattttgggggtttcagcaaataagtaccttagcaggaaaccttgtcccgagttactttatatgggaagttctgttcacgatggctattattggtctgggactgttgctttttgcattgcttattggaaacatgcaaaattttctgcaagctcttggaagaaggaggttggaaatgcaactcaggcgccgtgatgttgaaaagtggatgagccataggcgattgcctgaagatttgagaaggagggttagacgagccgaaaggttcacctgggcagctactcaaggagtgaatgaagaggagcttttgagtaatttacctgaagacatccaaagggacatacgtcgccacttctttagattccttaataaggtccgattattcaccttgatggattggcctatattggatgcaatatgtgacaaattaagacaaaacttgtatattagtggaagtgacattctttaccaaggtggcactgttgaaaagatggtcttcatagtgagagggaagctggaaagcatcagtgcagatggcagcaaggctccattacatgatggagatgtatgtggagaggagctcctcacgtggtacttggaacactcttcagcgaacagagatggtgggaaaattaaattccaaggtatgcggttggttgctatacgtacagtaagatgtttaacaaatgttgaagcttttgtactcagagcaagtgatctggaagaagtcacctcgcagtttgctcgattcctgcgtaatccacgagtgcagggagcgatcaggtatgaatccccctactggcgaaccattgctgcaactcgtattcaggttgcatggaggtatcgtaaaaggcggctgaagcgagctgagaagtcgaggttgagcgaagagacttatgcctcacttggatcttgacacatgattcttttcagcgtagacggaggggatgattgatcgctacctgactaggcactaacttttcagtttcagttcagcatctaaagcttctagagctgtgaaatttctccgaacatgtctacttggtggaacctaacggggcaaatatttttggctttggtgttccgtgtacataataagaggaaagttttttttttc

SEQ ID NO: 210947 - DNA, 1358 bp, Zea Mays
accgaaatgcatgtcctaaaccctaacgtagctcctacactgcaccgccaacttcaccgcacgagccaaaacggcggccatgtccgtccgccccagtcctacccggcttatgcacgcggcgaagagtggtgccgtcgtcacccttcgcaggtgcagcctcacctccaggagcgccttcttcctcgaccaatttgcctccgtccaggcttcgaccgagctcgtgaacctcctcctgggcgaccatcgcattgaatgtgacgctcgtgaacctcctcccgagttcgtgaacctcctctcacacgccaatccccttactctgttgtgcctccgccccctcccagcatctagcgcgcactgccatcctctgcgccccatcgtctaccgtgaggcatccatccctccttctcccacacactcggatcctccgaacacgccaccaagctcaacgcgatggccgcaccccgcctccctgccccaccgccggcgaggtgcaccgtcgccaccagaggacgagcacgagcaacagaagaccttgaggagaagcccaccatcgaggatatgtccgtcttctccgctgccactgtgccgcctcgcccagccacgcagatacgtggatttgatccaccaccagctcgagtttttgcttggcattgccctggagttggatgcattcaagtatttgcaaatagttgcttcatatggaggatgcacaggtgcaaacaatcttgataagaatggtaaactagactgaggagatttcgagtgggtgagcgcggcaacgacatgttgacaggagacggcgggaagcgctcgacaagctaattaacttgaaaggaagtgtcggggtcttctgtcgggtctgaccgcttttgaacactgagtcaccggttactgtcgagcaggagaggatcacggtcaagtcagtcgggattaagaaagagttcgatgctgatagggtctttgggcaggagtatgcacaaggtagcctcagtgataacttctttgcgatcattgtgccgactgagtacgattgtttaacggccagcactaggaagaaggaaattgttgatgtcatagttaaggctttcaagagcacatgagtatgaacctgaggtggcttgctggcgtacatggagtggtgacagattgcatgctggtagttgatgaaactggtgggatatttgagaaaggtggaatttagatctactgtaagcagtgggaaaagtaggctatttcctgtagaggttctatttaataatgaaaatggaataggcattgaaaaaacaagagatgaagctcaagctcaagatgctgagaaaactctccaaaatttaaagagggatgaatttgcatgagag

SEQ ID NO: 210948 - DNA, 2852 bp, Zea Mays
cccaaacccagaaactgaagactgttgcagccgcgactcctgaatcccgacagctccagcgcctccgctggtccccactgcttcggccatggcggtgcgagccacggtctcccgcttcccggccacgccggaggcgctggagtcgtgcgccgtccagtggggcgtcgccgtgacgcccttcgccgccgcggacgagcacggccaacccccgaccaccggcgccggcggggaccgcgtcccacgctgcgagcactgctgggcgtacttgagcagccactgcgatctggagcgctggggctggacctgcgcgctctgtggcacgctcaacggattcgacgacgaggccgagcgacggttccagcgtcccgacgtgtgccccgagctcaagtcctctttcgtagacctcgaaatcctagtggatgaggcagagggcggaggagacggtgtgcaggcgctgcctgtctatgtggccgcagtggatctcgcatgttctgaagagttcctggaactcgtcaagagtgcgcttcttgcggccctagaagctcttgttccgggctccctatttgggcttatgacattcagccacaagattgggttgtatgatgtccaaggcccgattccactcgtgaagaatgtttttattcctccggacttagaagaagatggtctgcctgttgcccttgaagatgccatgcccctactttgttttttggctccattaatgggcaggttgacacatgcaaggatcaaattgctgctgtcctggagacactgcgacctacatcttcatgggagagaggggttgcttctgggcaggaagaggatactgttttgcttggcagacgtggttttgggacagccatgtctgctttaattgagtacctaagttcagaatatggttctacttttgctttagctcgggtatttgcttttctgtctggtgctcctgattatggagctggtgtgctagataccaggagatatggggagcaatatgctagtaaaggggtagacgctgatcttgcgttgctccctgaacagatacctttctacagagacctagcagctgttgctgttcagtcaggagtatgcatagacatatttgctgtaactgatgaatacactgatttggcttcactgaagtttttaagtatcgaaagtggtggatctttatttctttatgcaagtacagatgattcaacagttccccaagacatataccgattgctaagtcgaccctatgcatttggttgtgttctaaggctgagaacatcttcagattttgagccgggcaattcttatgggcatttcttccctgaccctcaatatgaaaatgtgcaacacatcatctgctgtgattcatttgccacttatgcatatgactttgagtttgcccataacgacggtttctccaggcacacagatcctgctgttgtacagattgcttttcagtacagcgtgattgaacctgtcaaggaaacatcaggcaatggatcacaaccatctgcaagttacaagttctgtctgaagagacggttgagaataagaacattgcagtaccgtccaactaataatatcagcgaaatttatgacagtgtagatccagaggttgtcctgcatatccttgttcataaggttattttagaatccttggataaaggggttagagaaggcaggcatcaagtgcatgcttggctatccctccttgcagcccggtataatcaggccctgagttctgatgtgcgaccgctgtcaagcatagacattgacttctcacagtgcccacagcttcaaacgatacctcagcttgtttttgcattgttgagaagtcctcttcttcgcttgcatgaggaaggcgtgcacccagattacaggatatatctacaatgccttttcagtgcactggagccatcatctgtagctaaagccatatatccggttttaatctcgtattcctcgcctgacaagcaagcattcccacggcacactctgagccatgctgctctaatcatgagcgagagcccaatatttcttctcgacacatttaccaaccttattgtttactattcctcaactgctgatccttcagttccttttcctccaccccatgactgccttttgagaaaaacaataaatggactgaagcaggacagatgtataacccccaagcttacattcatccatggagggaaagatgattcaacattgtttgagagctatctcattgaagagcaagatgttgatggatcgggcttaacaactggttcaggttttgtagccttccgtgagagcgtgaggaacgttgcaggagagatcatacaggaagaaattggaagttagttccagctcgattacctttttggttctgctgcagagggtatcgactaggatgttttagccttaattaatgccgtagcagttaactgaaacgtagatagccaaaatggagagacaattcaatgaataataaaaggaggccacttgatgtatagttgcttctgtcaacaactgctttaggcttgactaggcagagcagcctttctggtacagcggcactgtctgtctctatgctaaaacagacgagttttactacacaataatacaccgtcggaacctggcagactgaaatttgagagaattcaatcccttaatgctcggtttggatattggagggcaaggaattgaattgagttcaatactaaatcaaccatggtattgaaatgagatgtagtttcaattgtatcgtttgaatgttactgaattagagtttggaatcgtgcgatctaattccacgtaataccgaggggtgatgctctgtattgaaaagttgggattctagttatagttcaatt

SEQ ID NO: 210949 - DNA, 1572 bp, Zea Mays
cgaagactggatgtagggacgttttgcctgaaccagtaaaaactttgcgcccaccgagcacaccgtccagagcccagaacgcgcacatagaaattcaattgttgaaaatcggaggttcgaaacaccgacaatatggcacacagatcctgctgttgtacagattgcttttcagtacagcgtgattgaacctgtcaaggaaacatcaggcaatggatcacaaccatctgcaagttacaagttctgtctgaagagacggttgagaataagaacattgcagtaccgtccaactaataatatcagcgaaatttatgacagtgtagatccagaggttgtcctgcatatccttgttcataaggttattttagaatccttggataaaggggttagagaaggcaggcatcaagtgcatgcttggctatccctccttgcagcccggtataatcaggccctgagttctgatgtgcgaccgctgtcaagcatagacattgacttctcacagtgcccacagcttcaaacgatacctcagcttgtttttgcattgttgagaagtcctcttcttcgcttgcatgaggaaggcgtgcacccagattacaggatatatctacaatgccttttcagtgcactggagccatcatctgtagctaaagccatatatccggttttaatctcgtattcctcgcctgacaagcaagcattcccacggcacactctgagccatgctgctctaatcatgagcgagagcccaatatttcttctcgacacatttaccaaccttattgtttactattcctcaactgctgatccttcagttccttttcctccaccccatgactgccttttgagaaaaacaataaatggactgaagcaggacagatgtataacccccaagcttacattcatccatggagggaaagatgattcaacattgtttgagagctatctcattgaagagcaagatgttgatggatcgggcttaacaactggttcaggttttgtagccttccgtgagagcgtgaggaacgttgcaggagagatcatacaggaagaaattggaagttagttccagctcgattacctttttggttctgctgcagagggtatcgactaggatgttttagccttaattaatgccgtagcagttaactgaaacgtagatagccaaaatggagagacaattcaatgaataataaaaggaggccacttgatgtatagttgcttctgtcaacaactgctttaggcttgactaggcagagcagcctttctggtacagcggcactgtctgtctctatgctaaaacagacgagttttactacacaataatacaccgtcggaacctggcagactgaaatttgagagaattcaatcccttaatgctcggtttggatattggagggcaaggaattgaattgagttcaatactaaatcaaccatggtattgaaatgagatgtagtttcaattgtatcgtttgaatgttactgaattagagtttggaatcgtgcgatctaattccacgtaataccgaggggtgatgctctgtattgaaaagttgggattctagttatagttcaatt

SEQ ID NO: 210950 - DNA, 1544 bp, Zea Mays
taagttgttttgaaattatgggccctaaggccaaaattgggctggtttcttgtacacttccacgttcgaggcgcgcggcgagccgggttctcaccaattcgtcttcttccacaaactccaaaaccctagcgccgccgccgccatgtcctcgtctccgtccccggcgaaccgccgtccccggggcccgcttgcgctggggctggagtcctcggcgaacaagatcggcatcggcgtggtctccctctcgggtgacatcctctccaacccgcgccacacctacgtgacaccgccgggtcatggattccttccccgggagaccgcgcagcaccacctcgcgcacctcctccctctcctccgcgccgcgctcgctgagtccggtgtggcccccgctgacctcgcatgcgtctgctacactaaaggccccggcatgggcggccctctccaggtcgccgccgcagccgcccgcgcgctctccctgttatggaggaagcctctcgtggcggtcaaccactgcgttgcgcacatcgagatgggccgcgcggtcactggggccgtggaccccgttgtactctacgtctccggcggaaacacgcaggttatcgcctacagcgaggggaggtacaggatcttcggggaaacgattgatattgccgtcgggaactgccttgaccgattcgccagggtcctagagctctccaatgaccctagccccgggtataacatcgagcagcttgcaaagaagggagaaaaattcattgatgtcccttatgttgtgaagggtatggatgtgtcattcagtggcatattgagctttattgaagctgcggcgattgaaaagcttaaaaataatgagtgcacacctgcggacctatgctactcattgcaggaaactatctttgccatgcttgtcgaaattactgaacgtgccatggcacactgtgattcaaaggacgttcttattgttggtggcgtcggttgcaacgaacgtttacaggagatgatgaagattatgtgctcagaaagagggggtaggctgtttgcaactgatgaccgctattgtatagacaatggggcaatgattgcatatactggtttactggcgtatgcacatggcatgaccactccccttgaggagtcgacatttacacaaagattccgaactgatgaagttcatgcaatttggagagagaaggagatgccggtgctaaataatacccattcagatgcaattgctgaagtttctaaagatgaagcctccatggcaacaccaatcgttatagattactgaggtacaattggcctttacaattttgtcttgctgctaatgttttttcatgatagctaatgcaatttggattgttggagacaatcgctaccaattactctccctctattccaaactaagacattttgctttactagatgcatagtgtttgctatggccctgtttggaacctctagagctaatactgctaaaattagttgtataggtcaaacacccacaactaatatcccaattaattgttagctaactcacagctaac

SEQ ID NO: 210951 - DNA, 2948 bp, Zea Mays
gttagtgccaatgaggtaggtgctgcttgttttatcttgaaatgggctctcatgatggcgaggatgaagagttgccacccccccctccggtgccaccagatgtgattcccattaaagctgaagatgctgtgggtgaatcaccagcaaaccatatattaaagccaaagagattactgatggacaggcctggtataggaagaaaagggcagccgacccagctctattcaaatcactttaaagtcgctgtgaagagtacagaagacgtcttctttcactactatgtaaacctgaagtatgaggatgatcgacccgttgatggtaaagggatcggcagaaaggtgattgataaactgcagcagacatatcgtgcagagctttctaacaaggactttgcatatgatggagaaaagagcctgtttacagttggtggtcttccacaaaaaaagaatgagttcaccgttgtcttggaggacgtatctactggaaagactgctgccaatgggagccctggaggtaatgacagtcctggaggtggtgataggaagagagtgaggaggccataccagacgaaaactttcaaagtggagataaattttgcagcagaggttcctatgagtgctattggtcaagtcattagaggcgaagaatctgagaactccctggaggcgcttcgtgttcttgatatcatactgaggcagcattccgcagaacaaggctgccttttggttaagcaatcatttttctacaacaacccttcatgctttgttgacttgggtggtggtgtgatgggttgtcgtggatttcattcaagcttccgtggcacacagagtggactttccctcaatgttgatgtctcaacaacaatgatcgtgaaacctggccctgttattgattttcttctttctaaccagaatgttaatgatcctagcagaattgattggcaaaaggccaagcgtgctctcaagggcttgaggattagaaccactcctgcaaattcagaattcaagatttttggtctcagcgagaggatctgcaaagaacaaacgtttccgctgaggcagagaaatggtagcaacggagattgtgataccattgaaataactgtctatgactactatgcaaagaaaggaatcgatctaaagtattctggtgatttcccctgtataaatacagggaaggcaaagcgcccaacatattttccaatcgagctatgctcgcttgttccgcttcaaagatacaccaaagctttgtctacgctacaaaggtcatcccttgtggagaagtctagacagaagcctgaagaaaggatgaccgttctaaatgatgcactgcaacgcagtaactacgattctgaccccatgttgagggcatgtggtgtttcagttgctccaaaatttacccaagttgaaggaaggatccttcaagccccaaagctgaaagccggcaatggtgatgatatcttttcacgaaatggacggtggaatttcactaataggaagttttatgaaacctgctctgtgaataagtgggcggtcgttaatttctctgcacgttgtgatgttcggaatcttatccgtgacctgatgaggaatgcatctgcaaagggaattgtatggtttagcttttcacatatcttctattgtagcagttttctgctgctgacgttttcttctggcagcaaatggaggaaccttttgatgtgtttgaagagagtccctctatgaggcgtgcacctgtgtcaagaagggtggatgatatgtttgggcagataaaatcaaaacttcctggagctcctaggttcctcttgtgccttctccctgagaggaaaaattgtgaaatctatggtccttggaagagaaagtgcctggccgagtttggtattgtcacacagtgtctagctccattaagagtcaatgatccgtacctgcttaatttgctgatgaagatcaatgcaaagcttggtggtctgaactcgttgctgcaagttgaagcatcttcgtcaataccacatgtgtcgcaagtacccaccatcatcttaggtatggatgtttcacatggtcatccaggacaagatagaccttcggttgcagcggtggttagttctcgtcaatggcctcttatctctagatatagagcatcagtgcacacccaatctgccagactagaaatgatgtcctcgttgtttaagccgcggggtactgatgatgatggcctcatccgggaatcactgatcgacttctacactagctctggaaagcgaaaaccagaacacataattattttcagggatggagtcagtgaaagtcagtttacccaggtcatcaacattgagctggatcagatcatcgaggcatgtaagtttctggatgagaagtggtcacccaagttcactgtgattgttgctcaaaagaaccaccacaccaagttctttcagacggcatcaccagacaatgttcttcctggaactgtggtggatagtaaagtttgccatcctaagaacttcgacttctacatgtgtgcacatgctgggatgattggaacaacaaggccgacccactatcatgttctgcacgacgagataggtttcagtgccgacgagatgcaggagtttgttcattcgctctcttacgtgtaccagaggagcacgacagccatctcagtggttgctccagtgtgctacgcccacctcgctgcagcccaggtgagcacgttcctgagattggaggagatgtcagacgcgtcctccagccagggaggagggcatacctcggctggcagtgctcctgtgccggagctgcctcgcctgcatgacaaagtcaggagctccatgttcttctgctagctgatgtgcgtgcgcatcaggatcgagctccatgttttgtgtgaaaataagaccctcaaaaaggaggcgaatgagctcattcacgtcttaattaaagcctacagtg

SEQ ID NO: 210952 - DNA, 2845 bp, Zea Mays
gttagtgccaatgaggtaggtgctgcttgttttatcttgaaatgggctctcatgatggcgaggatgaagagttgccacccccccctccggtgccaccagatgtgattcccattaaagctgaagatgctgtgggtgaatcaccagcaaaccatatattaaagccaaagagattactgatggacaggcctggtataggaagaaaagggcagccgacccagctctattcaaatcactttaaagtcgctgtgaagagtacagaagacgtcttctttcactactatgtaaacctgaagtatgaggatgatcgacccgttgatggtaaagggatcggcagaaaggtgattgataaactgcagcagacatatcgtgcagagctttctaacaaggactttgcatatgatggagaaaagagcctgtttacagttggtggtcttccacaaaaaaagaatgagttcaccgttgtcttggaggacgtatctactggaaagactgctgccaatgggagccctggaggtaatgacagtcctggaggtggtgataggaagagagtgaggaggccataccagacgaaaactttcaaagtggagataaattttgcagcagaggttcctatgagtgctattggtcaagtcattagaggcgaagaatctgagaactccctggaggcgcttcgtgttcttgatatcatactgaggcagcattccgcagaacaaggctgccttttggttaagcaatcatttttctacaacaacccttcatgctttgttgacttgggtggtggtgtgatgggttgtcgtggatttcattcaagcttccgtggcacacagagtggactttccctcaatgttgatgtctcaacaacaatgatcgtgaaacctggccctgttattgattttcttctttctaaccagaatgttaatgatcctagcagaattgattggcaaaaggccaagcgtgctctcaagggcttgaggattagaaccactcctgcaaattcagaattcaagatttttggtctcagcgagaggatctgcaaagaacaaacgtttccgctgaggcagagaaatggtagcaacggagattgtgataccattgaaataactgtctatgactactatgcaaagaaaggaatcgatctaaagtattctggtgatttcccctgtataaatacagggaaggcaaagcgcccaacatattttccaatcgagctatgctcgcttgttccgcttcaaagatacaccaaagctttgtctacgctacaaaggtcatcccttgtggagaagtctagacagaagcctgaagaaaggatgaccgttctaaatgatgcactgcaacgcagtaactacgattctgaccccatgttgagggcatgtggtgtttcagttgctccaaaatttacccaagttgaaggaaggatccttcaagccccaaagctgaaagccggcaatggtgatgatatcttttcacgaaatggacggtggaatttcactaataggaagttttatgaaacctgctctgtgaataagtgggcggtcgttaatttctctgcacgttgtgatgttcggaatcttatccgtgacctgatgaggaatgcatctgcaaagggaattcaaatggaggaaccttttgatgtgtttgaagagagtccctctatgaggcgtgcacctgtgtcaagaagggtggatgatatgtttgggcagataaaatcaaaacttcctggagctcctaggttcctcttgtgccttctccctgagaggaaaaattgtgaaatctatggtccttggaagagaaagtgcctggccgagtttggtattgtcacacagtgtctagctccattaagagtcaatgatccgtacctgcttaatttgctgatgaagatcaatgcaaagcttggtggtctgaactcgttgctgcaagttgaagcatcttcgtcaataccacatgtgtcgcaagtacccaccatcatcttaggtatggatgtttcacatggtcatccaggacaagatagaccttcggttgcagcggtggttagttctcgtcaatggcctcttatctctagatatagagcatcagtgcacacccaatctgccagactagaaatgatgtcctcgttgtttaagccgcggggtactgatgatgatggcctcatccgggaatcactgatcgacttctacactagctctggaaagcgaaaaccagaacacataattattttcagggatggagtcagtgaaagtcagtttacccaggtcatcaacattgagctggatcagatcatcgaggcatgtaagtttctggatgagaagtggtcacccaagttcactgtgattgttgctcaaaagaaccaccacaccaagttctttcagacggcatcaccagacaatgttcttcctggaactgtggtggatagtaaagtttgccatcctaagaacttcgacttctacatgtgtgcacatgctgggatgattggaacaacaaggccgacccactatcatgttctgcacgacgagataggtttcagtgccgacgagatgcaggagtttgttcattcgctctcttacgtgtaccagaggagcacgacagccatctcagtggttgctccagtgtgctacgcccacctcgctgcagcccaggtgagcacgttcctgagattggaggagatgtcagacgcgtcctccagccagggaggagggcatacctcggctggcagtgctcctgtgccggagctgcctcgcctgcatgacaaagtcaggagctccatgttcttctgctagctgatgtgaaaataagaccctcaaaaaggaggcgaatgagctcattcacgtcttaattaaagcctacagtg

SEQ ID NO: 210953 - DNA, 3053 bp, Zea Mays
ctcctgtatcaacggggtggtccgtctggaggaggtaccgaggtcccgccgttcgagagacgagctacgcatttaagccggggaggtcggagcagtgagtgggagtagttcagggactgggagaggagaggaagcaggacctgggagacctcgcctcgtccgtcctcctgcctacttccttgcttttggtgctgcttgttttatcttgaaatgggctctcatgatggcgaggatgaagagttgccacccccccctccggtgccaccagatgtgattcccattaaagctgaagatgctgtgggtgaatcaccagcaaaccatatattaaagccaaagagattactgatggacaggcctggtataggaagaaaagggcagccgacccagctctattcaaatcactttaaagtcgctgtgaagagtacagaagacgtcttctttcactactatgtaaacctgaagtatgaggatgatcgacccgttgatggtaaagggatcggcagaaaggtgattgataaactgcagcagacatatcgtgcagagctttctaacaaggactttgcatatgatggagaaaagagcctgtttacagttggtggtcttccacaaaaaaagaatgagttcaccgttgtcttggaggacgtatctactggaaagactgctgccaatgggagccctggaggtaatgacagtcctggaggtggtgataggaagagagtgaggaggccataccagacgaaaactttcaaagtggagataaattttgcagcagaggttcctatgagtgctattggtcaagtcattagaggcgaagaatctgagaactccctggaggcgcttcgtgttcttgatatcatactgaggcagcattccgcagaacaaggctgccttttggttaagcaatcatttttctacaacaacccttcatgctttgttgacttgggtggtggtgtgatgggttgtcgtggatttcattcaagcttccgtggcacacagagtggactttccctcaatgttgatgtctcaacaacaatgatcgtgaaacctggccctgttattgattttcttctttctaaccagaatgttaatgatcctagcagaattgattggcaaaaggccaagcgtgctctcaagggcttgaggattagaaccactcctgcaaattcagaattcaagatttttggtctcagcgagaggatctgcaaagaacaaacgtttccgctgaggcagagaaatggtagcaacggagattgtgataccattgaaataactgtctatgactactatgcaaagaaaggaatcgatctaaagtattctggtgatttcccctgtataaatacagggaaggcaaagcgcccaacatattttccaatcgagctatgctcgcttgttccgcttcaaagatacaccaaagctttgtctacgctacaaaggtcatcccttgtggagaagtctagacagaagcctgaagaaaggatgaccgttctaaatgatgcactgcaacgcagtaactacgattctgaccccatgttgagggcatgtggtgtttcagttgctccaaaatttacccaagttgaaggaaggatccttcaagccccaaagctgaaagccggcaatggtgatgatatcttttcacgaaatggacggtggaatttcactaataggaagttttatgaaacctgctctgtgaataagtgggcggtcgttaatttctctgcacgttgtgatgttcggaatcttatccgtgacctgatgaggaatgcatctgcaaagggaattcaaatggaggaaccttttgatgtgtttgaagagagtccctctatgaggcgtgcacctgtgtcaagaagggtggatgatatgtttgggcagataaaatcaaaacttcctggagctcctaggttcctcttgtgccttctccctgagaggaaaaattgtgaaatctatggtccttggaagagaaagtgcctggccgagtttggtattgtcacacagtgtctagctccattaagagtcaatgatccgtacctgcttaatttgctgatgaagatcaatgcaaagcttggtggtctgaactcgttgctgcaagttgaagcatcttcgtcaataccacatgtgtcgcaagtacccaccatcatcttaggtatggatgtttcacatggtcatccaggacaagatagaccttcggttgcagcggtggttagttctcgtcaatggcctcttatctctagatatagagcatcagtgcacacccaatctgccagactagaaatgatgtcctcgttgtttaagccgcggggtactgatgatgatggcctcatccgggaatcactgatcgacttctacactagctctggaaagcgaaaaccagaacacataattattttcagggatggagtcagtgaaagtcagtttacccaggtcatcaacattgagctggatcagatcatcgaggcatgtaagtttctggatgagaagtggtcacccaagttcactgtgattgttgctcaaaagaaccaccacaccaagttctttcagacggcatcaccagacaatgttcttcctggaactgtggtggatagtaaagtttgccatcctaagaacttcgacttctacatgtgtgcacatgctgggatgattggaacaacaaggccgacccactatcatgttctgcacgacgagataggtttcagtgccgacgagatgcaggagtttgttcattcgctctcttacgtgtaccagaggagcacgacagccatctcagtggttgctccagtgtgctacgcccacctcgctgcagcccaggtgagcacgttcctgagattggaggagatgtcagacgcgtcctccagccagggaggagggcatacctcggctggcagtgctcctgtgccggagctgcctcgcctgcatgacaaagtcaggagctccatgttcttctgctagctgatgtgcgtgcgcatcaggatcgagctccatgttttgtgttagtgaaaataagaccctcaaaaaggaggcgaatgagctcattcacgtcttaattaaagcctacagtg

SEQ ID NO: 210954 - DNA, 2879 bp, Zea Mays
ccagtgtctcctgtatcaacggggtggtccgtctggaggaggtaccgaggtcccgccgttcgagagacgagctacgcatttaagccggggaggtcggagcagtgagtgggagtagttcagggactgggagaggagaggaagcaggacctgggagacctcgcctcgtccgtcctcctgcctacttccttgcttttggtaggtgctgcttgttttatcttgaaatgggctctcatgatggcgaggatgaagagttgccacccccccctccggtgccaccagatgtgattcccattaaagctgaagatgctgtgggtgaatcaccagcaaaccatatattaaagccaaagagattactgatggacaggcctggtataggaagaaaagggcagccgacccagctctattcaaatcactttaaagtcgctgtgaagagtacagaagacgtcttctttcactactatgtaaacctgaagtatgaggatgatcgacccgttgatggtaaagggatcggcagaaaggtgattgataaactgcagcagacatatcgtgcagagctttctaacaaggactttgcatatgatggagaaaagagcctgtttacagttggtggtcttccacaaaaaaagaatgagttcaccgttgtcttggaggacgtatctactggaaagactgctgccaatgggagccctggaggtaatgacagtcctggaggtggtgataggaagagagtgaggaggccataccagacgaaaactttcaaagtggagataaattttgcagcagaggttcctatgagtgctattggtcaagtcattagaggcgaagaatctgagaactccctggaggcgcttcgtgttcttgatatcatactgaggcagcattccgcagaacaaggctgccttttggttaagcaatcatttttctacaacaacccttcatgctttgttgacttgggtggtggtgtgatgggttgtcgtggatttcattcaagcttccgtggcacacagagtggactttccctcaatgttgatgtctcaacaacaatgatcgtgaaacctggccctgttattgattttcttctttctaaccagaatgttaatgatcctagcagaattgattggcaaaaggccaagcgtgctctcaagggcttgaggattagaaccactcctgcaaattcagaattcaagatttttggtctcagcgagaggatctgcaaagaacaaacgtttccgctgaggcagagaaatggtagcaacggagattgtgataccattgaaataactgtctatgactactatgcaaagaaaggaatcgatctaaagtattctggtgatttcccctgtataaatacagggaaggcaaagcgcccaacatattttccaatcgagctatgctcgcttgttccgcttcaaagatacaccaaagctttgtctacgctacaaaggtcatcccttgtggagaagtctagacagaagcctgaagaaaggatgaccgttctaaatgatgcactgcaacgcagtaactacgattctgaccccatgttgagggcatgtggtgtttcagttgctccaaaatttacccaagttgaaggaaggatccttcaagccccaaagctgaaagccggcaatggtgatgatatcttttcacgaaatggacggtggaatttcactaataggaagttttatgaaacctgctctgtgaataagtgggcggtcgttaatttctctgcacgttgtgatgttcggaatcttatccgtgacctgatgaggaatgcatctgcaaagggaattcaaatggaggaaccttttgatgtgtttgaagagagtccctctatgaggcgtgcacctgtgtcaagaagggtggatgatatgtttgggcagataaaatcaaaacttcctggagctcctaggttcctcttgtgccttctccctgagaggaaaaattgtgaaatctatggtccttggaagagaaagtgcctggccgagtttggtattgtcacacagtgtctagctccattaagagtcaatgatccgtacctgcttaatttgctgatgaagatcaatgcaaagcttggtggtctgaactcgttgctgcaagttgaagcatcttcgtcaataccacatgtgtcgcaagtacccaccatcatcttaggtatggatgtttcacatggtcatccaggacaagatagaccttcggttgcagcggtggttagttctcgtcaatggcctcttatctctagatatagagcatcagtgcacacccaatctgccagactagaaatgatgtcctcgttgtttaagccgcggggtactgatgatgatggcctcatccgggaatcactgatcgacttctacactagctctggaaagcgaaaaccagaacacataattattttcagggatggagtcagtgaaagtcagtttacccaggtcatcaacattgagctggatcagatcatcgaggcatgtaagtttctggatgagaagtggtcacccaagttcactgtgattgttgctcaaaagaaccaccacaccaagttctttcagacggcatcaccagacaatgttcttcctggaactgtggtggatagtaaagtttgccatcctaagaacttcgacttctacatgtgtgcacatgctgggatgattggaacaacaaggccgacccactatcatgttctgcacgacgagataggtttcagtgccgacgagatgcaggagtttgttcattcgctctcttacgtgtaccagaggagcacgacagccatctcagtggttgctccagtgtgctacgcccacctcgctgcagcccaggtgaaaataagaccctcaaaaaggaggcgaatgagctcattcacgtcttaattaaagcctacagtg

SEQ ID NO: 210955 - DNA, 3027 bp, Zea Mays
caccagtgtctcctgtatcaacggggtggtccgtctggaggaggtaccgaggtcccgccgttcgagagacgagctacgcatttaagccggggaggtcggagcagtgagtgggagtagttcagggactgggagaggagaggaagcaggacctgggagacctcgcctcgtccgtcctcctgcctacttccttgcttttggtaggtgctgcttgttttatcttgaaatgggctctcatgatggcgaggatgaagagttgccacccccccctccggtgccaccagatgtgattcccattaaagctgaagatgctgtgggtgaatcaccagcaaaccatatattaaagccaaagagattactgatggacaggcctggtataggaagaaaagggcagccgacccagctctattcaaatcactttaaagtcgctgtgaagagtacagaagacgtcttctttcactactatgtaaacctgaagtatgaggatgatcgacccgttgatggtaaagggatcggcagaaaggtgattgataaactgcagcagacatatcgtgcagagctttctaacaaggactttgcatatgatggagaaaagagcctgtttacagttggtggtcttccacaaaaaaagaatgagttcaccgttgtcttggaggacgtatctactggaaagactgctgccaatgggagccctggaggtaatgacagtcctggaggtggtgataggaagagagtgaggaggccataccagacgaaaactttcaaagtggagataaattttgcagcagaggttcctatgagtgctattggtcaagtcattagaggcgaagaatctgagaactccctggaggcgcttcgtgttcttgatatcatactgaggcagcattccgcagaacaaggctgccttttggttaagcaatcatttttctacaacaacccttcatgctttgttgacttgggtggtggtgtgatgggttgtcgtggatttcattcaagcttccgtggcacacagagtggactttccctcaatgttgatgtctcaacaacaatgatcgtgaaacctggccctgttattgattttcttctttctaaccagaatgttaatgatcctagcagaattgattggcaaaaggccaagcgtgctctcaagggcttgaggattagaaccactcctgcaaattcagaattcaagatttttggtctcagcgagaggatctgcaaagaacaaacgtttccgctgaggcagagaaatggtagcaacggagattgtgataccattgaaataactgtctatgactactatgcaaagaaaggaatcgatctaaagtattctggtgatttcccctgtataaatacagggaaggcaaagcgcccaacatattttccaatcgagctatgctcgcttgttccgcttcaaagatacaccaaagctttgtctacgctacaaaggtcatcccttgtggagaagtctagacagaagcctgaagaaaggatgaccgttctaaatgatgcactgcaacgcagtaactacgattctgaccccatgttgagggcatgtggtgtttcagttgctccaaaatttacccaagttgaaggaaggatccttcaagccccaaagctgaaagccggcaatggtgatgatatcttttcacgaaatggacggtggaatttcactaataggaagttttatgaaacctgctctgtgaataagtgggcggtcgttaatttctctgcacgttgtgatgttcggaatcttatccgtgacctgatgaggaatgcatctgcaaagggaattcaaatggaggaaccttttgatgtgtttgaagagagtccctctatgaggcgtgcacctgtgtcaagaagggtggatgatatgtttgggcagataaaatcaaaacttcctggagctcctaggttcctcttgtgccttctccctgagaggaaaaattgtgaaatctatggtccttggaagagaaagtgcctggccgagtttggtattgtcacacagtgtctagctccattaagagtcaatgatccgtacctgcttaatttgctgatgaagatcaatgcaaagcttggtggtctgaactcgttgctgcaagttgaagcatcttcgtcaataccacatgtgtcgcaagtacccaccatcatcttaggtatggatgtttcacatggtcatccaggacaagatagaccttcggttgcagcggtggttagttctcgtcaatggcctcttatctctagatatagagcatcagtgcacacccaatctgccagactagaaatgatgtcctcgttgtttaagccgcggggtactgatgatgatggcctcatccgggaatcactgatcgacttctacactagctctggaaagcgaaaaccagaacacataattattttcagggatggagtcagtgaaagtcagtttacccaggtcatcaacattgagctggatcagatcatcgaggcatgtaagtttctggatgagaagtggtcacccaagttcactgtgattgttgctcaaaagaaccaccacaccaagttctttcagacggcatcaccagacaatgttcttcctggaactgtggtggatagtaaagtttgccatcctaagaacttcgacttctacatgtgtgcacatgctgggatgattggaacaacaaggccgacccactatcatgttctgcacgacgagataggtttcagtgccgacgagatgcaggagtttgttcattcgctctcttacgtgtaccagaggagcacgacagccatctcagtggttgctccagtgtgctacgcccacctcgctgcagcccaggtgagcacgttcctgagattggaggagatgtcagacgcgtcctccagccagggaggagggcatacctcggctggcagtgctcctgtgccggagctgcctcgcctgcatgacaaagtcaggagctccatgttcttctgctagctgatgtgaaaataagaccctcaaaaaggaggcgaatgagctcattcacgtcttaattaaagcctacagtg

SEQ ID NO: 210956 - DNA, 2658 bp, Zea Mays
tatggaacaagtaaaacaaaatttctgcatcagcaatcaggcacaagactgaatgacgtggtaggtgctgcttgttttatcttgaaatgggctctcatgatggcgaggatgaagagttgccacccccccctccggtgccaccagatgtgattcccattaaagctgaagatgctgtgggtgaatcaccagcaaaccatatattaaagccaaagagattactgatggacaggcctggtataggaagaaaagggcagccgacccagctctattcaaatcactttaaagtcgctgtgaagagtacagaagacgtcttctttcactactatgtaaacctgaagtatgaggatgatcgacccgttgatggtaaagggatcggcagaaaggtgattgataaactgcagcagacatatcgtgcagagctttctaacaaggactttgcatatgatggagaaaagagcctgtttacagttggtggtcttccacaaaaaaagaatgagttcaccgttgtcttggaggacgtatctactggaaagactgctgccaatgggagccctggaggtaatgacagtcctggaggtggtgataggaagagagtgaggaggccataccagacgaaaactttcaaagtggagataaattttgcagcagaggttcctatgagtgctattggtcaagtcattagaggcgaagaatctgagaactccctggaggcgcttcgtgttcttgatatcatactgaggcagcattccgcagaacaaggctgccttttggttaagcaatcatttttctacaacaacccttcatgctttgttgacttgggtggtggtgtgatgggttgtcgtggatttcattcaagcttccgtggcacacagagtggactttccctcaatgttgatgtctcaacaacaatgatcgtgaaacctggccctgttattgattttcttctttctaaccagaatgttaatgatcctagcagaattgattggcaaaaggccaagcgtgctctcaagggcttgaggattagaaccactcctgcaaattcagaattcaagatttttggtctcagcgagaggatctgcaaagaacaaacgtttccgctgaggcagagaaatggtagcaacggagattgtgataccattgaaataactgtctatgactactatgcaaagaaaggaatcgatctaaagtattctggtgatttcccctgtataaatacagggaaggcaaagcgcccaacatattttccaatcgagctatgctcgcttgttccgcttcaaagatacaccaaagctttgtctacgctacaaaggtcatcccttgtggagaagtctagacagaagcctgaagaaaggatgaccgttctaaatgatgcactgcaacgcagtaactacgattctgaccccatgttgagggcatgtggtgtttcagttgctccaaaatttacccaagttgaaggaaggatccttcaagccccaaagctgaaagccggcaatggtgatgatatcttttcacgaaatggacggtggaatttcactaataggaagttttatgaaacctgctctgtgaataagtgggcggtcgttaatttctctgcacgttgtgatgttcggaatcttatccgtgacctgatgaggaatgcatctgcaaagggaattcaaatggaggaaccttttgatgtgtttgaagagagtccctctatgaggcgtgcacctgtgtcaagaagggtggatgatatgtttgggcagataaaatcaaaacttcctggagctcctaggttcctcttgtgccttctccctgagaggaaaaattgtgaaatctatggtccttggaagagaaagtgcctggccgagtttggtattgtcacacagtgtctagctccattaagagtcaatgatccgtacctgcttaatttgctgatgaagatcaatgcaaagcttggtggtctgaactcgttgctgcaagttgaagcatcttcgtcaataccacatgtgtcgcaagtacccaccatcatcttaggtatggatgtttcacatggtcatccaggacaagatagaccttcggttgcagcggtggttagttctcgtcaatggcctcttatctctagatatagagcatcagtgcacacccaatctgccagactagaaatgatgtcctcgttgtttaagccgcggggtactgatgatgatggcctcatccgggaatcactgatcgacttctacactagctctggaaagcgaaaaccagaacacataattattttcagggatggagtcagtgaaagtcagtttacccaggtcatcaacattgagctggatcagatcatcgaggcatgtaagtttctggatgagaagtggtcacccaagttcactgtgattgttgctcaaaagaaccaccacaccaagttctttcagacggcatcaccagacaatgttcttcctggaactgtggtggatagtaaagtttgccatcctaagaacttcgacttctacatgtgtgcacatgctgggatgattggaacaacaaggccgacccactatcatgttctgcacgacgagataggtttcagtgccgacgagatgcaggagtttgttcattcgctctcttacgtgtaccagaggagcacgacagccatctcagtggtgtctgtttttgtgtttg

SEQ ID NO: 210957 - DNA, 1347 bp, Zea Mays
gcgacgaactcatcactgcactggtggtgtccgtggtgctccacagagtgaagcgatatccaggagaggcgacgatgcgcaagtgggcgctctcctccacgctcctcctcctctttctcctcaccacactccccgacccagctaagaagctacaagtgaatgccgaggagagcagccatgacttggctaacccaccgaaggtagaggagaagtttggtgctgtccctcatggcctgtccaccgactctgaggttgcccagagaagaagctgatccgcaaagcccttgacatgatcaggaaacttgctgaagaagaccctgatgagtacagcaacaaggataagacagatgaagagaaaagcgagatggaggagaagaagggccagtacgccaagttctggaatgagtttggcaaatcaatcaagctgggtatcatcgaagacgcgactaacagaaaccgccttgcgaagcttcttagatttgagagtaccaagtcggatggcaaacttgcctcccttgacgagtacatctcacggatgaagtcagggcagaaagacatcttctacatcacgggaagcagcaaagagcagctggagaagtctccattcctcgagaggctaaccaagaagaactacgaggtcatcttcttcaccgaccccgtggacgagtacctgatgcagtacctgatggactacgaggacaagaagttccagaacgtgtccaaggagggactgaagctgggcaaggactcgaagctcaaggagctcaaggagtcgttcaaggagctgactgactggtggaagaaggccctggagagcgggttcaacctccccgaccccaaggagttcgcgtccagcatctacaagtcggtgcagaagggcctggacctgagccccgacgcgaccgtggaggaggacgaggccgaggagcagccggaggtggaggagaaggagccggagccggagccgtcgtcctacgacaaggacgagctttaggctttcggatttgttttcaagtctagctagctcccgctttactaggaatgtgatgatatcggtgactgcctggttcaagtcacgtgatggttcttgagagacgcccatttttttcccatgcaacgtgatacgggatttttgcctgtctttgtacctactctacaagctttagttcagtgattcagtctaattaattagtggtttgcagttaccttgcaatcttcctaagactgtcttcaacgcttccctctactgcttcccctcgctacttcagcggctacagttgaacgctaaatgtcacaggttctctctacgagcccctctacccggtagcattcttccctctccctcta

SEQ ID NO: 210958 - DNA, 1260 bp, Zea Mays
ggggcaccggcgcaccgcacatcggtgcctaggtcactcgggcccactccacagaactacggaagaagaagaagcagtcggcagcaaactgaatggcgcttcgcgctgtggagctccggagattccttctccggcgcatcggcggcggcgaggcggccctgcctcctctcgcgtggcgcggccggccagcgagcacatccgccccggcggacgacgagctcgcggggaagagcgcctacgaggtcctcggggttggggagaccagttccagcgccgagatcaaggcttccttccatcgcctagccaaagagacccacccagacgtcgccgcggctgctggttcccgacggttccttcagatcctcgccgcctacgagatcctatcagattcacagagaagggctcactatgatagctacctgcgatcgcagaggcgggttgtggggaaacatcccaggccatctcagttcgtgtacccaagtggttcaggctcaggcattgtggtacctcgagagagcaatgttgttgaatggctgaaatggtacaggcttaccattgacgacatagttaccaagaagagggttgccactggctctggttattttgaaaggctcgaaagcgagctgtacacggctatccatgctgcatactatggccctgatgtcgactccatggatgtccttcctgattgctttgaagccgaggagagatctgcatatgaaacctctgagctattacaccttgtttcaggccgtgatctttttggtattgttactgtaactgatagtgtcaaagagctgtcagatgtttgtcgtgaaaaactggtaccctctggttgtagatcttcggaatttactcatgttgtttcaagaaatgcgaataagaattcaatatctatgaatcctgttgatatgaacaagcaagaaatgcgatatgaaaatgatgttccttcatcagattccttcaaggacattgagttgcaaatatgtgggaaattagttgctactgcgactaggagccccaactgcgattgcattgacaaatcggatttggaagaagatcacattcatgtgtatcttgttccaaatgcaaatatatctgatttaacacatgggaaacttctcctcggcacaattactgggttagccaccactggtgaggaaggatcttgctgtgtctacgatggtcacaacataaagacacacattattatgaagcacaggacattgatgaaatatggatgccctgaagaccatggtt

SEQ ID NO: 210959 - DNA, 5511 bp, Zea Mays
ggattgggagctgggtggtggtgggtggtggcacatcatcagttggcgtcgtggtggggggtatgcctccatacccgggcaagccataggggcagcttgctggaagggacagcgccgctgatgcaggcggagtctccactgctgcaatgcgtgaggacatggaggacatctgcgttgcgaaggcccctagttggcgctggacttcggcaagggcggtggtgatcgctgccaactccgacgcctgggtggcggacgctacactgtcgtcggtgttggatcctggcatctccgataccaaattggctgctctttatcaaactgactttcgaccagttccactggaggaattcataaaagttggtaatcaaatatttgataaagacatgaacgttgttcgtgtccttcccaaagtagctgaccatggtggcaaggatccagatcatattgttgaattgtgtaatgaggttgttcttcagggccattctgtgcttttgttttgctccagtcgtaaaggctgcgaatcaactgcaaggcatgttgccaagttcttgaaactaccctctgttggaacaactgatgttagttcggagttttcagatgctgcagctgctattgaggccttgaggaggtgccctgctggattggatccaatattgggagaaacccttccttttggtgttgcatatcatcatgctggtcttacggtcgaggagagggagattgtggaatcatgctaccgtaaaggccttgtccgtgttctgactgccacttcaactttagctgctggtgttaacttgcctgctagacgggttatattcaggcagcccaagataggtcgtgattttattgatgggactcgctatagacagatggctggtcgtgctggtcgaactggaatagacacaaaaggagaaagtatacttgtatgcaggcctgaagaggtcaagagagttacaggtattattagaagcaattgccctcccttggagtcctgcctctcagaagataaaaatggaatgactcatgcaattatggaggttgttgctggtgggattgttcaaactgcaaatgatattcatcgttatgtgcggtgtacgctgcttaattccacaagaccttttgatgatgtcgtgaagtcagctcaagactcccttcgttggttatgccataaaagctttcttgagtggaaccatgagaccaagatatactccgctactccccttggtagagctgcttttggaagttcactcaaccctgaggaatcattggttgttcttgatgatctttcgagggcaagagaaggctttgttctggcatctgatttacatttagtttacttggtcacacccataaatgtagaccttgaacctgattgggaattatattacgagaaattcatgcaactttcttctcttgagcagtcagtaggcaatcgggttggagtaattgaacccttcttgatgcacatggctcatggggcgtcgataccttttcgtgcaaggcctgagagaaacaccgggttaagtaacaagtctgcacaagctgctggaaatactcttgttagtgagcacacaatcagagtgtctaagcgcttttatgtggctttaatgttatcgaggcttgctcaggagattcctattgctgatgtttgtgagacatttaaggtcgccagaggtatgattcaggcactgcaggaaaatgctggcaggtttgcttcaatggtttctgcattttgtcaaaggcttggttggaatgatttagaaggccttgtttcgaaattccaaaatcgtgtctcttttggagttagggcagagattgcagaactgacatcaattccatttgtcaagggttcacgtgcaagggctttgtacaagtctggtctgcgtactcctgttgccattgctgaagcatctattcctgaaattgcaaaagctctttttgaatcttctgcttggtctgggcaaggtgattctggtttacgacgaatgcaatttggtgtagcaaaaaaaataaaaaatggagcccgcaaaattgtcctggaggaggcagaagccgccagagtagcagcattctcagctttcaagtcacttggtgtggaagttccccagttcactgcacctccactcgcagctattgaggaatatccaactcacgataccatagaccaagctaagttaaataagctagcttctggtacccattctagagatgataaaaatatgaatacttgctctgattatgctactccaagggcttctacatacagtctaagaaaggacacaagtcctgctccttccattcaaatgaaagagaatgcaggactatctaaaaatgtgcaaatcactagacagggagcatcatcatctttgtcaacagaaattgctgatggatctagtagagatgtggctgaaaaaggtcctgtccatgcatataacttcccagggggatttgattgttttcttgatcaatggtccacagctagtaattttttctttgatgttcattttatcaagagatcgatgaaaccatctttgaacctttttgaagtttttgggttggctgtctgttgggaaaaatctcccatatactactgcaacttcccaaaagatctagtcactactggcaacaataacatcaaggaaatgtggggtaattttcagagaagatgggaaaaaatagcggacattatgaaacaaaagagtgtccaaaaaatgacatggaatttaaagatccagatccaggcacttaaatcaccttatatttcttgccaacggcttgaaaggtttcatcttgaccataaaatgctggacaaagttgaagtgcttaacaactcatatatgttgttatcaccagtctctgtctacaatggattggatatatgtctgctggcgtgggttctatggccagatgaggaaagcagagcggttccaaatcttgagaagtttgtcaagaggcgacttcatagtcaagaagctgctgctgcaaatcgcgatggaagatggagaaatcagatgcacaaagcagcacacaatggctgctgtagacgtgctgcacagacacgggctttgtatactgttctgaagaaattacttactcaaaatctttctgttttggttgaaacaatcgaggccccattggttaatgttcttgctgatatggagctttggggaattggcgctgacatggatgcttgtctccgtgcgaggcatattataacaaaaaagctgaaggaactagagaaagaagcttacagattggcaggcaagaatttctctctaaatgctactgctgatatcgcagacattctatatacacacctaaaattgccagttccaaaaggctgtgagaaagggaagctgcatcctagcactgacaagcagtctttggaccacctaagggatcaacaccccattatcccattaattaaggaacacagaacattagcaaaactgttaaatggcacgttgtggtccatttgttcacgtgctcaattgtgcactcaatcacaaaggtacatcatacatggaaattggcttcagacgtcaactgccactggccgtttgtccatggaggagccaaatctgcagtgtgttgagcatgtggtggaattcgatacagggaaaagcgataaagattactcaagcatttcagttgatgatcatcataaaatcaatgcccgtgattttttcatacctaccaaggagaactggttattcataactgctgattactcacagattgagttgcgtttaatggctcacttttctaaagatcatatgttggttgaacttctaaagaaacctgatggtgatgtttttaccatgattgcttcaagatgggctgagaaagaagaggccttgatttcttccaaagagagagaaaacactaaaagattcatatatggcatcctttatggaatgggtgcaaactcccttgcagaacaacttcagtgcagcactgaggaagctgcacagaaaattcaaagctttaggagattttttcctggtgtttcctcatggttacatgaagttgtgttatcctgtcgccaaaaaggatttgttgagactttattaggccggcgacgtgttcttacaaaaataacggctggcaatagcaaagagaaagctaaagcacagaggcaagcagtaaattctatttgccagggttctgctgctgatattattaaggtggctatgattagagttcattcaataattactaacagaactagtgcagctgattccacagatgaagttacaaggaaattttcagaacttggtggccagtgtcaccttattttgcaggtgcatgatgagttggtattagaagttgatccgtgcatggtagcacaggctggaaggttgttacagatatgtatggaagaagcagcttcactattggtacctttgcgcacaaagataaaggtgggaaaaacttggggttcactagaaccattccatcctgagccttgtttgatgcaaatggtgaatgtcagttggatgccaatgtttcatgacatgcaaggtcctggaagaaggctgaacaatttccaatatgcccccacaggggaccttggtgattctgtctggtgttcttcggtagaaccttcattgctatgtctacagtcttctgtcattgctgaccgtatgtgaaatcaacgcaacagcgaccagctccattactgaggatttgctatggactggtgattatcattatgattccatgtggcatgcaagaagcatatatatatcaccaatagatgctgttaaagggtttaaggtgtatttgaaaggtcttcctagttatactgcgaatcttttagataaacccttaagaaattggagggcctagtatatggtgatttttcttttgctaggcccagcgctaaaaaaccgattatggggtttattcaaagatgaaatttcatcctgtaactacaggttcaaggtgtatttggtttgatggatatcactatggacaagcgatggttggtttttgtacaagttggatgttgataaaaatgttggtatccatgccacacaaaaaaagcctaaccagcacccatattttgtaatccttgtcaagtatgttatatggtttacttgatagctctagcgaggctatccagtacctcaccttcaccctcatatttgtaatccttgtccacataattattagtatgttatatggttatttagtaattacgatggaaatattatttttggtaagcgcaaatatgcatgtttcgtatatcatttagggaaatacatttgttgtaattagtgttatgataacaaaattagtattggtgcatatttattagtgtataaatgttattatttttagataatatagatgtagttagttaattgttctttaccatctaaaaaatggtttatcctatttatcctatcacatagcaatatggattgttggaaatggaaatcctaaccctacttaggacggacacttgtatatatatagtgaactatacatggggttgggtcaaag

SEQ ID NO: 210960 - DNA, 1201 bp, Zea Mays
aggtgagagccatgatttagcctggactatatacttatcagattgtgtatgggatactgatactcccaggagagagagaaaaggcatgggaaacaagcaagagaacaaaagcgatgggcacgcaggtgttaggaaagtgagaaaccatcagcagggcagcaatagttacaggcgtgtctgataaaagtcatgtgatggaccagcagcgcgcggcagcttgttcatgctgcagcgctggtagctagctgcttaaagtgagtgtcccggggaacagcatgctcagcatggtgacagttcggtgtgggcactgcacaaatctactgtcagtgaatctgagagcactcatgcactcagtcccagaacaagatcagctccaggagaacatcagggtccatggcacgttgcgtgagcatcatcagtgcggcggcggccaccatctggagctgggctcttcgtcgtcctcaaggttccggctgccgatgatgatgtcgtacgcgccgcagaacgagcacttgctgcaggaacagacactgaacaacgctcgtccggctcctgagaagaggcagcgggttccgtcggcgtataacagattcatcaaggaagagattcgcaggatcaaggcgaacaaccccgacattagccacagggaagccttcagcacagcagccaagaactgggcacattatccgaacatccatttcggcttaaactccggccgagagggtggcaagaataagctcgtggacgaggctgtcgcggcggtggcggtggctccgaagaagatccaaggtttctactgatcgatgccggtcgatcgagggatcagcgctcgtcgtcatcaactggccggccgggtgtggaagaattaataataccacacaaattataaatgtactgtgatgagtaaattaaagagttatagtggggaatgaagggagagagagatatatagcaatacgtatattaccttaccttattaatgagtgcaaaaaaaacacttgtgaaggtttctactgatgcatgagtgggaagtgaagcatcatacaatcacatgaattatattactactggcatggtgggcgccatgcatggtttaaattaaccgagaagacgacttaataaatcattatttgacctaccatgttattgcacacatatatagatgttggatgcagcgcatatgcatatgtgttagctaggc

SEQ ID NO: 210961 - DNA, 956 bp, Zea Mays
acaaaagtgagtgtcccggggaacagcatgctcagcatggtgacagttcggtgtgggcactgcacaaatctactgtcagtgaatctgagagcactcatgcactcagtcccagaacaagatcagctccagcaggagaacatcagggtccatggcacgttgcgtgagcatcatcagtgcggcggcggccaccatctggagctgggctcttcgtcgtcctcaaggttccggctgccgatgatgatgtcgtacgcgccgcagaacgagcacttgctgcaggaacagacactgaacaacgctcgtccggctcctgagaagaggcagcgggttccgtcggcgtataacagattcatcaaggaagagattcgcaggatcaaggcgaacaaccccgacattagccacagggaagccttcagcacagcagccaagaactgggcacattatccgaacatccatttcggcttaaactccggccgagagggtggcaagaataagctcgtggacgaggctgtcgcggcggtggcggtggctccgaagaagatccaaggtttctactgatcgatgccggtcgatcgagggatcagcgctcgtcgtcatcaactggccggccgggtgtggaagaattaataataccacacaaattataaatgtactgtgatgagtaaattaaagagttatagtggggaatgaagggagagagagatatatagcaatacgtatattaccttaccttattaatgagtgcaaaaaaaacacttgtgaaggtttctactgatgcatgagtgggaagtgaagcatcatacaatcacatgaattatattactactggcatggtgggcgccatgcatggtttaaattaaccgagaagacgacttaataaatcattatttgacctaccatgttattgcacacatatatagatgttggatgcagcgcatatgcatatgtgttagctaggc

SEQ ID NO: 210962 - DNA, 3722 bp, Zea Mays
ctctcacacacacggagagggagcgagcgagggcgtgtccttgcgcgttcgcctcttgtgacgcgcgcggcgttctccgtgcacccgtttaattccgcccagctgtctccccattccaatgccgagtgttgatctctcagcaaggagggagaaagcagaaggaccggttttgatcttctgagcggttcatggttatggatcgcgcgggttggctctggaggcgcaagtcatcggacaagagccccgggggcagtgacagctctctgtccgtgtcgtcacattccgagcagtgctctgatgatcagggtcaatatcaatcccctgaagccttttcaagaagtaagtatgattacagccaagaaactggagtagcaagatccttgaatggcaagctagcagcaggggtcaatatgaacaattttaatccagagcatggtcaatcatttgaacaacatatatcctccaatgttggagatgaagagatcaaggagaccttggagagtttgaactacaaactttctgctgcactttcgaccatcagagcaaaagaagacttggtgaagcagcatgctaaagtcacagaagaggctgttgcaggttgggaacaagctgaagctgaagttactactctgaaggggctacttgaagcttcttgtcggaagaatgcttctctccaggatcaagtcagccacatggatgaggccctcaaggaatgcgtcaggcaactgcggctggcaagggaagaacaagaggacaaagtccgtgaagtcgtttcgaattctctggtcccgcagtctgaaaaccctgagctccaaaaccatatcgcagagctaaaaaagcggctggaaatgaccagattagaagcgtcatcttccatgatattacagcatgatctacatgaaaggcttcgggcgattgagagagagaacttggaccttaaggccaaacatcaggcaattgagaaagagaatatagatctcaaggccaaactgcttgtacagtccaaggacctgaagatactgatgttggaaagagatctgagcaatcaagtagcagagacagcaagtaaacaacacttggaaagtgttaaaaagattgccagggttgaggcagaatgccgcaggctacagcatctaacgcggaaaacaacactgatcaataattctagatccacacaaaacaattgctgcatggaatcactgactgacagccagtccgaccatggggagcatatggtgggcgttgataacgatctgcaaaattccgattcatgggcattagctttgattgctgagcttgatcagttcaagaatggcaaggatggttcaagaaatattgtgaacaatcctgttgagattgacataatggatgatttccttgagatggaaaggttagctgcattgcccgaatcagatggcacaagctctaactttgaaatggaaacagattctgacaaagctgtcacaagaaacagctccttgaaggtcaaaaatgaagaattgcaaaacaaggtcgcaaatttgcaggaaaagtttgaagcaattgcatgcgagaaaagggagcttgagctggcacttgtggaagttagagatcagcttgagatttcctgcgatgcgctagtggtggcaaagaacaggctggttgaaatgcagatgcagttggactcagcaaatgattccaaactttctgctttggatgatgtggagcgtttagactctgagaggaaggctttggaattgcagctggagtccaaatctgtagaagtcgaggagctacttattgctgtagcttcattggaggaaaatgcagagcagaaagagttggagtcgcagttagaactgatgtccgcacaagctacagaacttcgcctgactgtggcatcactggaagagagaattcaggctgagagagatctttctgtgcagcagaaacaaaacgcagaagccatgttgaatgctaaagaagaactggaagcacagctgtgttcagcaaacactgaaatggggaaactgcgtgacattatcaaagcactagagaatgaagtcaaaaaggagagagcactgtgtgaagaattaacagcacagttacagataaaggttgaagcagctgtcaatgcagttaaagaatcattggaggcacagctgtgttcagcaaatactgaagcagggaagcttagagatgttgttaaagcactccaggatgaggtagaaaaagagaaggcattacgtgaagagcttgcagcaaacctagaagtgaaaacaagagcagcaagaactgctgaggttgttaaagaatccttggaggcacagctgtcttcagcacacgctgaaatgcacaaactggaagagatcacaaaacaactacagaatgaggtagaaaaggagaaggaattctcagcacagttagagatgaaaattgaagtagagagagctcgttctattgagtctgctaaagaatcattagaggaacaactcctgttagtgaactcggaagctgcaaaactgcatgacatggtgtctgcgcttgagcacgatgtggaaaaggagaagtttttttctgcagagctccagatgcagctagaagctctagaggttgtcaaaaaggtattggagtctgaggcggagtctgcacatcaggatgccaaaattctcaagcagaaggtagagtcattggaagcaaaactcgaggagcagatgtcatcagctgacgaattcactgagactttgcagtcagagaggatggttatagagcataaacttaaaacagcagacggggaaatattaaaacttacaaacaaggtgagcttgctccatagggagatcgagcaggagaggttgctgtcagaagagtatgaacagaaatgccaaaagctggaagctcagatgtcaagagatagccgtgacgcaaagctctggcgtcttgcaaattcgaatggagatctgaaggttaagaaggagaaggagctcgctaacgcagctgggaagctcgcagaatgccagaagacaattgcttctctggatcgtcaaatcaaatcactgacagatctcgacagtgtggtgctagagcctgaaaggcttgaatccagcagggacatgccactgccactggacttcagaaatggcgatgctgaatttgctatgtttgcggatgacttgtacgactttgaccttccaaacaacgacacaagcttcttttctccacccccgtcgtcgatccagccctcgtctccaccctctgagatgtcagtatttgcaggggggctctcgactcttagcagttacaggagcaaaagagcaattagaaggtgatgaaaggaaggctgcccaaatgccatgctaacaaacagtccatggatgccgccatatgtgtaggtaggtcgatgtacattacagagactgattgttagatttgtgtgatgaacatccattccagcaagctcggtttttgtagcctgcttgatgaggtcttactggtggtcgtttgctgtaaaatgtaaacatggttatcttgtgtgattctagttacaggaaagcaccgagcaagtgcatatttagtgtccactagttaggtaccccgtactagaatatttaatttatttaaatatgaaggaagcatgtcacttatttctctaaatttacaacaatagttaggccctgtacgttgatacgatttctatatattacataaatatatcttattttaattagatagttgtttaaaca

SEQ ID NO: 210963 - DNA, 3861 bp, Zea Mays
tgtcactccatcgcacgcatcgccgccactccgctcggcccgacgcccgagaagcattcgaggaaggaaggaaggagatccgattccaaccaagccgggagctgagagctcccccaccggccccgccgcacctgcagccgctcgcttcggcttcgctcaggctcagcagctgtgtgtgcgtctgcctgtggtgtggactccccctcacatggcgagggcggaggagagccgcaccccgcagctgtctccccattccaatgccgagtgttgatctctcagcaaggagggagaaagcagaaggaccggttttgatcttctgagcggttcatggttatggatcgcgcgggttggctctggaggcgcaagtcatcggacaagagccccgggggcagtgacagctctctgtccgtgtcgtcacattccgagcagtgctctgatgatcagggtcaatatcaatcccctgaagccttttcaagaagtaagtatgattacagccaagaaactggagtagcaagatccttgaatggcaagctagcagcaggggtcaatatgaacaattttaatccagagcatggtcaatcatttgaacaacatatatcctccaatgttggagatgaagagatcaaggagaccttggagagtttgaactacaaactttctgctgcactttcgaccatcagagcaaaagaagacttggtgaagcagcatgctaaagtcacagaagaggctgttgcaggttgggaacaagctgaagctgaagttactactctgaaggggctacttgaagcttcttgtcggaagaatgcttctctccaggatcaagtcagccacatggatgaggccctcaaggaatgcgtcaggcaactgcggctggcaagggaagaacaagaggacaaagtccgtgaagtcgtttcgaattctctggtcccgcagtctgaaaaccctgagctccaaaaccatatcgcagagctaaaaaagcggctggaaatgaccagattagaagcgtcatcttccatgatattacagcatgatctacatgaaaggcttcgggcgattgagagagagaacttggaccttaaggccaaacatcaggcaattgagaaagagaatatagatctcaaggccaaactgcttgtacagtccaaggacctgaagatactgatgttggaaagagatctgagcaatcaagtagcagagacagcaagtaaacaacacttggaaagtgttaaaaagattgccagggttgaggcagaatgccgcaggctacagcatctaacgcggaaaacaacactgatcaataattctagatccacacaaaacaattgctgcatggaatcactgactgacagccagtccgaccatggggagcatatggtgggcgttgataacgatctgcaaaattccgattcatgggcattagctttgattgctgagcttgatcagttcaagaatggcaaggatggttcaagaaatattgtgaacaatcctgttgagattgacataatggatgatttccttgagatggaaaggttagctgcattgcccgaatcagatggcacaagctctaactttgaaatggaaacagattctgacaaagctgtcacaagaaacagctccttgaaggtcaaaaatgaagaattgcaaaacaaggtcgcaaatttgcaggaaaagtttgaagcaattgcatgcgagaaaagggagcttgagctggcacttgtggaagttagagatcagcttgagatttcctgcgatgcgctagtggtggcaaagaacaggctggttgaaatgcagatgcagttggactcagcaaatgattccaaactttctgctttggatgatgtggagcgtttagactctgagaggaaggctttggaattgcagctggagtccaaatctgtagaagtcgaggagctacttattgctgtagcttcattggaggaaaatgcagagcagaaagagttggagtcgcagttagaactgatgtccgcacaagctacagaacttcgcctgactgtggcatcactggaagagagaattcaggctgagagagatctttctgtgcagcagaaacaaaacgcagaagccatgttgaatgctaaagaagaactggaagcacagctgtgttcagcaaacactgaaatggggaaactgcgtgacattatcaaagcactagagaatgaagtcaaaaaggagagagcactgtgtgaagaattaacagcacagttacagataaaggttgaagcagctgtcaatgcagttaaagaatcattggaggcacagctgtgttcagcaaatactgaagcagggaagcttagagatgttgttaaagcactccaggatgaggtagaaaaagagaaggcattacgtgaagagcttgcagcaaacctagaagtgaaaacaagagcagcaagaactgctgaggttgttaaagaatccttggaggcacagctgtcttcagcacacgctgaaatgcacaaactggaagagatcacaaaacaactacagaatgaggtagaaaaggagaaggaattctcagcacagttagagatgaaaattgaagtagagagagctcgttctattgagtctgctaaagaatcattagaggaacaactcctgttagtgaactcggaagctgcaaaactgcatgacatggtgtctgcgcttgagcacgatgtggaaaaggagaagtttttttctgcagagctccagatgcagctagaagctctagaggttgtcaaaaaggtattggagtctgaggcggagtctgcacatcaggatgccaaaattctcaagcagaaggtagagtcattggaagcaaaactcgaggagcagatgtcatcagctgacgaattcactgagactttgcagtcagagaggatggttatagagcataaacttaaaacagcagacggggaaatattaaaacttacaaacaaggtgagcttgctccatagggagatcgagcaggagaggttgctgtcagaagagtatgaacagaaatgccaaaagctggaagctcagatgtcaagagatagccgtgacgcaaagctctggcgtcttgcaaattcgaatggagatctgaaggttaagaaggagaaggagctcgctaacgcagctgggaagctcgcagaatgccagaagacaattgcttctctggatcgtcaaatcaaatcactgacagatctcgacagtgtggtgctagagcctgaaaggcttgaatccagcagggacatgccactgccactggacttcagaaatggcgatgctgaatttgctatgtttgcggatgacttgtacgactttgaccttccaaacaacgacacaagcttcttttctccacccccgtcgtcgatccagccctcgtctccaccctctgagatgtcagtatttgcaggggggctctcgactcttagcagttacaggagcaaaagagcaattagaaggtgatgaaaggaaggctgcccaaatgccatgctaacaaacagtccatggatgccgccatatgtgtaggtaggtcgatgtacattacagagactgattgttagatttgtgtgatgaacatccattccagcaagctcggtttttgtagcctgcttgatgaggtcttactggtggtcgtttgctgtaaaatgtaaacatggttatcttgtgtgattctagttacaggaaagcaccgagcaagtgcatatttagtgtccactagttaggtaccccgtactagaatatttaatttatttaaatatgaaggaagcatgtcacttatttctctaaatttacaacaatagttaggccctgtacgttgatacgatttctatatattacataaatatatcttattttaattagatagttgtttaaaca

SEQ ID NO: 210964 - DNA, 3675 bp, Zea Mays
tgcccgtgtgccaggcgaaaaacgtagcctcgcactctcgcaggcggcggcgcatcgagaaacagggctgcggctgttgcttcttccacctctccggccatccggcggtccatcgttccgtgccggcggcctcccctcctacgcccctgccgattcttcaatcttcaccaacgtctgcgcgtagcaggctagcagtcggcacggcttcctcagatctgccggacgacttgctgttcgtcaccgactcaccagcaaccaacgtcagccatcagccggcagcaggggaagctgggcggagggtcattgcggcacggcgtccaggcgtacagaaggcaccagcaacagcccatggcaaacgccgcagatgaccctatggcagatgaagccggagtagaagatgccttcacacaggagatcaatcattcgtacgtccctagataccatgtgttgagttggatggaaactgtggaggggatggtggccggtgtggcgtcgcttccgccggtgtatttgatactgaacagagagatatatgatacatgctcctgcttgctcatgatgccggtttggtgccaaagctatcttcttgagacgggatggggatggaagaggctggtgccctacagacctggttatgttgagttgcatgtgttcaagaaataccttggggactatttcgaccataatcgtgaagcttttctttgtgccgagcagaagcctgatccatttggatggattgttgctgaaaagagtgccctgattgctgcagccaaatcgtgcctcaagatggagaaggcacttctcaggtactgtgctagctttctcactcctgacgacaaaaggctgatcctccggatcaaggaccaggcaaagcaaatgatccaatcagagggtgatcaatctttgattgtaactatatgcttggagtgtattgcgaaggaggccgagttaatgtacaattatttgccttgtgattttgacaccaccgaagaagtcgccgtctgcaataaggttcggcggtctgccttgaatcttatgctctacaaaggttctgaatctgctgttgctgctggtgccatgatgggtatcacaacagaggctaagtccatttttgacttgcttagtcgagaccatgacgtggtcatggaagtttttacttgtgagagtataagggaacatacagcatcagttctgacccagcttgggaaggaatttgcttgcgagactgctactgtgaacagctcatcagcgcggcctatgggggtcagtgatgttagagatctgaactctgaagtatctggttcaatggaagactgtacgagtatggatggagcaaggttttaaagtcggctagtcgactctagtcgcctaagcaccgataaggtgactaatcgcgattagtcgtcgattagctcgattagtcgatcctagtcgactccctagtcgtcctatagtcgtccatctataacaggaccatatatatatatatatatactagattgcaaatctattgacaatattacaatgaaactgtagaatgaatgaatgatcatgttttcactaaaaggtaaagatcacttagacacttaccttggattggagtatacaacagcacactgcaagattagtaggacaacacttctggtatatctccagcagccttactagtgcaaaacgtcatatatctccaacaaagcaagcagaggagggcgtccagcaagcagaggagggcggcggcgcttacagcagcagcaagcagaggagggcggcgctcagagcagcagcaagcagaggagggcggcagcgctcagagcagcagcaagcagaggagggcggcggcgctcacagcagcagcaagcagaggagggcggcgctcagagcagcagcaagcagaggagggcggcagcgctcagagcagcagcaagcagagaagggcggcgacgctcacagcagcagcaagcagaggagggcggcgctcacagcagcagcaagcagaggagggcggcggcgctcagagcagcagcaagcaggggagggcggcggcgctcagagcagttagcagcaagcagatgaagcggtggcgctcaactccagctaggttaaagactgtaacggcattggcacagtttcaggcttttcagcccccctggtgggccggcccaaatagaaaagagcagcctggagcccaaaacaaagcacctagtcgagaacaaccctaatcggacgactaatcgccgactaatcgcgattagtcggacgactaggtttctagtcgccctaatcgcgtcggtggccctaatcggccttgcagcagcgataagtccgactaatcgcgactaatcgcgattagtcggacgactttaaaaccattccgatggagacaatggaaacaatccagttgttggagggggtggctaagaactcgaagaatttaaagttggtggagaaccacgaaaacgagaccagggttgccacgtaagagaagactgcatcagcatcactacttgcctgttttgaaatttaatgtacctttcacggaagccctcactaacattaattgtttgtatgtttcatctcagcttgatgactgaaaataactagggccttgcagggaaaccttcgttgacttctgaggtactgaaggaatccaattcatgatgatgagctacattattcaagtttagcaactattgattgtgtttcccatcatgccttggatgtgtcaaaacttgaacacaccaatttgaagattatcataccctgcttatctatccacatacaaccaaccaaacaaaaatctgctggatcatcccatttgaaaacttgcaaccaaccaaacaagaatttggctcatgcaatccgtccaacctaatgagctaatacatgtaggagcatcattctatgattctatcctaaatccatggatggccctatcccatccaaccttgcctctccaacccatacggccatacaaacttgtgaccattcattgtaattctcatttcattgtcataagtgcgcctcgtttgacactgttgtttctctcgtcatcattggctttgtgtcggacacgttcatgataatttatctgcagcaacggtcaaatttatgaagctacaaggtgcaagttatgagctgctgtaactaaaaggatctctggtttcttttgagcagctgtctgttgtgtcaagttatgtgctacttgtaacactaaagtaccattttaccttatgacatgcagtgcttggttgttctgtcgtagttaaagaccgtgttgcaataagtgctagttctgtatgtttcctgggtttatgttatcaaatggttgcctggtttgcccactaatgtcatgttgctataagtattcctagctgttgagaaatgcgtgcgcgcgtgccgatcgttgtatcattgggtgcaacatcataggtcattgtagccaagggctatgaagaggggagtttcagatagtccaaaaacaccagggtacatagcaaatacgaaggttcttaggaaggaacagaagtgcgcaggccatttcgcgcaccatgaagcacccgcgatgagcagacgacaaccttggaacaaaacgaacctagagttcgaaggcggaccacactgcggatgatgtagcttatggacgtccacactgaggtctgaggatgaacgaaatag

SEQ ID NO: 210965 - DNA, 2698 bp, Zea Mays
tgcccgtgtgccaggcgaaaaacgtagcctcgcactctcgcaggcggcggcgcatcgagaaacagggctgcggctgttgcttcttccacctctccggccatccggcggtccatcgttccgtgccggcggcctcccctcctacgcccctgccgattcttcaatcttcaccaacgtctgcgcgtagcaggctagcagtcggcacggcttcctcagatctgccggacgacttgctgttcgtcaccgactcaccagcaaccaacgtcagccatcagccggcagcaggggaagctgggcggagggtcattgcggcacggcgtccaggcgtacagaaggcaccagcaacagcccatggcaaacgatgaccctatggcagatgaagccggagtagaagatgccttcacacaggagatcaatcattcgtacgtccctagataccatgtgttgagttggatggaaactgtggaggggatggtggccggtgtggcgtcgcttccgccggtgtatttgatactgaacagagatcttcttgagacgggatggggatggaagaggctggtgccctacagacctggttatgttgagttgcatgtgttcaagaaataccttggggactatttcgaccataatcgtgaagcttttctttgtgccgagcagaagcctgatccatttggatggattgttgctgaaaagagtgccctgattgctgcagccaaatcgtgcctcaagatggagaaggcacttctcaggtactgtgctagctttctcactcctgacgacaaaaggctgatcctccggatcaaggaccaggcaaagcaaatgatccaatcagagggtgatcaatctttgattgtaactatatgcttggagtgtattgcgaaggaggccgagttaatgtacaattatttgccttgtgattttgacaccaccgaagaagtcgccgtctgcaataaggttcggcggtctgccttgaatcttatgctctacaaaggttctgaatctgctgttgctgctggtgccatgatggtgtgttcctgatactctctccattcattttataggctttattttgactatgcaaaaaccaatattctgctgtaaattctccctatagtattatgttggtagttacaaaatcatagtcagtagcaagtgcttttaattaggaattgttacgtaactcacattttatgggactaatgtctggtcaaagcatgaacttggatagtcaaaccacaccttataaatatgaatatagggagtaattgtgtattttttaatcctctgttatcctgtcaagcttctttaaccaaactgcaaaaacgatgtacttgaagggtatcacaacagaggctaagtccatttttgacttgcttagtcgagaccatgacgtggtcatggaagtttttacttgtgagagtataagggaacatacagcatcagttctgacccagcttgggaaggaatttgcttgcgagactgctactgtgaacagctcatcagcgcggcctatgggggtcagtgatgttagagatctgaactctgaagtatctggttcaatggaagactgtacgagtatggatggagcaaggttttaaagtcggctagtcgactctagtcgcctaagcaccgataagggaaaccttcgttgacttctgaggtactgaaggaatccaattcatgatgatgagctacattattcaagtttagcaactattgattgtgtttcccatcatgccttggatgtgtcaaaacttgaacacaccaatttgaagattatcataccctgcttatctatccacatacaaccaaccaaacaaaaatctgctggatcatcccatttgaaaacttgcaaccaaccaaacaagaatttggctcatgcaatccgtccaacctaatgagctaatacatgtaggagcatcattctatgattctatcctaaatccatggatggccctatcccatccaaccttgcctctccaacccatacggccatacaaacttgtgaccattcattgtaattctcatttcattgtcataagtgcgcctcgtttgacactgttgtttctctcgtcatcattggctttgtgtcggacacgttcatgataatttatctgcagcaacggtcaaatttatgaagctacaaggtgcaagttatgagctgctgtaactaaaaggatctctggtttcttttgagcagctgtctgttgtgtcaagttatgtgctacttgtaacactaaagtaccattttaccttatgacatgcagtgcttggttgttctgtcgtagttaaagaccgtgttgcaataagtgctagttctgtatgtttcctgggtttatgttatcaaatggttgcctggtttgcccactaatgtcatgttgctataagtattcctagctgttgagaaatgcgtgcgcgcgtgccgatcgttgtatcattgggtgcaacatcataggtcattgtagccaagggctatgaagaggggagtttcagatagtccaaaaacaccagggtacatagcaaatacgaaggttcttaggaaggaacagaagtgcgcaggccatttcgcgcaccatgaagcacccgcgatgagcagacgacaaccttggaacaaaacgaacctagagttcgaaggcggaccacactgcggatgatgtagcttatggacgtccacactgaggtctgaggatgaacgaaatag

SEQ ID NO: 210966 - DNA, 2539 bp, Zea Mays
aagttagttttatagttaagtgatagaaaaaactgctttttatagttgagagcggtaaatagatttttccattaaaaaatcacagcaaacccccaatctcgtgtctcctcccctttcgagcctgtcgttgtctcaatagctcaatcctcattccttcaggcttcagggttctcaatgatcggcggcactgcccttaccaccacacgccgcctccgtcttctgtgaaagatcaagaattcgccgccgtctcagctgatcttcgcgcgtgcagtctacctgttcgacgagatgcctacgaaggtcacgaagccgtgggtgccggttaactggaccggggaagcatcgtcatcacgcgggcactcggtaggaggtgggggactcgaactcgagcccgccgctgaccgcctcagcgcgctgcccgacgtgctcctccaccacgtcatgtcgttcatgaaggcgtgggacgcggtacgcacgtgcgtgctctcgcggcggtggcgcgacctctgggcctctgcgccctgtgtggacatccgtgtggggaggtatagcgaaccgccccaggacttttccaagttcgtgtaccggctgctgcttgctagggaggcccttgcgccgataaacactctcaggctgcggtcaccaactgattacgacgaggatttcgacaattctgatgttaagatgtggatccgccatgcaatcagactgaatgcttgcgctattcagctaactggtcatcccaatttgtctgcggagcttgattctatagacttggtctctcaccacctcaaaatcttgaaactggcctatactttagtgcttgatagcttcaccagacagctctcgtctcggtgcccttctttggaggaactagagctcaaggactgtttggtagagtgccgcgagattacatctgtctctctgaagaggttgaccatggtcaagtgcacttttgcaaagaacttctttgttaatgctccaaaccttgtgtttgtgcagtgcatcgcaccagatacttgggtccctgtgttcaagaactttggggtgctggtaacaggtagtgtgatgcttgatgactctttactgagccgtgactttaaaaagtaccaatacgatgatgatgaatatcctcaaacaagtgatgatgatgatgacaacaacagtacatttgcccctgctaaatatgttcctgattctgatgacagtgatgaaatcctcagtgatgattctgaattcttagatgatttttatgatgagcattttgatgatatcaaggacaattatgattatggaagtgatatcaatagtgatagtgaaacctatgagtacagtgagattgcaaatgactatggagataaccagtttggaacccgtgataatgaacttgatcacactaggggcagtaaagatcatggttgcagtgcaaaacatatcattaatgattataaaaattttggtggccaaaatgttcttcattgcctttcaaatgctcgacatctagagctgttaggtcattctggagaggtcattatgaggagagaatcgttaaattgtccaacttttagcaacctgaagactttggccctgggagaatggtgtatcagtacggttgctgacttcgacatattacttgtcttgcttcagcattcacctagtctggagaagctttatcttcagcttgaaatgaaccgtgacatcaagaaggcattggtaagaggtatagaaccaaaggggggatcatttgcttgcaaacatcttagtatggtgaagatcagatgcaccaaggacgattcaagagtccatatgttggcgcagttgtttaggtctaatggcttgccgctcgagaagatttatgtccgtcggagtgggagtttctatcttcgtatcttgaaggaggagaggggtattgccatcgatgaactgcgtagatcttgatccgattcctattaaaaacagaaatagaacttgcagggcatgtggcgatagaatgcatgattgtctcgcacatctctattaagttgtcttgtcagctgatatcgtttgaagaacaaagttcagattcgagcaccttggttagtaaatcgtggtttagtagcgtgggttattcgttagcctgttgtcttttaacacatcgtggtttacggtctgtggttcagtttcgagtttctactgtgtaggggctaggggcatctatgttcaacatattctctaatctctaagcacgacagacctacaaatattttagtgttagataggagggaaatttatagtgatagtgtggagtggagacatccttatgggttccattcattagccacattggatattggcaataagtttttttttgaagattttaatagtaaaagtaagggtctgttcggacttaaaaaatttcggtttcatttaagcttcttttatccaaacaagtctagctccacgagctttagctttgaaaaaaaaactttaggtcacctttataaaattcacgaagctcctcaagagtgcttcacaaacaccgtttttatatcttctcgtg

SEQ ID NO: 210967 - DNA, 1986 bp, Zea Mays
ctcctggcaaatgcagagagtctgattcgaacctatgacctggaatcttcaaaggcagagcaagatgttagccgtcctgaacaagacggtacttgtatgaatggtaatacaggtactgctattagcagtggtgctaccctaccagatactagcgaatctgatcaaggaccaccaaaagagaagactgaacaaccttgctatgctgatgacataacagatactgatcagttgaaatctgaccacaatgaaggtgcggagttcgatactgcaaagcccgaaaagaaagctgccgttgattcagacaaaagtgctaagcttaaactgtccgataaatgtgaagcacctgtgcattctgatgctgacactaaaaaggaagcatctgcagagggtaccgatggagccgctgatgatacatcaacggctgctgattgtacacctaaaccaaagcgaggccgtcctcctggcccaaagtcatcgcagaagaaggctgctggaaaggatcaatcttcaggttcagatttgaaaaaggtcaatgaggcaggtgattcagccggaaagttggcgaaacgatcagcgaaggatgagaagtccacaaagaaggctggtgaaggagaatcatctaagaagacccaaaagtacaattcaaagcaacagaaggatgaaaacctatctgaggatcctgccaaggatctgagtttaaaggaaatgataacaccaaaatcttcgactaaggtcccaggtagaaccaaagggcaaagcacagagaatagcacacctaaaatgaagcaagaacaagaaactgaagagcctcctcgttcaaggaaaagcaaaggacttgataaaagtctagttggtgcaaggatcaaagtttggtggccagatgataagatgttctacaatggtgttgtggagtcatttgattctgtttctaagaggcacaaggtcgcatatgatgatggggacgtagaggtactactgttgagggatgaaaagtgggaattcatcagtgaggtatgcacatttttactcatgataattttataatttcgtactgattccttagtttctgattaacttttactctgacaggagaagggagcttctgtggcatctgaaacgccaggaggcagaaaaagaaaagctgatgcagtgaaggaagaaaatacagagacacctaaaagtgatgctgttgatcatccaaagaaaagaggacgtccaaaaggtgtaagatccagcaatggcacacctagtaactcagctactccgagcacaaaggggaaaactgccggcaagaataccaaagaaacaccaaaaactggccccaatcttataaaggaactcgagaagagctccaaggacaaagctagtgtatcaactgagacaaaggatgaattgcctaaagatgacaggagtgcaagcagacctaaggaggctattagcaaaggcaaggattcaaaagacgaaggcaagtccactgaaggaaaagctaggccaggtcggaaactaaaaaatgctggtactcctgcgggtgacgctgacaaagagaaggggaaggagaaagaagttaaggcagctgaaatagagcaggaggcaccaggaaacgcttctacaggaaagaagcgcagaaggaaggcttgaagctaacactgatggaacttcttttgtaaatggatgtgcaccttgtattattgagtgttaactcgaaatttcgtcagtttggtctctgatagttaggtgtggaagcaacatttgctatagctgtaatgctaggattaacatgtgttcattgtggtcagatgcatggtgcattggtgttgagctttgagcggaatcaacccaatgctcgctgtgaggcccatggcatcgtgttgtctggtggtgttgtagcttattgatgttctatttattataagcaatttaagcagtggattttgtagcaaatgcaccttttcggctaggatgttggcctggtttttaagttgggca

SEQ ID NO: 210968 - DNA, 1976 bp, Zea Mays
agatatgaatgtaatgcatgatcgttcacttcactaggtagaattggatggtttgggaggtggatgatggcaagctctctgaaaggactatttctgatgaattgcctcaggaatcttcaaaggcagagcaagatgttagccgtcctgaacaagacggtacttgtatgaatggtaatacaggtactgctattagcagtggtgctaccctaccagatactagcgaatctgatcaaggaccaccaaaagagaagactgaacaaccttgctatgctgatgacataacagatactgatcagttgaaatctgaccacaatgaaggtgcggagttcgatactgcaaagcccgaaaagaaagctgccgttgattcagacaaaagtgctaagcttaaactgtccgataaatgtgaagcacctgtgcattctgatgctgacactaaaaaggaagcatctgcagagggtaccgatggagccgctgatgatacatcaacggctgctgattgtacacctaaaccaaagcgaggccgtcctcctggcccaaagtcatcgcagaagaaggctgctggaaaggatcaatcttcaggttcagatttgaaaaaggtcaatgaggcaggtgattcagccggaaagttggcgaaacgatcagcgaaggatgagaagtccacaaagaaggctggtgaaggagaatcatctaagaagacccaaaagtacaattcaaagcaacagaaggatgaaaacctatctgaggatcctgccaaggatctgagtttaaaggaaatgataacaccaaaatcttcgactaaggtcccaggtagaaccaaagggcaaagcacagagaatagcacacctaaaatgaagcaagaacaagaaactgaagagcctcctcgttcaaggaaaagcaaaggacttgataaaagtctagttggtgcaaggatcaaagtttggtggccagatgataagatgttctacaatggtgttgtggagtcatttgattctgtttctaagaggcacaaggtcgcatatgatgatggggacgtagaggtactactgttgagggatgaaaagtgggaattcatcagtgaggagaagggagcttctgtggcatctgaaacgccaggaggcagaaaaagaaaagctgatgcagtgaaggaagaaaatacagagacacctaaaagtgatgctgttgatcatccaaagaaaagaggacgtccaaaaggtgtaagatccagcaatggcacacctagtaactcagctactccgagcacaaaggggaaaactgccggcaagaataccaaagaaacaccaaaaactggccccaatcttataaaggaactcgagaagagctccaaggacaaagctagtgtatcaactgagacaaaggatgaattgcctaaagatgacaggagtgcaagcagacctaaggaggctattagcaaaggcaaggattcaaaagacgaaggcaagtccactgaaggaaaagctaggccaggtcggaaactaaaaaatgctggtactcctgcgggtgacgctgacaaagagaaggggaaggagaaagaagttaaggcagctgaaatagagcaggaggcaccaggaaacgcttctacaggaaagaagcgcagaaggaaggcttgaagctaacactgatggaacttcttttgtaaatggatgtgcaccttgtattattgagtgttaactcgaaatttcgtcagtttggtctctgatagttaggtgtggaagcaacatttgctatagctgtaatgctaggattaacatgtgttcattgtggtcagatgcatggtgcattggtgttgagctttgagcggaatcaacccaatgctcgctgtgaggcccatggcatcgtgttgtctggtggtgttgtagcttattgatgttctatttattataagcaatttaagcagtggattttgtagcaaatgcaccttttcggctaggatgttggcctggtttttaagttgggca

SEQ ID NO: 210969 - DNA, 2948 bp, Zea Mays
acccccaggcagaagcgaacacaacagccccttccgcgccgaaacctcgtcgcgtcgcgcggaagagaggagagggacgggggccgcggcccgcgggggcgagaagagaacaccactacggattgcctcgtcatccaccaccgctccaccgctaaaccctcgagtgctcttccgcgcggcggggcgccgagcgtgaaagccacctgctctcgtccagtcgcactcgcgccgcgaggggaaaccctaggagcggcagatctagagcgggcgctctcgatccggccgcgtagacgcccgttttggccggggaaatggcggaggatcctgccgccgaacaggagacgcggcagctagaggaccggctcagggaggtcggggaacggctgcaggcgcctcccgacgacgcggaggacctgctcaacctcctcatcgaagttgaggagtgtttactaaaagttgagcagtcacctcctgaaagcacatcgaatgctcttcaactagcaactgcagctcttgtcaagaaagagctgctggcccatgctgattcaaatattagacttgccgtggcatcatgcatatctgagatcacacggatcacagcgccagatgctccatatgatgacgatgcaatgaaggatgtattctctttaattgtggaggccttcaagcatctggatgacatagagagccccttctttggaaggagaacttcaattcttgatacagtcgcaaaagttcggtcctgtgtggtgatgctagatcttgaatgtgacgatttgataaatgatatgttccatcacttcttgaggactgttaattctgggcattcagaagccgtcatatgctgcatggaaacaataatgagattggtaattgaggagagtgaggatgtccaaccacagattgcttcatgtctactccaaaatgttagaaaagaagaaaaggaatcttcttcagcttcctttgagcttgctgaaaaagtgataggcacatgccgtgagaaacttaagccagtctttctgcaatcactaaaaggcacttccttgagcgaatacagccaaatcgtcgcatcggtttgtgaagatgtttcagatgacagggaagataacaatgctgatccttctgggaaggacacggtggatgatggcaagctctctgaaaggactatttctgatgaattgcctcaggaatcttcaaaggcagagcaagatgttagccgtcctgaacaagacggtacttgtatgaatggtaatacagatactgatcagttgaaatctgaccacaatgaaggtgcggagttcgatactgcaaagcccgaaaagaaagctgccgttgattcagacaaaagtgctaagcttaaactgtccgataaatgtgaagcacctgtgcattctgatgctgacactaaaaaggaagcatctgcagagggtaccgatggagccgctgatgatacatcaacggctgctgattgtacacctaaaccaaagcgaggccgtcctcctggcccaaagtcatcgcagaagaaggctgctggaaaggatcaatcttcaggttcagatttgaaaaaggtcaatgaggcaggtgattcagccggaaagttggcgaaacgatcagcgaaggatgagaagtccacaaagaaggctggtgaaggagaatcatctaagaagacccaaaagtacaattcaaagcaacagaaggatgaaaacctatctgaggatcctgccaaggatctgagtttaaaggaaatgataacaccaaaatcttcgactaaggtcccaggtagaaccaaagggcaaagcacagagaatagcacacctaaaatgaagcaagaacaagaaactgaagagcctcctcgttcaaggaaaagcaaaggacttgataaaagtctagttggtgcaaggatcaaagtttggtggccagatgataagatgttctacaatggtgttgtggagtcatttgattctgtttctaagaggcacaaggtcgcatatgatgatggggacgtagaggtactactgttgagggatgaaaagtgggaattcatcagtgaggagaagggagcttctgtggcatctgaaacgccaggaggcagaaaaagaaaagctgatgcagtgaaggaagaaaatacagagacacctaaaagtgatgctgttgatcatccaaagaaaagaggacgtccaaaaggtgtaagatccagcaatggcacacctagtaactcagctactccgagcacaaaggggaaaactgccggcaagaataccaaagaaacaccaaaaactggccccaatcttataaaggaactcgagaagagctccaaggacaaagctagtgtatcaactgagacaaaggatgaattgcctaaagatgacaggagtgcaagcagacctaaggaggctattagcaaaggcaaggattcaaaagacgaaggcaagtccactgaaggaaaagctaggccaggtcggaaactaaaaaatgctggtactcctgcgggtgacgctgacaaagagaaggggaaggagaaagaagttaaggcagctgaaatagagcaggaggcaccaggaaacgcttctacaggaaagaagcgcagaaggaaggcttgaagctaacactgatggaacttcttttgtaaatggatgtgcaccttgtattattgagtgttaactcgaaatttcgtcagtttggtctctgatagttaggtgtggaagcaacatttgctatagctgtaatgctaggattaacatgtgttcattgtggtcagatgcatggtgcattggtgttgagctttgagcggaatcaacccaatgctcgctgtgaggcccatggcatcgtgttgtctggtggtgttgtagcttattgatgttctatttattataagcaatttaagcagtggattttgtagcaaatgcaccttttcggctaggatgttggcctggtttttaagttgggca

SEQ ID NO: 210970 - DNA, 418 bp, Zea Mays
cggagccggactcccacgacgcgctgctcgacccacccggcaaccaaaccctatccaccccgcgtcctctctcccctcatttaaaccgccaccacgacggcacgccgcctcgtcggaaaaaccatcatctaaagttcaacgcccgcaccgcaagcgcaacacgccaacacccgagacccgacgcggccttcgccttccctccgcgcgagggagattcgaggggagagaggttctcaccttcgcgcctgcggttgcttggcgcagagtcgtcgcagatggaccggtaccagagggtggagaagccgcgggaggagtcccctatcggcgccaacgagatccgcatcacggcgcagggccggccccgcaactacatcacctatgcgctcgccctgctccagggttttaagtgcgggttcgg

SEQ ID NO: 210971 - DNA, 3715 bp, Zea Mays
ctaatcatcatcagagcgtcaccatcgctcacgcgcgcgcgcagtcaaagctgcaagtcgacagcacgcgcacttggagtcaattcggcggccccggaatcttctcgttttatcagcctctctctgtaacaatccacacgcaacaagacagacgatgctccacgtagtatatacaacacgcgcataccagtctaaactcgaagccctgattgggagctcagctgattgagcagtccaagaaccaaaggataaggtgggtggggggaccgccggagccgggagggacgagaagcgagcgaggtgccgtcgtcagctagcactagcagccatggaaggcggcgcgcacgagttcgacggctccaccttcaaggagtgcttctccctctcgtggaggaacccctacgtcctccgcctcgccttctccgccggcatcggcggcctgctcttcggctacgacaccggtgtcatttcgggagctctgctctacatccgcgacgacttcgtttcagtggacaggaacacatggcttcaggaaatgatcgtgagcatggcggtggccggcgcgatcatcggcgcggccatcggcgggtggaccacggaccggttcgggcggcgggcgtcgatcctggtggccgactccctcttcttcgcgggcgcggcggtgatggcgtcggccacgcgccccgcgcagctcgtggtgggccgcgtcttcgtcggcctcggcgtcggcatggcctccatgacctccccgctctacatctccgaggcgtcgcccgccaggatccgcggcgcgctcgtcagcaccaacggcttcctcatcaccggcggccagttcctggcctacctcatcaacctcgccttcaccaaggcgccggggacgtggaggtggatgctcggcgtcgccgcgctccccgccgtcgtccagttcggcctcatgctcgcactgcctgaatccccgcgctggctctacagacaggggagggcggaagaagcagaggcgatcctgcggcggatctactcggcggaggaggtggagcgggagatcgaggagctgaaggagtcggtggcggcggagcgtgggtcgtcggagaagctgagcctggtggcgctggtgcggacggcgacggtgcgccgggggctggtggccggcgtggggctgcaggtgttccagcagctggtgggcatcaacacggtgatgtactacagcccgacgatcgtgcagctggctgggttcgcgtccaaccagacggcgctggcgctgtcgctcgtcacctcgggcctcaacgcgctcggctccgtcgtcagcatctacttcatcgaccgcacggggcggaggaagctgctggtcatcagcctcgtgggcgtcatcctctcgctcggcgtgctcacggccgtgttccacgagaccgcgtcccactccccggccgtgagcgccaccgagaccgctcgcttcgacgcctcgctgacgtgtccgtcctaccgcccgtcgtcgccggccagcggcggggcgtcctgggactgcacccggtgcctcaaggcggccgcgggttcgagcgagtgcggcttctgcgcgtcgggcgccggcaggctcctcccgggcgcgtgcctggtgtccaacaacacggtgcgcgacgcgtgccacggcgagggccggctgtggtacacccgcgggtgcccgagccggtacggctggctggcgctgctgggcctggcgctctacatcatcttcttctcccccggcatgggcacggtgccgtggatcgtcaactcggagatctacccgctgcggtaccgcggcgtgtgtggcggcgcggcggccaccgccaactgggtgtccaacctggccgtggcgcagtcgttcctgtcgctgacggaggccatcgggacgtcgtggacgttcctcatcttcgggggcctgtccgtggccgcgctcgccttcgtgctcgtctgcgtgccggaaaccaagggtctcccgatcgaggaggtggagaagatgctcgagcgccgggagctcaggctcaggttctgggccccgcgacacacacaagacaacggcaaggagagtggcaagaatgccggcgtttgagactgtttgctccaatttctacgctaaaattgttgttcacaatctacgctagaattatggtacaaactggaagaaagtgtattagtttctaatgcctaaattcggttatctgattctttttgaggaaattgaatcttgttgagacaagtcggtattattattaaattgaagaaaagagaagtaaaaagaagactgagacaccttcgtccaagcccaaaaggcctctaaattgtgccttacatatatggcccaacagacagccaggcccaggtaagcttcctctacttcggtggcgccaacacgcaacacccaatccgcccaagcgcgcgcgcaaattccacactctcctcgaccctcgattcgttcccgccgccaaccaagcgacgtctcctcttccacgcatcctagggcggcgacacctgccaagaacacccgtcgccgcgctctcccgatggcgaccagcgacgagctcgcccagatcgacatctctaaggaggagaaggacaagctggtggcggaggtgatgcgctacgtgctcttcaagacgcaccagagctccgactgccccatcaagcgggaggagctcaccgggatcatcaccaagaactaccgccagcgcgcgctgcccacgctggtcatcaacgaggccaaggagaggctcgccgcaaccttcggctacgagatgagggagctacaaaggacccgcgcgccggccacgcgctctggccggccggcacagcggcagtttaacgcggatgccaagagctatgttctggtcagcatgttagaccctgaggtgtacagcaagtacgtcgaggacaaggccgccgcccatctgtccggcttcgctttcgctgtcattggcattattcatcttgctggtggcaaaatgcccgaagaggacctctggcatcagttgaagcgggtgggtttgaacgagactgatgaagctcaccttgttcttggcaacaataagcaggcgctcgaacacctagtgcagcaaaggtacttgctgaaggagaaaattgctggaccggaaggtcatttcgtgatgtacgagcttgccgagagggcgttggatgaatccatcagcgtgaagattaaagatcatatttcacaggttgtgggcacatgcttgcagaagtagattgaagtggatggatacgacaatcagtagccctgtaggttatctgccttgcggtaggactagctgactcttatcaggctgggaagctacatatcatcttgcatggatacgaggctcgtactctgcatgcagattttgtacaggagatgtgtgcttgacaagccctggcaactttggtgttactatatccttgattatctagattattatgtggacgacatgctgttgatcatcgcagcaggcttggcactaccttttgcagtgacctaatgtcacaaaacagcctgtcagtcattgcatgcgttgtgctctccttctgtgtgtagctgagtattcagtgacctgaccacatcgacatcataacgataatgctgtagcgcgccgagtccattcacaagtcttgactcttgactcgcagtaaaaatcaatttatttcaatttatttttgaaccaaaatttatttaggatcttgatattttgtg

SEQ ID NO: 210972 - DNA, 2877 bp, Zea Mays
ataaaagttcggtttaattttcctaatttgttgagataaacttcagtaataaaaaacaatcccttcattttttgggagttttctcacgccaatatgcgatggataatgcacgcggtaacggaaaaggacacagcgtgcgaggactcgctcctctggccttccctccagctcgttccgacgttcccctccgccttcggccgtggccatggccgccgccgccactttcggcttcctccaccctctaatccggaaacctttagttccaccactgtacatcctcccgcttcccacccaaccccacgccaaaacgcaccctcgctctctccccctcctcttcctcctcccgcgccgccgccggggaggccccatcgctgccttacccaacaccacatcttcgtccacgaatgcctctgcctcgcccacctacgacgtccgggaggcagaggccgccgtcgcggatctcctccgcgagggcggcgcctccgcggacgacgccgccgccatcgccgcgcgcgcgccggcctacgccgctatgctcgccgatggcgtccgcgagctggacgagcttggcctctgggcgtcgtggagctccggtgccagtgctcggctgggcctcagcggtgtcgtcgagatggagatggggaggctcggttttaggaggaaggtgtatctcatgggacggagcaggcctgaccacgacgtggtgccgctcctcgagagcttgggagtgcgtctctcctcggccaagctcatcgcgccttacgtcgcttctgcgggccttactgtgctgattgatagggttaagtttttgaaggaaatgttattttcaagcagtgattatgcaatactaattggaaggaatgctaagcgcatgatgacatacttatcaatacctgcagatgatgcactccaaagtactttatctttttttgaaaaaatggaggctagatatggcggtgttagcatgttgggacatggagacatgtcatttccttacctcattgaatcatttccaatgcttcttctctgctcagaagataatcatctcgagccgttagttgattttctcgagcacattggaattccaaagccaaagattgcatcagttttgctgctatttcctcctatcattctttctgatgttgaaaatgatattaagcctagaattcgtgaatgggagaaggctggcattgaacacgactatattactaggatgttgttgaagtatccatggattctttcaacgagtgtgatagagaactacagtaaaatgttgttgtttttcaaccaaaaagggatttccagtacagtcctcgctattgctgtgaaaagttggccacatattcttggctcctcttcaaaaagaatgaattcagttttggagctgtttcgtgttctgggcatcagtaaaaaaatggtggttccagtcattacatcaagtccacagttattactgagaaaacctgatcagtttatgcaggattaactacttattggagatgggtttgtctaagaaagatctgtgctcaatgatctctaggttttccccacttctaggttacagtatagaacttgttatgaaaccaaagcttgagtttctgctaagaaccatgaagaaaccacttaaagcagttgtagaatacccaaggtacttcagttattcacttgaggggaagatcaaaccgcgtttttggctattgcagagtagaaacatagactgcactctgacagagatgttagcaaagaacgatgaactctttgctgaagagtacttggaacttggaggattgctcgagaaacctgtacaatcaagcataggtggttaatttctggacttatttgaaccatgcagtgcactatgctgaagctgttcagctttatgcttggattggtgaggctgtttttcagatgggaggccacttttttttcctgaaaacgaaggagagctgtgtttctttgtattcaaatgtcgtggctctgataaccattgcagttgaatctcacgttggtaaaggtattaacactcttttctggaccgataaatggctgcttggttcctgtatcggagatgtggcgccagctgttcttgctatggtaccagcaaaaataattaaaacaagggctgtggctgacgcactctcaaacaacagttaggtatcaaatattaatggaggactgtccatgattggtctgttcaattttttcagctatgggatgccacacatgaagtttctttaaccattgatgatggtcgccatatctggagattctctggttcggttgaattctcggcgatatcggcctatagagtttcttccatggtttggtctcctttgatccttggaagcgtatttcaaaaacttgggctccacctaagtgcaagattttcatttggctagctgtccgaaatcgctgttggactgcagaccgattgccttggagaggactggcacacctagttcattacgttctttgcgacctggaagaggagaatattaatcacattttgttttcctgtgttttctcgagggttctggtttagagttttctcccggctggggtatatttattgaccatgtgttggggtcccaggagcaatcgtttgcagattggtggtgaaaggcttgcaaatatctcccaaaagaaagaaaaaaggaagggcatggattcaatgattatgttgcgaatatgtggagtgttctgcatgctctcgaagatgaacaacatctctggtgtcttgctgtaagagttttgttcttgtccggagtgcaagcacagcccctcacggctctgtccggagcgagggtaaagtttgtacgggaggccacttttccggtgcttagtatcaaaaaggaaccgatgcaagctgtagtaagg

SEQ ID NO: 210973 - DNA, 3040 bp, Zea Mays
ctcgctcctctggccttccctccagctcgttccgacgttcccctccgccttcggccgtggccatggccgccgccgccactttcggcttcctccaccctctaatccggaaacctttagttccaccactgtacatcctcccgcttcccacccaaccccacgccaaaacgcaccctcgctctctccccctcctcttcctcctcccgcgccgccgccggggaggccccatcgctgccttacccaacaccacatcttcgtccacgaatgcctctgcctcgcccacctacgacgtccgggaggcagaggccgccgtcgcggatctcctccgcgagggcggcgcctccgcggacgacgccgccgccatcgccgcgcgcgcgccggcctacgccgctatgctcgccgatggcgtccgcgagctggacgagcttggcctctgggcgtcgtggagctccggtgccagtgctcggctgggcctcagcggtgtcgtcgagatggagatggggaggctcggttttaggaggaaggtgtatctcatgggacggagcaggcctgaccacgacgtggtgccgctcctcgagagcttgggagtgcgtctctcctcggccaagctcatcgcgccttacgtcgcttctgcgggccttactgtgctgattgataggatgatgcactccaaagtactttatctttttttgaaaaaatggaggctagatatggcggtgttagcatgttgggacatggagacatgtcatttccttacctcattgaatcatttccaatgcttcttctctgctcagaagataatcatctcgagccgttagttgattttctcgagcacattggaattccaaagccaaagattgcatcagttttgctgctatttcctcctatcattctttctgatgttgaaaatgatattaagcctagaattcgtgaatgggagaaggctggcattgaacacgactatattactaggatgttgttgaagtatccatggattctttcaacgagtgtgatagagaactacagtaaaatgttgttgtttttcaaccaaaaagggatttccagtacagtcctcgctattgctgtgaaaagttggccacatattcttggctcctcttcaaaaagaatgaattcagttttggagctgtttcgtgttctgggcatcagtaaaaaaatggtggttccagtcattacatcaagtccacagttattactgagaaaacctgatcagtttatgcagaatgttttgttttttagagaaatgggtgttgataagaaaacaacaggaaaaattttgtgtcgttcgcctgaaatatttgcttcaaatgtggataacactctcaagaagaaaattgactttcttatcaactttggtgtttctaaacaccatcttcctcgcatcattaggaagtatccagaacttctattgttggacctaaattgtacattgctccctaggattaactacttattggagatgggtttgtctaagaaagatctgtgctcaatgatctctaggttttccccacttctaggttacagtatagaacttgttatgaaaccaaagcttgagtttctgctaagaaccatgaagaaaccacttaaagcagttgtagaatacccaaggtacttcagttattcacttgaggggaagatcaaaccgcgtttttggctattgcagagtagaaacatagactgcactctgacagagatgttagcaaagaacgatgaactctttgctgaagagtacttggaacttggaggattgctcgagaaacctgtacaatcaagcataggtggttaatttctggacttatttgaaccatgcagtgcactatgctgaagctgttcagctttatgcttggattggtgaggctgtttttcagatgggaggccacttttttttcctgaaaacgaaggagagctgtgtttctttgtattcaaatgtcgtggctctgataaccactcttttctggaccgataaatggctgcttggttcctgtatcggagatgtggcgccagctgttcttgctatggtaccagcaaaaataattaaaacaagggctgtggctgacgcactctcaaacaacagttaggtatcaaatattaatggaggactgtccatgattggtctgttcaattttttcagctatgggatgccacacatgaagtttctttaaccattgatgatggtcgccatatctggagattctctggttcggttgaattctcggcgatatcggcctatagagtttcttccatggtttggtctcctttgatccttggaagcgtatttcaaaaacttgggctccacctaagtgcaagattttcatttggctagctgtccgaaatcgctgttggactgcagaccgattgccttggagaggactggcacacctagttcattacgttctttgcgacctggaagaggagaatattaatcacattttgttttcctgtgttttctcgagggttctggtttagagttttctcccggctggggtatatttattgaccatgtgttggggtcccaggagcaatcgtttgcagattggtggtgaaaggcttgcaaatatctcccaaaagaaagaaaaaaggaagggcatggattcaatgattatgttgcgaatatgtggagtgttctgcatgctctcgaagatgaacaacatctctggtgtcttgctgtaagagttttgttcttgtccggagtgcaagcacagcccctcacggctctgtccggagcgagggtaaagtttgtacgggaggccacttttccggtgcttagtatcaaaaaggtaatacttgttctcatgaaagtcacctaacggaagttacaggtgcaaatttagattgatgagtgatgttgttaactcaatacagcaatgcattgggtattgggaaggtgatgaagaaattagttttcgccatacgcctcagttttactaatgcttcgtttagatgtcgatattggaggtcatgtaattgaatttgtttgaataccaaattaatcatagtatagtattgaaatgagatgtaattccaa

SEQ ID NO: 210974 - DNA, 3198 bp, Zea Mays
ctcgctcctctggccttccctccagctcgttccgacgttcccctccgccttcggccgtggccatggccgccgccgccactttcggcttcctccaccctctaatccggaaacctttagttccaccactgtacatcctcccgcttcccacccaaccccacgccaaaacgcaccctcgctctctccccctcctcttcctcctcccgcgccgccgccggggaggccccatcgctgccttacccaacaccacatcttcgtccacgaatgcctctgcctcgcccacctacgacgtccgggaggcagaggccgccgtcgcggatctcctccgcgagggcggcgcctccgcggacgacgccgccgccatcgccgcgcgcgcgccggcctacgccgctatgctcgccgatggcgtccgcgagctggacgagcttggcctctgggcgtcgtggagctccggtgccagtgctcggctgggcctcagcggtgtcgtcgagatggagatggggaggctcggttttaggaggaaggtgtatctcatgggacggagcaggcctgaccacgacgtggtgccgctcctcgagagcttgggagtgcgtctctcctcggccaagctcatcgcgccttacgtcgcttctgcgggccttactgtgctgattgataggtgattatgcaatactaattggaaggaatgctaagcgcatgatgacatacttatcaatacctgcagatgatgcactccaaagtactttatctttttttgaaaaaatggaggctagatatggcggtgttagcatgttgggacatggagacatgtcatttccttacctcattgaatcatttccaatgcttcttctctgctcagaagataatcatctcgagccgttagttgattttctcgagcacattggaattccaaagccaaagattgcatcagttttgctgctatttcctcctatcattctttctgatgttgaaaatgatattaagcctagaattcgtgaatgggagaaggtatttttgttcatggtatctattggaacctgctagattgtacacttgacaataacacattaatactagtgatcccatttttaaatttcctaggctggcattgaacacgactatattactaggatgttgttgaagtatccatggattctttcaacgagtgtgatagagaactacagtaaaatgttgttgtttttcaaccaaaaagggatttccagtacagtcctcgctattgctgtgaaaagttggccacatattcttggctcctcttcaaaaagaatgaattcagttttggagctgtttcgtgttctgggcatcagtaaaaaaatggtggttccagtcattacatcaagtccacagttattactgagaaaacctgatcagtttatgcagaatgttttgttttttagagaaatgggtgttgataagaaaacaacaggaaaaattttgtgtcgttcgcctgaaatatttgcttcaaatgtggataacactctcaagaagaaaattgactttcttatcaactttggtgtttctaaacaccatcttcctcgcatcattaggaagtatccagaacttctattgttggacctaaattgtacattgctccctaggattaactacttattggagatgggtttgtctaagaaagatctgtgctcaatgatctctaggttttccccacttctaggttacagtatagaacttgttatgaaaccaaagcttgagtttctgctaagaaccatgaagaaaccacttaaagcagttgtagaatacccaaggtacttcagttattcacttgaggggaagatcaaaccgcgtttttggctattgcagagtagaaacatagactgcactctgacagagatgttagcaaagaacgatgaactctttgctgaagagtacttggaacttggaggattgctcgagaaacctgtacaatcaagcataggtggttaatttctggacttatttgaaccatgcagtgcactatgctgaagctgttcagctttatgcttggattggtgaggctgtttttcagatgggaggccacttttttttcctgaaaacgaaggagagctgtgtttctttgtattcaaatgtcgtggctctgataaccactcttttctggaccgataaatggctgcttggttcctgtatcggagatgtggcgccagctgttcttgctatggtaccagcaaaaataattaaaacaagggctgtggctgacgcactctcaaacaacagttaggtatcaaatattaatggaggactgtccatgattggtctgttcaattttttcagctatgggatgccacacatgaagtttctttaaccattgatgatggtcgccatatctggagattctctggttcggttgaattctcggcgatatcggcctatagagtttcttccatggtttggtctcctttgatccttggaagcgtatttcaaaaacttgggctccacctaagtgcaagattttcatttggctagctgtccgaaatcgctgttggactgcagaccgattgccttggagaggactggcacacctagttcattacgttctttgcgacctggaagaggagaatattaatcacattttgttttcctgtgttttctcgagggttctggtttagagttttctcccggctggggtatatttattgaccatgtgttggggtcccaggagcaatcgtttgcagattggtggtgaaaggcttgcaaatatctcccaaaagaaagaaaaaaggaagggcatggattcaatgattatgttgcgaatatgtggagtgttctgcatgctctcgaagatgaacaacatctctggtgtcttgctgtaagagttttgttcttgtccggagtgcaagcacagcccctcacggctctgtccggagcgagggtaaagtttgtacgggaggccacttttccggtgcttagtatcaaaaaggtaatacttgttctcatgaaagtcacctaacggaagttacaggtgcaaatttagattgatgagtgatgttgttaactcaatacagcaatgcattgggtattgggaaggtgatgaagaaattagttttcgccatacgcctcagttttactaatgcttcgtttagatgtcgatattggaggtcatgtaattgaatttgtttgaataccaaattaatcatagtatagtattgaaatgagatgtaattccaa

SEQ ID NO: 210975 - DNA, 2924 bp, Zea Mays
ggactcgctcctctggccttccctccagctcgttccgacgttcccctccgccttcggccgtggccatggccgccgccgccactttcggcttcctccaccctctaatccggaaacctttagttccaccactgtacatcctcccgcttcccacccaaccccacgccaaaacgcaccctcgctctctccccctcctcttcctcctcccgcgccgccgccggggaggccccatcgctgccttacccaacaccacatcttcgtccacgaatgcctctgcctcgcccacctacgacgtccgggaggcagaggccgccgtcgcggatctcctccgcgagggcggcgcctccgcggacgacgccgccgccatcgccgcgcgcgcgccggcctacgccgctatgctcgccgatggcgtccgcgagctggacgagcttggcctctgggcgtcgtggagctccggtgccagtgctcggctgggcctcagcggtgtcgtcgagatggagatggggaggctcggttttaggaggaaggtgtatctcatgggacggagcaggcctgaccacgacgtggtgccgctcctcgagagcttgggagtgcgtctctcctcggccaagctcatcgcgccttacgtcgcttctgcgggccttactgtgctgattgatagggttaagtttttgaaggaaatgttattttcaagcagtgattatgcaatactaattggaaggaatgctaagcgcatgatgacatacttatcaatacctgcagatgatgcactccaaagtactttatctttttttgaaaaaatggaggctagatatggcggtgttagcatgttgggacatggagacatgtcatttccttacctcattgaatcatttccaatgcttcttctctgctcagaagataatcatctcgagccgttagttgattttctcgagcacattggaattccaaagccaaagattgcatcagttttgctgctatttcctcctatcattctttctgatgttgaaaatgatattaagcctagaattcgtgaatgggagaaggctggcattgaacacgactatattactaggatgttgttgaagtatccatggattctttcaacgagtgtgatagagaactacagtaaaatgttgttgtttttcaaccaaaaaggatttccagtacagtcctcgctattgctgtgaaaagttggccacatattcttggctcctcttcaaaaagaatgaattcagttttggagctgtttcgtgttctgggcatcagtaaaaaaatggtggttccagtcattacatcaagtccacagttattactgagaaaacctgatcagtttatgcaggattaactacttattggagatgggtttgtctaagaaagatctgtgctcaatgatctctaggttttccccacttctaggttacagtatagaacttgttatgaaaccaaagcttgagtttctgctaagaaccatgaagaaaccacttaaagcagttgtagaatacccaaggtacttcagttattcacttgaggggaagatcaaaccgcgtttttggctattgcagagtagaaacatagactgcactctgacagagatgttagcaaagaacgatgaactctttgctgaagagtacttggaacttggaggattgctcgagaaacctgtacaatcaagcataggtggttaatttctggacttatttgaaccatgcagtgcactatgctgaagctgttcagctttatgcttggattggtgaggctgtttttcagatgggaggccacttttttttcctgaaaacgaaggagagctgtgtttctttgtattcaaatgtcgtggctctgataaccactcttttctggaccgataaatggctgcttggttcctgtatcggagatgtggcgccagctgttcttgctatggtaccagcaaaaataattaaaacaagggctgtggctgacgcactctcaaacaacagttaggtatcaaatattaatggaggactgtccatgattggtctgttcaattttttcagctatgggatgccacacatgaagtttctttaaccattgatgatggtcgccatatctggagattctctggttcggttgaattctcggcgatatcggcctatagagtttcttccatggtttggtctcctttgatccttggaagcgtatttcaaaaacttgggctccacctaagtgcaagattttcatttggctagctgtccgaaatcgctgttggactgcagaccgattgccttggagaggactggcacacctagttcattacgttctttgcgacctggaagaggagaatattaatcacattttgttttcctgtgttttctcgagggttctggtttagagttttctcccggctggggtatatttattgaccatgtgttggggtcccaggagcaatcgtttgcagattggtggtgaaaggcttgcaaatatctcccaaaagaaagaaaaaaggaagggcatggattcaatgattatgttgcgaatatgtggagtgttctgcatgctctcgaagatgaacaacatctctggtgtcttgctgtaagagttttgttcttgtccggagtgcaagcacagcccctcacggctctgtccggagcgagggtaaagtttgtacgggaggccacttttccggtgcttagtatcaaaaaggtaatacttgttctcatgaaagtcacctaacggaagttacaggtgcaaatttagattgatgagtgatgttgttaactcaatacagcaatgcattgggtattgggaaggtgatgaagaaattagttttcgccatacgcctcagttttactaatgcttcgtttagatgtcgatattggaggtcatgtaattgaatttgtttgaataccaaattaatcatagtatagtattgaaatgagatgtaattccaa

SEQ ID NO: 210976 - DNA, 3593 bp, Zea Mays
ggataatgcacgcggtaacggaaaaggacacagcgtgcgaggactcgctcctctggccttccctccagctcgttccgacgttcccctccgccttcggccgtggccatggccgccgccgccactttcggcttcctccaccctctaatccggaaacctttagttccaccactgtacatcctcccgcttcccacccaaccccacgccaaaacgcaccctcgctctctccccctcctcttcctcctcccgcgccgccgccggggaggccccatcgctgccttacccaacaccacatcttcgtccacgaatgcctctgcctcgcccacctacgacgtccgggaggcagaggccgccgtcgcggatctcctccgcgagggcggcgcctccgcggacgacgccgccgccatcgccgcgcgcgcgccggcctacgccgctatgctcgccgatggcgtccgcgagctggacgagcttggcctctgggcgtcgtggagctccggtgccagtgctcggctgggcctcagcggtgtcgtcgagatggagatggggaggctcggttttaggaggaaggtgtatctcatgggacggagcaggcctgaccacgacgtggtgccgctcctcgagagcttgggagtgcgtctctcctcggccaagctcatcgcgccttacgtcgcttctgcgggccttactgtgctgattgatagggttaagtttttgaaggaaatgttattttcaagcagtgattatgcaatactaattggaaggaatgctaagcgcatgatgacatacttatcaatacctgcagatgatgcactccaaagtactttatctttttttgaaaaaatggaggctagatatggcggtgttagcatgttgggacatggagacatgtcatttccttacctcattgaatcatttccaatgcttcttctctgctcagaagataatcatctcgagccgttagttgattttctcgagcacattggaattccaaagccaaagattgcatcagttttgctgctatttcctcctatcattctttctgatgttgaaaatgatattaagcctagaattcgtgaatgggagaaggctggcattgaacacgactatattactaggatgttgttgaagtatccatggattctttcaacgagtgtgatagagaactacagtaaaatgttgttgtttttcaaccaaaaagggatttccagtacagtcctcgctattgctgtgaaaagttggccacatattcttggctcctcttcaaaaagaatgaattcagttttggagctgtttcgtgttctgggcatcagtaaaaaaatggtggttccagtcattacatcaagtccacagttattactgagaaaacctgatcagtttatgcaggtgtgtaacgattattgaggttgcatttatatatttaaacttcattggcaatggatataaactacttttggttgcatataagtttcaaagcaaattggaaccaaagttcagcaaaaggattgttttgtgtacccaatatcacgtcttccattaaattgacatggattatggctcttataaatgtacatttgttgccggattcacatattttcccaatcagaatgtggtgcttaatatcaatgtttttatctttctgtctgtcgtaactgcatccacagtaggcatatttatatagttatatcctgagttggggatgtcttgtgccttgacccttgagttgcatctcttttacatctttaaccctccaattactgatatcttgatactaacttttgtgcctcatgtttcagaatgttttgttttttagagaaatgggtgttgataagaaaacaacaggaaaaattttgtgtcgttcgcctgaaatatttgcttcaaatgtggataacactctcaagaagaaaattgactttcttatcaactttggtgtttctaaacaccatcttcctcgcatcattaggaagtatccagaacttctattgttggacctaaattgtacattgctccctaggattaactacttattggagatgggtttgtctaagaaagatctgtgctcaatgatctctaggttttccccacttctaggttacagtatagaacttgttatgaaaccaaagcttgagtttctgctaagaaccatgaagaaaccacttaaagcagttgtagaatacccaaggtacttcagttattcacttgaggggaagatcaaaccgcgtttttggctattgcagagtagaaacatagactgcactctgacagagatgttagcaaagaacgatgaactctttgctgaagagtacttggaacttggaggattgctcgagaaacctgtacaatcaagcataggtggttaatttctggacttatttgaaccatgcagtgcactatgctgaagctgttcagctttatgcttggattggtgaggctgtttttcagatgggaggccacttttttttcctgaaaacgaaggagagctgtgtttctttgtattcaaatgtcgtggctctgataaccactcttttctggaccgataaatggctgcttggttcctgtatcggagatgtggcgccagctgttcttgctatggtaccagcaaaaataattaaaacaagggctgtggctgacgcactctcaaacaacagttaggtatcaaatattaatggaggactgtccatgattggtctgttcaattttttcagctatgggatgccacacatgaagtttctttaaccattgatgatggtcgccatatctggagattctctggttcggttgaattctcggcgatatcggcctatagagtttcttccatggtttggtctcctttgatccttggaagcgtatttcaaaaacttgggctccacctaagtgcaagattttcatttggctagctgtccgaaatcgctgttggactgcagaccgattgccttggagaggactggcacacctagttcattacgttctttgcgacctggaagaggagaatattaatcacattttgttttcctgtgttttctcgagggttctggtttagagttttctcccggctggggtatatttattgaccatgtgttggggtcccaggagcaatcgtttgcagattggtggtgaaaggcttgcaaatatctcccaaaagaaagaaaaaaggaagggcatggattcaatgattatgttgcgaatatgtggagtgttctgcatgctctcgaagatgaacaacatctctggtgtcttgctgtaagagttttgttcttgtccggagtgcaagcacagcccctcacggctctgtccggagcgagggtaaagtttgtacgggaggccacttttccggtgcttagtatcaaaaaggtaatacttgttctcatgaaagtcacctaacggaagttacaggtgcaaatttagattgatgagtgatgttgttaactcaatacagcaatgcattgggtattgggaaggtgatgaagaaattagttttcgccatacgcctcagttttactaatgcttcgtttagatgtcgatattggaggtcatgtaattgaatttgtttgaataccaaattaatcatagtatagtattgaaatgagatgtaattccaa

SEQ ID NO: 210977 - DNA, 3860 bp, Zea Mays
aaacgctgacgccaaatcaaatcaaaccttgctgccttctgcatccggtagcagcaagtcgccgcttgtgcccttcctcctcactttccctcgctgacgcccgatccccatgattcgattacgcgacccgccttgcaaaccctagcttctcccgctctctccctttccaatgcgccccaaaccctagcttcccgcccgcccacccgccggtcatgcgcgcctccgcctccgctgtccccatggaggcctccgcctccgcccgcagatccgccgctagccccgaccccggcgcgaagaagccgcgcctcgcgcagccgccggcacgggaccccagatcttacgccgctgccgccgccgcctccaatggcggcgcaagcgccgccgagcaagcgctggttgacgagctgctcggccagtaccggaccgcgcttggggagctcaccttcaattccaagcccatcatcaccaacctcaccatcatcgctggcgagaacctccaggccgctaagcccatcgccgccgtaatctgcgccaacatcctcgaggttccaagtgaacagaaactaccatcgctgtatctgcttgacagtattgtaaaaaatattggaaaagattatgtcaaacatttctcagcaagattaccagaggtgttctgcaaggcatataaacaagttgatccttctatacatcatagcatgaggcatctttttggaacatggaaaggagtgtttcctctacctcctctccaaacgattgagaaggaacttggttttcagtcatctaccaatggattatcaggtgctgcaccatcaaggactgattctcaatcgccgcgtccatccaatagcatacatgtaaatccaaaatatttggaagcgaggcagcagctcaatcaaccaactaaggggatacttggaagtggtgctaagacagctgtaattgctgatacagacgatgatattgagagggctaataggctaggtactgaaagaagtgcagggagacgattggatgctcctaatgctagacctaacatagagcacattcagagggacccttttagcaatcctattcatgaaaaacttgcaggtagagatgtgaggggccttggattctccaacacttcacagcaggctgttgtgggaactggtcaagttcgctcaaaacccagaggccaagatggaattgggggaccctattatgcctctggtgttgtgtcttctgaagaaaaaattgacaagcgcagcaacttttatacaagcaaggatgttcggccatcaggatctgtacatttcgatagtgctcttcttccaactcgatcaattaatgctaatagagttggtaggccttcatcaaacaaaagctggaagcactctgaggaagaagaatatgtttgggatgatgtaccctctaaaacaacagaatatagtggtacccataatataataaaaggagaatggatgtctgatgatggcaatgctaagtttgcaagcctccaaagtgctaaatgggcagatgcaggacctgtggaatgtatagatcccaagacacataaagttgataatgtgtcaagatttggatttgcagcaggtcaagaaagaagaatttcagcatacatggatcaggaagagtaccttcttggcaagcgtgaggtggaagctagaattgatagggaaattaggccctatggacaacagttcccagcagctcgagattcctctctctgggtgtcccaggaaaaagcactccccgacaatgggttggacccttgggtatcaaagttttcaaatcagccagcagagatgtccatttgtactggcaccatgccagcaagtatcatatcatctgtacctgttaggttatcaggacactatgctggaaggtcaaacctagatactacaaatagtgtgccaataagatcaactgaggcttttgggcagcagaagcatagatattggtcatcttcccctccacaagctcacccaccttcatctactgcaccctttgcacgtcagggttctccaaatcatgacgagtctgatttttatccttctggatcattttctcaattgggccaagatcctcaagaagaatatagccagagagcattgcctgtacttgctaaaggttctcatgttgtggttcacaatgatgaacttactcagggccaacctagtctacaggcaaccctgcagacacaaaagtaccctatcatacagtccaagtcacatattaatccatctgatcaattgcaagcaagctttttgtgtgaaaattctccatcactgttcagaccttccattcagcttggagaagtatctttacccagtgattccacccctataagctcagatctgacaagtgctagtaatttgttggctggtctcataaagagtgggttcaaaccaagtaaccacagtgatgcacagcctcttggtccgagtggctcacttctagtggcttctttatcacttcaaaatgctgctggtgaaaataccattttgcagacacagacaccaaacacttctcgtccaccattgccaccaggtctaccaccacctccatcaacacagagtgcagagaaagctgcgccgctctcgagtcttctcagttccctggttgcaaagggattaatctcttctcctgcctctgattcatctgatgctgtcatttcacagccaaataaagaatcaagcataaatggtaaagatgtcgcagcttcaggtgtgcctttgccagctctgaagtcttcatttggtaaggtgtcatcatctaattctgattcatctgccccaccaaacgcttcgttacccaaagctatcgaaattgagatgggtgacctcattggcctggagttcaagccagagaaacttcgcaagtaccatgagcatgtaattagctacctcgatgaccaaagccatcagtgtaaaatgtgtggtaataggttcgggcttgaagaactgagtttgcacacatcaagctgtgggccaagggagtcaaggactatctatactggtatcgcacctaagagatggtatcctagcaggaacatttacattgatggatcacatgaaattgaggatagcgctgaggcttctgatgcaggtttaggttctgcagaagtgtgtgagtttatggtccatgcagacgagaggcaaattatctgtgcactgtgtggggaaccatttgatgacgtatattcttttgagaaggggaactggatgtacaaggatgcagtattcttggattatgccaagggtaaaaatagctgcggaaacaatgttaagggtgaagagcatgtgcctatagtccatgtaagatgtatgccaagaggctcaaacgatggcatggacgttgactagaatggttgttcacagaagccaagttctcgaggggcctagaggtggatgaggctgaagctggtgtttgcacgaggcaatgtgcatcatcaggtggtctgcggcaactgggcttaagacatacatgtaagatgcttggtggaggtggcaggcgttatcagaaacaaatcttgcgaagatctgcaaccatccatggatttaaccatgccctttacaaagtgcttacacaaagaataaagccccagaggagcacttcggccatgcggttcagaattatcaaaatcttcatatttttggtctccatctgagaaggggctgggtctttatgttgatacaaagagagctttgcaagaggatgtcaaaagaatgtatgatttctttacgtggaaaaggggtatgatatcccgcatgcgcaacgcctccttgctcgatcgactacatggcaaaaagcggaatatgtcagaagggattcaagcgaagaccaaagagcgtgaagactaa

SEQ ID NO: 210978 - DNA, 3590 bp, Zea Mays
atggaggcctccgcctccgcccgcagatccgccgctagccccgaccccggcgcgaagaagccgcgcctcgcgcagccgccggcacgggaccccagatcttacgccgctgccgccgccgcctccaatggcggcgcaagcgccgccgagcaagcgctggttgacgagctgctcggccagtaccggaccgcgcttggggagctcaccttcaattccaagcccatcatcaccaacctcaccatcatcgctggcgagaacctccaggccgctaagcccatcgccgccgtaatctgcgccaacatcctcgaggttccaagtgaacagaaactaccatcgctgtatctgcttgacagtattgtaaaaaatattggaaaagattatgtcaaacatttctcagcaagattaccagaggtgttctgcaaggcatataaacaagttgatccttctatacatcatagcatgaggcatctttttggaacatggaaaggagtgtttcctctacctcctctccaaacgattgagaaggaacttggttttcagtcatctaccaatggattatcaggtgctgcaccatcaaggactgattctcaatcgccgcgtccatccaatagcatacatgtaaatccaaaatatttggaagcgaggcagcagctcaatcaaccaactaaggggatacttggaagtggtgctaagacagctgtaattgctgatacagacgatgatattgagagggctaataggctaggtactgaaagaagtgcagggagacgattggatgctcctaatgctagacctgtagagatgtgaggggccttggattctccaacacttcacagcaggctgttgtgggaactggtcaagttcgctcaaaacccagaggccaagatggaattgggggaccctattatgcctctggtgttgtgtcttctgaagaaaaaattgacaagcgcagcaacttttatacaagcaaggatgttcggccatcaggatctgtacatttcgatagtgctcttcttccaactcgatcaattaatgctaatagagttggtaggccttcatcaaacaaaagctggaagcactctgaggaagaagaatatgtttgggatgatgtaccctctaaaacaacagaatatagtggtacccataatataataaaaggagaatggatgtctgatgatggcaatgctaagtttgcaagcctccaaagtgctaaatgggcagatgcaggacctgtggaatgtatagatcccaagacacataaagttgataatgtgtcaagatttggatttgcagcaggtcaagaaagaagaatttcagcatacatggatcaggaagagtaccttcttggcaagcgtgaggtggaagctagaattgatagggaaattaggccctatggacaacagttcccagcagctcgagattcctctctctgggtgtcccaggaaaaagcactccccgacaatgggttggacccttgggtatcaaagttttcaaatcagccagcagagatgtccatttgtactggcaccatgccagcaagtatcatatcatctgtacctgttaggttatcaggacactatgctggaaggtcaaacctagatactacaaatagtgtgccaataagatcaactgaggcttttgggcagcagaagcatagatattggtcatcttcccctccacaagctcacccaccttcatctactgcaccctttgcacgtcagggttctccaaatcatgacgagtctgatttttatccttctggatcattttctcaattgggccaagatcctcaagaagaatatagccagagagcattgcctgtacttgctaaaggttctcatgttgtggttcacaatgatgaacttactcagggccaacctagtctacaggcaaccctgcagacacaaaagtaccctatcatacagtccaagtcacatattaatccatctgatcaattgcaagcaagctttttgtgtgaaaattctccatcactgttcagaccttccattcagcttggagaagtatctttacccagtgattccacccctataagctcagatctgacaagtgctagtaatttgttggctggtctcataaagagtgggttcaaaccaagtaaccacagtgatgcacagcctcttggtccgagtggctcacttctagtggcttctttatcacttcaaaatgctgctggtgaaaataccattttgcagacacagacaccaaacacttctcgtccaccattgccaccaggtctaccaccacctccatcaacacagagtgcagagaaagctgcgccgctctcgagtcttctcagttccctggttgcaaagggattaatctcttctcctgcctctgattcatctgatgctgtcatttcacagccaaataaagaatcaagcataaatggtaaagatgtcgcagcttcaggtgtgcctttgccagctctgaagtcttcatttggtaaggtgtcatcatctaattctgattcatctgccccaccaaacgcttcgttacccaaagctatcgaaattgagatgggtgacctcattggcctggagttcaagccagagaaacttcgcaagtaccatgagcatgtaattagctacctcgatgaccaaagccatcagtgtaaaatgtgtggtaataggttcgggcttgaagaactgagtttgcacacatcaagctgtgggccaagggagtcaaggactatctatactggtatcgcacctaagagatggtatcctagcaggaacatttacattgatggatcacatgaaattgaggatagcgctgaggcttctgatgcaggtttaggttctgcagaagtgtgtgagtttatggtccatgcagacgagaggcaaattatctgtgcactgtgtggggaaccatttgatgacgtatattcttttgagaaggggaactggatgtacaaggatgcagtattcttggattatgccaagggtaaaaatagctgcggaaacaatgttaagggtgaagagcatgtgcctatagtccatgtaagatgtatgccaagaggctcaaacgatggcatggacgttgactagaatggttgttcacagaagccaagttctcgaggggcctagaggtggatgaggctgaagctggtgtttgcacgaggcaatgtgcatcatcaggtggtctgcggcaactgggcttaagacatacatgtaagatgcttggtggaggtggcaggcgttatcagaaacaaatcttgcgaagatctgcaaccatccatggatttaaccatgccctttacaaagtgcttacacaaagaataaagccccagaggagcacttcggccatgcggttcagaattatcaaaatcttcatatttttggtctccatctgagaaggggctgggtctttatgttgatacaaagagagctttgcaagaggatgtcaaaagaatgtatgatttctttacgtggaaaaggggtatgatatcccgcatgtaagttgagcactgctgttttctgacgatacgtttcttgactgttaggaatttttgcactacgaaactgataatacaacatgatagaggcaggactaaggggaatgtttggtttaca

SEQ ID NO: 210979 - DNA, 3833 bp, Zea Mays
atggaggcctccgcctccgcccgcagatccgccgctagccccgaccccggcgcgaagaagccgcgcctcgcgcagccgccggcacgggaccccagatcttacgccgctgccgccgccgcctccaatggcggcgcaagcgccgccgagcaagcgctggttgacgagctgctcggccagtaccggaccgcgcttggggagctcaccttcaattccaagcccatcatcaccaacctcaccatcatcgctggcgagaacctccaggccgctaagcccatcgccgccgtaatctgcgccaacatcctcgaggtgacctttgtctttgactcctcttacgctcgtcaaactgccgtctccccttcttcctcaattcaccatgtaaaagtaactctaaggcgccaagcatccactggcgcttcgttttcaaaacagtgtggtaaaatcacaaagttgaaaaacaagggatttcagaaagttctactacaaactgaagtttatgatacaccgtcttgtacatatgaaaaatatgtccatgcactggttccaagtgaacagaaactaccatcgctgtatctgcttgacagtattgtaaaaaatattggaaaagattatgtcaaacatttctcagcaagattaccagaggtgttctgcaaggcatataaacaagttgatccttctatacatcatagcatgaggcatctttttggaacatggaaaggagtgtttcctctacctcctctccaaacgattgagaaggaacttggttttcagtcatctaccaatggattatcaggtgctgcaccatcaaggactgattctcaatcgccgcgtccatccaatagcatacatgtaaatccaaaatatttggaagcgaggcagcagctcaatcaaccaactaagacgatgatattgagagggctaataggctaggtactgaaagaagtgcagggagacgattggatgctcctaatgctagacctaacatagagcacattcagagggacccttttagcaatcctattcatgaaaaacttgcaggtagagatgtgaggggccttggattctccaacacttcacagcaggctgttgtgggaactggtcaagttcgctcaaaacccagaggccaagatggaattgggggaccctattatgcctctggtgttgtgtcttctgaagaaaaaattgacaagcgcagcaacttttatacaagcaaggatgttcggccatcaggatctgtacatttcgatagtgctcttcttccaactcgatcaattaatgctaatagagttggtaggccttcatcaaacaaaagctggaagcactctgaggaagaagaatatgtttgggatgatgtaccctctaaaacaacagaatatagtggtacccataatataataaaaggagaatggatgtctgatgatggcaatgctaagtttgcaagcctccaaagtgctaaatgggcagatgcaggacctgtggaatgtatagatcccaagacacataaagttgataatgtgtcaagatttggatttgcagcaggtcaagaaagaagaatttcagcatacatggatcaggaagagtaccttcttggcaagcgtgaggtggaagctagaattgatagggaaattaggccctatggacaacagttcccagcagctcgagattcctctctctgggtgtcccaggaaaaagcactccccgacaatgggttggacccttgggtatcaaagttttcaaatcagccagcagagatgtccatttgtactggcaccatgccagcaagtatcatatcatctgtacctgttaggttatcaggacactatgctggaaggtcaaacctagatactacaaatagtgtgccaataagatcaactgaggcttttgggcagcagaagcatagatattggtcatcttcccctccacaagctcacccaccttcatctactgcaccctttgcacgtcagggttctccaaatcatgacgagtctgatttttatccttctggatcattttctcaattgggccaagatcctcaagaagaatatagccagagagcattgcctgtacttgctaaaggttctcatgttgtggttcacaatgatgaacttactcagggccaacctagtctacaggcaaccctgcagacacaaaagtaccctatcatacagtccaagtcacatattaatccatctgatcaattgcaagcaagctttttgtgtgaaaattctccatcactgttcagaccttccattcagcttggagaagtatctttacccagtgattccacccctataagctcagatctgacaagtgctagtaatttgttggctggtctcataaagagtgggttcaaaccaagtaaccacagtgatgcacagcctcttggtccgagtggctcacttctagtggcttctttatcacttcaaaatgctgctggtgaaaataccattttgcagacacagacaccaaacacttctcgtccaccattgccaccaggtctaccaccacctccatcaacacagagtgcagagaaagctgcgccgctctcgagtcttctcagttccctggttgcaaagggattaatctcttctcctgcctctgattcatctgatgctgtcatttcacagccaaataaagaatcaagcataaatggtaaagatgtcgcagcttcaggtgtgcctttgccagctctgaagtcttcatttggtaaggtgtcatcatctaattctgattcatctgccccaccaaacgcttcgttacccaaagctatcgaaattgagatgggtgacctcattggcctggagttcaagccagagaaacttcgcaagtaccatgagcatgtaattagctacctcgatgaccaaagccatcagtgtaaaatgtgtggtaataggttcgggcttgaagaactgagtttgcacacatcaagctgtgggccaagggagtcaaggactatctatactggtatcgcacctaagagatggtatcctagcaggaacatttacattgatggatcacatgaaattgaggatagcgctgaggcttctgatgcaggtttaggttctgcagaagtgtgtgagtttatggtccatgcagacgagaggcaaattatctgtgcactgtgtggggaaccatttgatgacgtatattcttttgagaaggggaactggatgtacaaggatgcagtattcttggattatgccaagggtaaaaatagctgcggaaacaatgttaagggtgaagagcatgtgcctatagtccatgtaagatgtatgccaagaggctcaaacgatggcatggacgttgactagaatggttgttcacagaagccaagttctcgaggggcctagaggtggatgaggctgaagctggtgtttgcacgaggcaatgtgcatcatcaggtggtctgcggcaactgggcttaagacatacatgtaagatgcttggtggaggtggcaggcgttatcagaaacaaatcttgcgaagatctgcaaccatccatggatttaaccatgccctttacaaagtgcttacacaaagaataaagccccagaggagcacttcggccatgcggttcagaattatcaaaatcttcatatttttggtctccatctgagaaggggctgggtctttatgttgatacaaagagagctttgcaagaggatgtcaaaagaatgtatgatttctttacgtggaaaaggggtatgatatcccgcatgtaagttgagcactgctgttttctgacgatacgtttcttgactgttaggaatttttgcactacgaaactgataatacaacatgatagaggcaggactaaggggaatgtttggtttaca

SEQ ID NO: 210980 - DNA, 3539 bp, Zea Mays
atggaggcctccgcctccgcccgcagatccgccgctagccccgaccccggcgcgaagaagccgcgcctcgcgcagccgccggcacgggaccccagatcttacgccgctgccgccgccgcctccaatggcggcgcaagcgccgccgagcaagcgctggttgacgagctgctcggccagtaccggaccgcgcttggggagctcaccttcaattccaagcccatcatcaccaacctcaccatcatcgctggcgagaacctccaggccgctaagcccatcgccgccgtaatctgcgccaacatcctcgaggttccaagtgaacagaaactaccatcgctgtatctgcttgacagtattgtaaaaaatattggaaaagattatgtcaaacatttctcagcaagattaccagaggtgttctgcaaggcatataaacaagttgatccttctatacatcatagcatgaggcatctttttggaacatggaaaggagtgtttcctctacctcctctccaaacgattgagaaggaacttggttttcagtcatctaccaatggattatcaggtgctgcaccatcaaggactgattctcaatcgccgcgtccatccaatagcatacatgggatacttggaagtggtgctaagacagctgtaattgctgatacagacgatgatattgagagggctaataggctaggtactgaaagaagtgcagggagacgattggatgctcctaatgctagacctgtagagatgtgaggggccttggattctccaacacttcacagcaggctgttgtgggaactggtcaagttcgctcaaaacccagaggccaagatggaattgggggaccctattatgcctctggtgttgtgtcttctgaagaaaaaattgacaagcgcagcaacttttatacaagcaaggatgttcggccatcaggatctgtacatttcgatagtgctcttcttccaactcgatcaattaatgctaatagagttggtaggccttcatcaaacaaaagctggaagcactctgaggaagaagaatatgtttgggatgatgtaccctctaaaacaacagaatatagtggtacccataatataataaaaggagaatggatgtctgatgatggcaatgctaagtttgcaagcctccaaagtgctaaatgggcagatgcaggacctgtggaatgtatagatcccaagacacataaagttgataatgtgtcaagatttggatttgcagcaggtcaagaaagaagaatttcagcatacatggatcaggaagagtaccttcttggcaagcgtgaggtggaagctagaattgatagggaaattaggccctatggacaacagttcccagcagctcgagattcctctctctgggtgtcccaggaaaaagcactccccgacaatgggttggacccttgggtatcaaagttttcaaatcagccagcagagatgtccatttgtactggcaccatgccagcaagtatcatatcatctgtacctgttaggttatcaggacactatgctggaaggtcaaacctagatactacaaatagtgtgccaataagatcaactgaggcttttgggcagcagaagcatagatattggtcatcttcccctccacaagctcacccaccttcatctactgcaccctttgcacgtcagggttctccaaatcatgacgagtctgatttttatccttctggatcattttctcaattgggccaagatcctcaagaagaatatagccagagagcattgcctgtacttgctaaaggttctcatgttgtggttcacaatgatgaacttactcagggccaacctagtctacaggcaaccctgcagacacaaaagtaccctatcatacagtccaagtcacatattaatccatctgatcaattgcaagcaagctttttgtgtgaaaattctccatcactgttcagaccttccattcagcttggagaagtatctttacccagtgattccacccctataagctcagatctgacaagtgctagtaatttgttggctggtctcataaagagtgggttcaaaccaagtaaccacagtgatgcacagcctcttggtccgagtggctcacttctagtggcttctttatcacttcaaaatgctgctggtgaaaataccattttgcagacacagacaccaaacacttctcgtccaccattgccaccaggtctaccaccacctccatcaacacagagtgcagagaaagctgcgccgctctcgagtcttctcagttccctggttgcaaagggattaatctcttctcctgcctctgattcatctgatgctgtcatttcacagccaaataaagaatcaagcataaatggtaaagatgtcgcagcttcaggtgtgcctttgccagctctgaagtcttcatttggtaaggtgtcatcatctaattctgattcatctgccccaccaaacgcttcgttacccaaagctatcgaaattgagatgggtgacctcattggcctggagttcaagccagagaaacttcgcaagtaccatgagcatgtaattagctacctcgatgaccaaagccatcagtgtaaaatgtgtggtaataggttcgggcttgaagaactgagtttgcacacatcaagctgtgggccaagggagtcaaggactatctatactggtatcgcacctaagagatggtatcctagcaggaacatttacattgatggatcacatgaaattgaggatagcgctgaggcttctgatgcaggtttaggttctgcagaagtgtgtgagtttatggtccatgcagacgagaggcaaattatctgtgcactgtgtggggaaccatttgatgacgtatattcttttgagaaggggaactggatgtacaaggatgcagtattcttggattatgccaagggtaaaaatagctgcggaaacaatgttaagggtgaagagcatgtgcctatagtccatgtaagatgtatgccaagaggctcaaacgatggcatggacgttgactagaatggttgttcacagaagccaagttctcgaggggcctagaggtggatgaggctgaagctggtgtttgcacgaggcaatgtgcatcatcaggtggtctgcggcaactgggcttaagacatacatgtaagatgcttggtggaggtggcaggcgttatcagaaacaaatcttgcgaagatctgcaaccatccatggatttaaccatgccctttacaaagtgcttacacaaagaataaagccccagaggagcacttcggccatgcggttcagaattatcaaaatcttcatatttttggtctccatctgagaaggggctgggtctttatgttgatacaaagagagctttgcaagaggatgtcaaaagaatgtatgatttctttacgtggaaaaggggtatgatatcccgcatgtaagttgagcactgctgttttctgacgatacgtttcttgactgttaggaatttttgcactacgaaactgataatacaacatgatagaggcaggactaaggggaatgtttggtttaca

SEQ ID NO: 210981 - DNA, 718 bp, Zea Mays
ccaaaatgccaatccaccgcagtcgcaggctcgcagctgcccttgcccgccatgatgcctccaccgccgctgcgccttcacctcctcttccgctccgaaaccctaatccctctactccggcaacgacccagctgcgacgcgccccattgccggaccaggaggtacatctccgttcgcgcctccgctgcacagctcgccgccgcggacgtctcgacggcgcagcagcctgcacttgaacttgggttggaggcagcggcggcgggcttcgtcaccggtaagaggaaggccaccgaggtagcccacgcgtaggttctggagaaatattgttcagaaaggggatacggtggtggatgccacatgcgggaatggcaatgacacgctcgctctgctgaagatggtggctgatgaaacaggccgtggacgtgtttatgggatggacattcaagattctgcgatagagaatacttcctcttttctgaaaatggccgtggatgatgaacatcaggcttgttgctttcaacttgggctaccttccaggaggagataaaactgtaatcacagtgcctaggacaactgagttagcattgcgagctgccagcagaattctcagttctgggggactcataagtgttcttgtatacattggacatccaggtggaaggtaaacaccagttgcaaacactgtagtctatccatttagaaaagaatgcaattgtag

SEQ ID NO: 210982 - DNA, 861 bp, Zea Mays
ccagatgatacgagcacctctgagcttcgatcttttttttttttgctttctttttttctccggccttgcagacaattttggtccgttgatttattttaagtagtccaaaatgccaatccaccgcagtcgcaggctcgcagctgcccttgcccgccatgatgcctccaccgccgctgcgccttcacctcctcttccgctccgaaaccctaatccctctactccggcaacgacccagctgcgacgcgccccattgccggaccaggaggtacatctccgttcgcgcctccgctgcacagctcgccgccgcggacgtctcgacggcgcagcagcctgcacttgaacttgggttggaggcagcggcggcgggcttcgtcaccggttctggagaaatattgttcagaaaggggatacggtggtggatgccacatgcgggaatggcaatgacacgctcgctctgctgaagatggtggctgatgaaacaggccgtggacgtgtttatgggatggacattcaagattctgcgatagagaatacttcctcttttctgaaaatggccgtggatgatgaacatcagcggggactggtaaaactgtttcctatatgtcatagtagaatggaagagattgttcccaaagatgctcctgtcaggcttgttgctttcaacttgggctaccttccaggaggagataaaactgtaatcacagtgcctaggacaactgagttagcattgcgagctgccagcagaattctcagttctgggggactcataagtgttcttgtatacattggacatccaggtggaaggtaaacaccagttgcaaacactgtagtctatccatttagaaaagaatgcaattgtag

SEQ ID NO: 210983 - DNA, 832 bp, Zea Mays
cttcccagatgatacgagcacctctgagcttcgatcttttttttttttgctttctttttttctccggccttgcagacaattttggtccgttgatttattttaagtagtccaaaatgccaatccaccgcagtcgcaggctcgcagctgcccttgcccgccatgatgcctccaccgccgctgcgccttcacctcctcttccgctccgaaaccctaatccctctactccggcaacgacccagctgcgacgcgccccattgccggaccaggaggtacatctccgttcgcgcctccgctgcacagctcgccgccgcggacgtctcgacggcgcagcagcctgcacttgaacttggttctggagaaatattgttcagaaaggggatacggtggtggatgccacatgcgggaatggcaatgacacgctcgctctgctgaagatggtggctgatgaaacaggccgtggacgtgtttatgggatggacattcaagattctgcgatagagaatacttcctcttttctgaaaatggccgtggatgatgaacatcagcggggactggtaaaactgtttcctatatgtcatagtagaatggaagagattgttcccaaagatgctcctgtcaggcttgttgctttcaacttgggctaccttccaggaggagataaaactgtaatcacagtgcctaggacaactgagttagcattgcgagctgccagcagaattctcagttctgggggactcataagtgttcttgtatacattggacatccaggtggaaggtaaacaccagttgcaaacactgtagtctatccatttagaaaagaatgcaattgtag

SEQ ID NO: 210984 - DNA, 1406 bp, Zea Mays
ctctgcatcaatgtcctctaaatggtcttctaaatttagatgacgctgctggattctctatatatagagtttctctaaacggttctctagcaaaggtaggtgccttaggcagtttttttgcaacctcaaatcttcgaatccaccgccttggaaatctttctttgaaatgaatgaccctagttatttgtactttgttttaatcatcttaatataattcagtccttatcaaaaagaaaagtgctcacacttgtaatccatgtgccacaacaaaaagtgttagagtatgaacaaccttaatatgtagttgtcgtagttctaagtccaccatgaagtcgtatgtgtagcaggagtgcaggactatatctccttccaatgtttcttcattattccgttcaccattgtgccaacatagttttttatgtacatcttctgcgcaacaatcacaacggggtggtggcgcagttggctagcgcgtaggtctcatagctttgagtgatcctgaggtcgagagttcgagcctctctcaccccaaacttggtcgaaacgatgatgaaaagctccgtgacgcatgggtcgtcgcaacctgtcatcttcccagatgatacgagcacctctgagcttcgatcttttttttttttgctttctttttttctccggccttgcagacaattttggtccgttgatttattttaagtagtccaaaatgccaatccaccgcagtcgcaggctcgcagctgcccttgcccgccatgatgcctccaccgccgctgcgccttcacctcctcttccgctccgaaaccctaatccctctactccggcaacgacccagctgcgacgcgccccattgccggaccaggagggttggaggcagcggcggcgggcttcgtcaccggtaagaggaaggccaccgaggtagcccacgcgttctggagaaatattgttcagaaaggggatacggtggtggatgccacatgcgggaatggcaatgacacgctcgctctgctgaagatggtggctgatgaaacaggccgtggacgtgtttatgggatggacattcaagattctgcgatagagaatacttcctcttttctgaaaatggccgtggatgatgaacatcagcggggactggtaaaactgtttcctatatgtcatagtagaatggaagagattgttcccaaagatgctcctgtcaggcttgttgctttcaacttgggctaccttccaggaggagataaaactgtaatcacagtgcctaggacaactgagttagcattgcgagctgccagcagaattctcagttctgggggactcataagtgttcttgtatacattggacatccaggtggaaggtaaacaccagttgcaaacactgtagtctatccatttagaaaagaatgcaattgtag

SEQ ID NO: 210985 - DNA, 1490 bp, Zea Mays
ctctgcatcaatgtcctctaaatggtcttctaaatttagatgacgctgctggattctctatatatagagtttctctaaacggttctctagcaaaggtaggtgccttaggcagtttttttgcaacctcaaatcttcgaatccaccgccttggaaatctttctttgaaatgaatgaccctagttatttgtactttgttttaatcatcttaatataattcagtccttatcaaaaagaaaagtgctcacacttgtaatccatgtgccacaacaaaaagtgttagagtatgaacaaccttaatatgtagttgtcgtagttctaagtccaccatgaagtcgtatgtgtagcaggagtgcaggactatatctccttccaatgtttcttcattattccgttcaccattgtgccaacatagttttttatgtacatcttctgcgcaacaatcacaacggggtggtggcgcagttggctagcgcgtaggtctcatagctttgagtgatcctgaggtcgagagttcgagcctctctcaccccaaacttggtcgaaacgatgatgaaaagctccgtgacgcatgggtcgtcgcaacctgtcatcttcccagatgatacgagcacctctgagcttcgatcttttttttttttgctttctttttttctccggccttgcagacaattttggtccgttgatttattttaagtagtccaaaatgccaatccaccgcagtcgcaggctcgcagctgcccttgcccgccatgatgcctccaccgccgctgcgccttcacctcctcttccgctccgaaaccctaatccctctactccggcaacgacccagctgcgacgcgccccattgccggaccaggaggtacatctccgttcgcgcctccgctgcacagctcgccgccgcggacgtctcgacggcgcagcagcctgcacttgaacttgggttggaggcagcggcggcgggcttcgtcaccggtaagaggaaggccaccgaggtagcccacgcgtaggttctggagaaatattgttcagaaaggggatacggtggtggatgccacatgcgggaatggcaatgacacgctcgctctgctgaagatggtggctgatgaaacaggccgtggacgtgtttatgggatggacattcaagattctgcgatagagaatacttcctcttttctgaaaatggccgtggatgatgaacatcagcggggactggtaaaactgtttcctatatgtcatagtagaatggaagagattgttcccaaagatgctcctgtcaggcttgttgctttcaacttgggctaccttccaggaggagataaaactgtaatcacagtgcctaggacaactgagttagcattgcgagctgccagcagaattctcagttctgggggactcataagtgttcttgtatacattggacatccaggtggaaggtaaacaccagttgcaaacactgtagtctatccatttagaaaagaatgcaattgtag

SEQ ID NO: 210986 - DNA, 3353 bp, Zea Mays
aaatactcaaacctcatattcctcccgtaagctccacgaccggagagagagagagcgcgcgctatccaagccaagaaactccccccgtagtccgcggcccgggctcacgaccgatccggtccgggcccgatggagctcctgagcggcggcgcgctggcgtggcagcagtaccgcgcgctgctccgcaagaacgccacgctcacctggcgcaaccgccgctcggcggcgctgcagctcttctcctcgctcgtattcatcttcctcatcttctgcatcgaccgcgccgtccgctccaggttctccagtaccaccgcctaccgcaacgtgcccgacccggaggcgctcgtcgcgccgccgatcccgccctgcgaggacaagttcttcatcaagtccccatgctacgacttcctctggagcgacggcgggagcgcccgcatcaggggcctcgtcgacgccatccggaggaacaaccccggccgacccatagcacccgaaaaggttttaggttttaggactccagatgatgttgatgcttggttgtttcaaaacccaatgcgttgccctggggctttacattttcaagatataaatgccactcagataaagtatggtattcagacaaactctactccggtagcacggagaggaacatatgaagaccctaccttcaagttccagataccactccaagttgcagctgagagggaaatggcaaggcttctgattggagacccaaattttagctggactgttggatttaaagaatttgctcacccagccacggagaccttctctaccattgctcaagcagggccaactttttttcttgccattgctatgttcggatttgttttccaaatcagtgcattggtggcagagaaagaactaaagcttcgtcaggctatgtctaccatggggctctatgaatcggcttactggttatcgtggtttacctgggaggcctttcttacaacactttcagcactttttactgtgctctttgggatgatgttccagttcgatttcttccttcataataattttggaatcctattcctcctgttcttcctattccaactgaacatgcttagttttgctttcatgatatccacgttcgtagcgaaggcagcatcagctactactgttggatttgcaatattcattattgggttcttgactcagcttgttaccacctttgggttcccttattcgtctgactacaaaaagttgtaccggacattgtggtctttatttcctcctgatttatttgccaaagccctcaacattctaggcaaggcaacagccactcctgaggataaaggttttagctggaatcagcgtggggagtgcccatcttttgagactgactgtgtcattactattgatgatatatataagtggctcatatccacatttttcttgtggtttgtccttgcgatatactttgacaacatacttccaaatgtaaacggcgttcggaagtcagttttctactttcttatgccttcatactggacgggtaaaggaggcaagatggaagagggaggcctctttagcttttttggttcaagccgtcctgcagatgatgctacccctactgacgaggatgtccttgcggagcaaaacctagtaaaggaacaagctgcaaacaatgcggtagatcctaatgttgcagttcaaatacatggtctacgtaagacatatccaggaactttcagcattggatgttgttgcaaatgctctaaatctaagccgtttcattcggttaaaggcttatgggtgaaccttgagaaggaccagctattttgtcttcttggtcccaatggagctggaaaaacaactacaatcagttgtctgactggaatcacaccaattacaggaggtgatgcattcatttatggtcactctgttcgaagcactgtgggaatgtcaaacatccgtaggatgatcggagtctgcccacagtttgatatcctgtgggatgcattaacagctaaagagcacatggaattgtttgccagcatcaagggattgcatccagcagcaatcacatcagtagcagaagagtcattagccaaagtaaagctcagccaagtaactaatgctcgagcaggcagctacagcggaggaatgaagcgccggctaagtgttgcgatcgcactgattggtgacccaaaattggtttttctcgatgaacctactactggcatggatccaataacaaggaggcatgtctgggacatcatagaggaggccaagaaaggaagagctattgtcttgaccacccattccatggaggaggctgatattcttggtgaccggatagctataatggcaaaggggaaactgcggtgcatcgggacatcaataaggctgaagtcgaaatttggaacaggatacattgctaatgttaatttctctggaaatggccacatgcagagccccaacatcaacagcaacactgaggctccggttaatccgaacatagaagctgtcaaatggttcttcaaggaacggcttgatgttaatccaaaagaggagagcaggacattcttgacatttgtcatccctcatcacaaagaaccacttctgacgagattctttggagagttgcaagacagggaaggggagtttggaatatcagacattcaactcggtctgacaacacttgaagaggtgttcctgaacattgcaaagcaggcagagctggagacctctactgctgaaggtaccctggtgactctcaacctgtcatcaggaacaacaattcagattcccaagggggctcgtttcgttggtattcctggaactgagacagaggagcatccaagaggcatcatggttgaggtgtactgggatcaggatgaaaatggatcgctctgcatttctgggcactctgacgagatgcccgtgccagttcatgctgagctgaggaggcctccgtcactttctcgtagggcctcaatggaccgtggacgtccagttgggtatatgattgacctgaaccaggtcccatgaaaaaaaggatgagtccaggtgcaacgtttagattggttttgatgcagattatctggtacatatagtatataggaatcttgtattcgtgtctttgtattagaagtcgtaaccttgtattgcagtagtaattggtaaagacatgctttgtaaaatatcctatagtgtaacacagtattttctgttgtatggcaaacaaaggctcgaaatatgacgcaatagaattacatggtaactacaccctgcgtctcaagatacgtttttactacccatataggaccttttaggagaaggaaattttagcccctccaatctccctcgttccccttctcccaaac

SEQ ID NO: 210987 - DNA, 2074 bp, Zea Mays
cgcgcatctttcctacactcacgaagtgtgcaatgaagcgtggttttagctggaatcagcgtggggagtgcccatcttttgagactgactgtgtcattactattgatgatatatataagtggctcatatccacatttttcttgtggtttgtccttgcgatatactttgacaacatacttccaaatgtaaacggcgttcggaagtcagttttctactttcttatgccttcatactggacgggtaaaggaggcaagatggaagagggaggcctctttagcttttttggttcaagccgtcctgcagatgatgctacccctactgacgaggatgtccttgcggagcaaaacctagtaaaggaacaagctgcaaacaatgcggtagatcctaatgttgcagttcaaatacatggtctacgtaagacatatccaggaactttcagcattggatgttgttgcaaatgctctaaatctaagccgtttcattcggttaaaggcttatgggtgaaccttgagaaggaccagctattttgtcttcttggtcccaatggagctggaaaaacaactacaatcagttgtctgactggaatcacaccaattacaggaggtgatgcattcatttatggtcactctgttcgaagcactgtgggaatgtcaaacatccgtaggatgatcggagtctgcccacagtttgatatcctgtgggatgcattaacagctaaagagcacatggaattgtttgccagcatcaagggattgcatccagcagcaatcacatcagtagcagaagagtcattagccaaagtaaagctcagccaagtaactaatgctcgagcaggcagctacagcggaggaatgaagcgccggctaagtgttgcgatcgcactgattggtgacccaaaattggtttttctcgatgaacctactactggcatggatccaataacaaggaggcatgtctgggacatcatagaggaggccaagaaaggaagagctattgtcttgaccacccattccatggaggaggctgatattcttggtgaccggatagctataatggcaaaggggaaactgcggtgcatcgggacatcaataaggctgaagtcgaaatttggaacaggatacattgctaatgttaatttctctggaaatggccacatgcagagccccaacatcaacagcaacactgaggctccggttaatccgaacatagaagctgtcaaatggttcttcaaggaacggcttgatgttaatccaaaagaggagagcaggacattcttgacatttgtcatccctcatcacaaagaaccacttctgacgagattctttggagagttgcaagacagggaaggggagtttggaatatcagacattcaactcggtctgacaacacttgaagaggtgttcctgaacattgcaaagcaggcagagctggagacctctactgctgaaggtaccctggtgactctcaacctgtcatcaggaacaacaattcagattcccaagggggctcgtttcgttggtattcctggaactgagacagaggagcatccaagaggcatcatggttgaggtgtactgggatcaggatgaaaatggatcgctctgcatttctgggcactctgacgagatgcccgtgccagttcatgctgagctgaggaggcctccgtcactttctcgtagggcctcaatggaccgtggacgtccagttgggtatatgattgacctgaaccaggtcccatgaaaaaaaggatgagtccaggtgcaacgtttagattggttttgatgcagattatctggtacatatagtatataggaatcttgtattcgtgtctttgtattagaagtcgtaaccttgtattgcagtagtaattggtaaagacatgctttgtaaaatatcctatagtgtaacacagtattttctgttgtatggcaaacaaaggctcgaaatatgacgcaatagaattacatggtaactacaccctgcgtctcaagatacgtttttactacccatataggaccttttaggagaaggaaattttagcccctccaatctccctcgttccccttctcccaaac

SEQ ID NO: 210988 - DNA, 1341 bp, Zea Mays
gttggcaagctagttacccattattcttccactccacctcgcccgtggcccgtacccgtcgtcgtcgtccacacagccacaagctgctgctgctgctgcgcgtgcttcctcttcagttcagctgaggtagcggcgcctcacccatcccccccgctacatacacatatctccttcttcgaagaactcggtcctttgggagcgagcaggagcaggagcaggacaggaccaggaagatcattatcaggagaagctaggcggggatatggcgaacgctggcggcggggcggccgaggaaggggagtggctcaaggtcgcccagctcagggccctcgtccaggaggaccaccgcgccaaggaggtggacaacctgacgctgcgtcggttcctgcgcgcgcgcggccacaacgtggacaaggcggccgccatgctgctcaagttcctcaggtggcgggcggaggcggcgcccggcggcggcaccgtgcgggaggagcaggtgcgcggggagctggagcaggacaagatctacatgggcggcgtcgacaggaccggccgccccatcatcgtcggcttgctcgccaagcactactccgccaaccgcgacatggcggagttcaaggttttgtggtctacttcttcgacaagatctgtgccaggatccccagagggcaggagaagttcctcgccatcatggatctcaagggctggggctacgcaaactgcgacgtccgggcctacatcgcggccattgagatcatgcagaactactacccggagcggctgggcaaggcgctgatgatcaacgtgccctacatcttcctcaaggtgtggaagacgatgatctaccccttcatcgacgccaacaccagggacaagttcgtgttcgtggatgacaagagcctgcgggagacgctgcggcgggagatcgacgagagccagctcccggagttccttggcgggaagatgcctctcgtctccctcaaggactacgcccagcagcctcagcccgtttgcgagtgagtctgtcgtagcgatggtggccggccggtgacgtgagcgacccaaagccgaaagctgattcgatctagactaagctaatacagcctacaagagggaggaagagaggccctacccgtggaattaagtcattagtttgtggtccaattcaataagaaagtaaatgtggtgtgtgaagatggtatggcattatcagtctttaatcccatattatacatttagatagaagaaaatcaacttatatgtggtagtgttccctactttttatatgagataaataaagggatacggagaatgctgcacgcacgctctcgctcacgtttcatg

SEQ ID NO: 210989 - DNA, 1353 bp, Zea Mays
gttggcaagctagttacccattattcttccactccacctcgcccgtggcccgtacccgtcgtcgtcgtccacacagccacaagctgctgctgctgctgcgcgtgcttcctcttcagttcagctgaggtagcggcgcctcacccatcccccccgctacatacacatatctccttcttcgaagaactcggtcctttgggagcgagcaggagcaggagcaggacaggaccaggaagatcattatcaggagaagctaggcggggatatggcgaacgctggcggcggggcggccgaggaaggggagtggctcaaggtcgcccagctcagggccctcgtccaggaggaccaccgcgccaaggaggtggacaacctgacgctgcgtcggttcctgcgcgcgcgcggccacaacgtggacaaggcggccgccatgctgctcaagttcctcaggtggcgggcggaggcggcgcccggcggcggcaccgtgcgggaggagcaggtgcgcggggagctggagcaggacaagatctacatgggcggcgtcgacaggaccggccgccccatcatcgtcggcttgctcgccaagcactactccgccaaccgcgacatggcggagttcaagagtacgtcgacgacgtggcccttctttcttcatcaatcaaaatgcgtgtgatccccagagggcaggagaagttcctcgccatcatggatctcaagggctggggctacgcaaactgcgacgtccgggcctacatcgcggccattgagatcatgcagaactactacccggagcggctgggcaaggcgctgatgatcaacgtgccctacatcttcctcaaggtgtggaagacgatgatctaccccttcatcgacgccaacaccagggacaagttcgtgttcgtggatgacaagagcctgcgggagacgctgcggcgggagatcgacgagagccagctcccggagttccttggcgggaagatgcctctcgtctccctcaaggactacgcccagcagcctcagcccgtttgcgagtgagtctgtcgtagcgatggtggccggccggtgacgtgagcgacccaaagccgaaagctgattcgatctagactaagctaatacagcctacaagagggaggaagagaggccctacccgtggaattaagtcattagtttgtggtccaattcaataagaaagtaaatgtggtgtgtgaagatggtatggcattatcagtctttaatcccatattatacatttagatagaagaaaatcaacttatatgtggtagtgttccctactttttatatgagataaataaagggatacggagaatgctgcacgcacgctctcgctcacgtttcatg

SEQ ID NO: 210990 - DNA, 1620 bp, Zea Mays
caggcaggctgtcagccttgctcgtccgatcccgcaggtgaacagacagatggactgattgggtagctgttggcaagctagttacccattattcttccactccacctcgcccgtggcccgtacccgtcgtcgtcgtccacacagccacaagctgctgctgctgctgcgcgtgcttcctcttcagttcagctgaggtagcggcgcctcacccatcccccccgctacatacacatatctccttcttcgaagaactcggtcctttgggagcgagcaggagcaggagcaggacaggaccaggaagatcattatcaggagaagctaggcggggatatggcgaacgctggcggcggggcggccgaggaaggggagtggctcaaggtcgcccagctcagggccctcgtccaggaggaccaccgcgccaagtcgtcgtcagtgctcgacgttcaatgtgaagtcgggagtctcagcattcgtggcctgcgacgtcccaacaaccacgtaaataaattcacgagctcaccgagatggaagacttgaaattaccaaagatcatggaaacgctggcacaacctctgacaccggcagtagctgacggtggcaaccgaaaccagcccaagaactatgagcagacaggaggtggacaacctgacgctgcgtcggttcctgcgcgcgcgcggccacaacgtggacaaggcggccgccatgctgctcaagttcctcaggtggcgggcggaggcggcgcccggcggcggcaccgtgcgggaggagcaggtgcgcggggagctggagcaggacaagatctacatgggcggcgtcgacaggaccggccgccccatcatcgtcggcttgctcgccaagcactactccgccaaccgcgacatggcggagttcaagagttttgtggtctacttcttcgacaagatctgtgccaggatccccagagggcaggagaagttcctcgccatcatggatctcaagggctggggctacgcaaactgcgacgtccgggcctacatcgcggccattgagatcatgcagaactactacccggagcggctgggcaaggcgctgatgatcaacgtgccctacatcttcctcaaggtgtggaagacgatgatctaccccttcatcgacgccaacaccagggacaagttcgtgttcgtggatgacaagagcctgcgggagacgctgcggcgggagatcgacgagagccagctcccggagttccttggcgggaagatgcctctcgtctccctcaaggactacgcccagcagcctcagcccgtttgcgagtgagtctgtcgtagcgatggtggccggccggtgacgtgagcgacccaaagccgaaagctgattcgatctagactaagctaatacagcctacaagagggaggaagagaggccctacccgtggaattaagtcattagtttgtggtccaattcaataagaaagtaaatgtggtgtgtgaagatggtatggcattatcagtctttaatcccatattatacatttagatagaagaaaatcaacttatatgtggtagtgttccctactttttatatgagataaataaagggatacggagaatgctgcacgcacgctctcgctcacgtttcatg

SEQ ID NO: 210991 - DNA, 1408 bp, Zea Mays
atgtcgtcaggcaggctgtcagccttgctcgtccgatcccgcaggtgaacagacagatggactgattgggtagctgttggcaagctagttacccattattcttccactccacctcgcccgtggcccgtacccgtcgtcgtcgtccacacagccacaagctgctgctgctgctgcgcgtgcttcctcttcagttcagctgaggtagcggcgcctcacccatcccccccgctacatacacatatctccttcttcgaagaactcggtcctttgggagcgagcaggagcaggagcaggacaggaccaggaagatcattatcaggagaagctaggcggggatatggcgaacgctggcggcggggcggccgaggaaggggagtggctcaaggtcgcccagctcagggccctcgtccaggaggaccaccgcgccaaggaggtggacaacctgacgctgcgtcggttcctgcgcgcgcgcggccacaacgtggacaaggcggccgccatgctgctcaagttcctcaggtggcgggcggaggcggcgcccggcggcggcaccgtgcgggaggagcaggtgcgcggggagctggagcaggacaagatctacatgggcggcgtcgacaggaccggccgccccatcatcgtcggcttgctcgccaagcactactccgccaaccgcgacatggcggagttcaagagttttgtggtctacttcttcgacaagatctgtgccagagggcaggagaagttcctcgccatcatggatctcaagggctggggctacgcaaactgcgacgtccgggcctacatcgcggccattgagatcatgcagaactactacccggagcggctgggcaaggcgctgatgatcaacgtgccctacatcttcctcaaggtgtggaagacgatgatctaccccttcatcgacgccaacaccagggacaagttcgtgttcgtggatgacaagagcctgcgggagacgctgcggcgggagatcgacgagagccagctcccggagttccttggcgggaagatgcctctcgtctccctcaaggactacgcccagcagcctcagcccgtttgcgagtgagtctgtcgtagcgatggtggccggccggtgacgtgagcgacccaaagccgaaagctgattcgatctagactaagctaatacagcctacaagagggaggaagagaggccctacccgtggaattaagtcattagtttgtggtccaattcaataagaaagtaaatgtggtgtgtgaagatggtatggcattatcagtctttaatcccatattatacatttagatagaagaaaatcaacttatatgtggtagtgttccctactttttatatgagataaataaagggatacggagaatgctgcacgcacgctctcgctcacgtttcatg

SEQ ID NO: 210992 - DNA, 1445 bp, Zea Mays
agtagtagctagctatgaccgagagtactggactactggtactggtagagcattattggtgcacaatgtcgtcaggcaggctgtcagccttgctcgtccgatcccgcaggtgaacagacagatggactgattgggtagctgttggcaagctagttacccattattcttccactccacctcgcccgtggcccgtacccgtcgtcgtcgtccacacagccacaagctgctgctgctgctgcgcgtgcttcctcttcagttcagctgaggtagcggcgcctcacccatcccccccgctacatacacatatctccttcttcgaagaactcggtcctttgggagcgagcaggagcaggagcaggacaggaccaggaagatcattatcaggagaagctaggcggggatatggcgaacgctggcggcggggcggccgaggaaggggagtggctcaaggtcgcccagctcagggccctcgtccaggaggaccaccgcgccaaggaggtggacaacctgacgctgcgtcggttcctgcgcgcgcgcggccacaacgtggacaaggcggccgccatgctgctcaagttcctcaggtggcgggcggaggcggcgcccggcggcggcaccgtgcgggaggagcaggtgcgcggggagctggagcaggacaagatctacatgggcggcgtcgacaggaccggccgccccatcatcgtcggcttgctcgccaagcactactccgccaaccgcgacatggcggagttcaagagatccccagagggcaggagaagttcctcgccatcatggatctcaagggctggggctacgcaaactgcgacgtccgggcctacatcgcggccattgagatcatgcagaactactacccggagcggctgggcaaggcgctgatgatcaacgtgccctacatcttcctcaaggtgtggaagacgatgatctaccccttcatcgacgccaacaccagggacaagttcgtgttcgtggatgacaagagcctgcgggagacgctgcggcgggagatcgacgagagccagctcccggagttccttggcgggaagatgcctctcgtctccctcaaggactacgcccagcagcctcagcccgtttgcgagtgagtctgtcgtagcgatggtggccggccggtgacgtgagcgacccaaagccgaaagctgattcgatctagactaagctaatacagcctacaagagggaggaagagaggccctacccgtggaattaagtcattagtttgtggtccaattcaataagaaagtaaatgtggtgtgtgaagatggtatggcattatcagtctttaatcccatattatacatttagatagaagaaaatcaacttatatgtggtagtgttccctactttttatatgagataaataaagggatacggagaatgctgcacgcacgctctcgctcacgtttcatg

SEQ ID NO: 210993 - DNA, 1565 bp, Zea Mays
ctcggcacaaggggccaatgcaaggaagaggaagaggaagaaaaaacgggcgcgtacggtggactagtagtagtagctagctatgaccgagagtactggactactggtactggtagagcattattggtgcacaatgtcgtcaggcaggctgtcagccttgctcgtccgatcccgcaggtgaacagacagatggactgattgggtagctgttggcaagctagttacccattattcttccactccacctcgcccgtggcccgtacccgtcgtcgtcgtccacacagccacaagctgctgctgctgctgcgcgtgcttcctcttcagttcagctgaggtagcggcgcctcacccatcccccccgctacatacacatatctccttcttcgaagaactcggtcctttgggagcgagcaggagcaggagcaggacaggaccaggaagatcattatcaggagaagctaggcggggatatggcgaacgctggcggcggggcggccgaggaaggggagtggctcaaggtcgcccagctcagggccctcgtccaggaggaccaccgcgccaaggaggtggacaacctgacgctgcgtcggttcctgcgcgcgcgcggccacaacgtggacaaggcggccgccatgctgctcaagttcctcaggtggcgggcggaggcggcgcccggcggcggcaccgtgcgggaggagcaggtgcgcggggagctggagcaggacaagatctacatgggcggcgtcgacaggaccggccgccccatcatcgtcggcttgctcgccaagcactactccgccaaccgcgacatggcggagttcaagagtacgtcgacgacgtggcccttctttcttcatcaatcaaaatgcgtgtgtacgatccccagagggcaggagaagttcctcgccatcatggatctcaagggctggggctacgcaaactgcgacgtccgggcctacatcgcggccattgagatcatgcagaactactacccggagcggctgggcaaggcgctgatgatcaacgtgccctacatcttcctcaaggtgtggaagacgatgatctaccccttcatcgacgccaacaccagggacaagttcgtgttcgtggatgacaagagcctgcgggagacgctgcggcgggagatcgacgagagccagctcccggagttccttggcgggaagatgcctctcgtctccctcaaggactacgcccagcagcctcagcccgtttgcgagtgagtctgtcgtagcgatggtggccggccggtgacgtgagcgacccaaagccgaaagctgattcgatctagactaagctaatacagcctacaagagggaggaagagaggccctacccgtggaattaagtcattagtttgtggtccaattcaataagaaagtaaatgtggtgtgtgaagatggtatggcattatcagtctttaatcccatattatacatttagatagaagaaaatcaacttatatgtggtagtgttccctactttttatatgagataaataaagggatacggagaatgctgcacgcacgctctcgctcacgtttcatg

SEQ ID NO: 210994 - DNA, 1637 bp, Zea Mays
gacggggaaacaagacgacgacgacgacgtcgtcgtcgtctcggcacaaggggccaatgcaaggaagaggaagaggaagaaaaaacgggcgcgtacggtggactagtagtagtagctagctatgaccgagagtactggactactggtactggtagagcattattggtgcacaatgtcgtcaggcaggctgtcagccttgctcgtccgatcccgcaggtgaacagacagatggactgattgggtagctgttggcaagctagttacccattattcttccactccacctcgcccgtggcccgtacccgtcgtcgtcgtccacacagccacaagctgctgctgctgctgcgcgtgcttcctcttcagttcagctgaggtagcggcgcctcacccatcccccccgctacatacacatatctccttcttcgaagaactcggtcctttgggagcgagcaggagcaggagcaggacaggaccaggaagatcattatcaggagaagctaggcggggatatggcgaacgctggcggcggggcggccgaggaaggggagtggctcaaggtcgcccagctcagggccctcgtccaggaggaccaccgcgccaaggaggtggacaacctgacgctgcgtcggttcctgcgcgcgcgcggccacaacgtggacaaggcggccgccatgctgctcaagttcctcaggtggcgggcggaggcggcgcccggcggcggcaccgtgcgggaggagcaggtgcgcggggagctggagcaggacaagatctacatgggcggcgtcgacaggaccggccgccccatcatcgtcggcttgctcgccaagcactactccgccaaccgcgacatggcggagttcaagagtacgtcgacgacgtggcccttctttcttcatcaatcaaaatgcgtgtgttttgtggtctacttcttcgacaagatctgtgccaggatccccagagggcaggagaagttcctcgccatcatggatctcaagggctggggctacgcaaactgcgacgtccgggcctacatcgcggccattgagatcatgcagaactactacccggagcggctgggcaaggcgctgatgatcaacgtgccctacatcttcctcaaggtgtggaagacgatgatctaccccttcatcgacgccaacaccagggacaagttcgtgttcgtggatgacaagagcctgcgggagacgctgcggcgggagatcgacgagagccagctcccggagttccttggcgggaagatgcctctcgtctccctcaaggactacgcccagcagcctcagcccgtttgcgagtgagtctgtcgtagcgatggtggccggccggtgacgtgagcgacccaaagccgaaagctgattcgatctagactaagctaatacagcctacaagagggaggaagagaggccctacccgtggaattaagtcattagtttgtggtccaattcaataagaaagtaaatgtggtgtgtgaagatggtatggcattatcagtctttaatcccatattatacatttagatagaagaaaatcaacttatatgtggtagtgttccctactttttatatgagataaataaagggatacggagaatgctgcacgcacgctctcgctcacgtttcatg

SEQ ID NO: 210995 - DNA, 2446 bp, Zea Mays
ccaccacctcccccctccatctcgctctcgctctcgctccgcccctctctccctctctcattggccattccgcccgcatgaaaccccaaaccctcgccggcatcgccgtcgccgcagcagcgcccgcgtagcccgcccctctcgccctcgccccccctccccgcgccccgatcccgcccgctccgcagccgatcctgccgggagcacgaccgatgacgatgaacggcgccgctgcaccggagcgctcgcccccagcctcgcccccgcctctggtccaggcccaggcgcctccgtcgccatctccgactcagccgctcgagtggaggttctcgcaggtgttcggtgagcgcagcgccggggaggaagtccaggatgttgacatcatctcagcaatagagttcaataaatcgggacatcatcttgccactggagacaggggtggacgagttgttttatttgaaaggactgatgtcaaagatgcatcctgagtttcgctacaaaactgagtttcaaagccatgagccagagtttgattacctcaagagcttggaaattgaagagaagattaaccaaataaagtggtgtcaagcaacaaattgtgcattgtttcttctatccacaaatgacaaaacgataaagttttggaaggtccaagaaaagaaagtaaaaaaggtatctgagatgaatttggaccgttcaactgctcctacaaatggtagtcctggtggtacgggatatctgcgcccatctctctcaaatggcaatgttctaaaacctggcggacttcctttgctacgccttcctgtggttacaacccaagaaacaagccttgctgcgagttgccgaagagtatatgctcatgcacatgactatcatataaattcaatatcaaataacagtgatggtgagacatttatatcagctgatgatttgcggataaatctttggaatttggaaatcagcaatcaaagtttcaatattattgatgttaagcctacaaacatggaagatctcactgaggtgataacatctgctgaattccatcctactcattgcaatacattggcgtatagtagctctaagggctccattcgacttgttgatctgcggcaatcagccctttgcgacaatcattcccaaatctttgagcagcatgaggccccaggttcaagatcatttttcactgagattatagcttcaatttcggacataaaattttcgaaggatgggaggcatattctcagtcgtgactacatgactctgaagctttgggatgttaagatgaattctggtcctgttgcaacattccaggttcatgagtatctaaggcctaagttatgtgatttatatgaaaatgactcaattttcgacaaatttgagtgttgtcaaagtggtgatggattaagagtagcaactggttcctacagcaacatttttcgcgtgtttggttgccgttctggtagcagtgaagcaacaacacttgaagcaacccgaaaccctacaaggcggcaggtccagactacctctagagctaccagatccctaagtactctgacaagggccgttagacgaggtggagagagcactggaatagatgccaatggaaattcctatgatctgagcacaaagttgctccatttggcctggcacccatctgaaaatctaattgcttgtgctgcagccaatagcttgtacatgtactacgcataaacaagcgaaacgaacagagcgacagtttttttttgttggttgctcccggtgagaaagacacgtttagccaatggtggattgaagccaggagttggtggagatggtgtattttgtgccagtcggaagcagttcttttcggtgccatatagagctgtccagagtccaagaggaagtgactcgatcattcccgggaagcagctttgattctgattattattattttttgtgtggggaaaggcttgtctttcccccataggttcatttagatttaaatataaggtcctagcttgacaacatctgggcatctgtagtagacgatgttaaaggggatgggtatggcgacgatccaccgttgtattcatgttgccatgggtttgtaacttcagggtggccgttggagcttttcatagttttatcttacagatcgaccttattttttttcccttgcgtggggaaccttgttttcgaagaatgccaggaccttcgtcatgtttgatgcgaaccctagaataggaaacatactgtcattttattgtatgtacatttttaataggttggagtggttcttctgttgtttagttatattcttttaccagtgcaacatgtcaacatgcccttgtcagctttgtcatacccttcatcacaggttcatcttggactggagcttagaaaccgggaacatgacatggtcaccggaacgtggcaacaatttgattcatgtggtgttaaatcttag

SEQ ID NO: 210996 - DNA, 1655 bp, Zea Mays
aaccaaactcaccctgtattccttttccgccgcacggcgtcgccgtgggctcggtctcgctcgccgctcgccgcatacggccgcagccagacagccaacgtactcggggcggttgccgggccggggtccgcgatcgatggctgcgcggcggagcaggggctgggcgcgcggcgcggcggcgttcgcggccgtggcgctggcggtgggcgcggggcggaggtacgggtgggacggtgcctccgcggtggcggcgttccgcgaggcccagggcgcgctggggcactgggcggcgccggcctacgtggccgcgcacgcgctcacgcttgcgctctgtccgccttacgccatcttcttcgagggcggcgccgcgctcatcttcggcttcctgccaggcgtcgcatgcgtcttctccgccaaggtcctcggggcctcgctctccttctggatcggcagggcaattttcagatacttcacttcagcaatggaatggctacagaggaacaagtacttccatgttgtggttaagggggttgagcgtgacggctggaaatttgtattgcttgctagattctctcctttgccttcctacatcatcaactacgcgctatcagccacggacgttggttttttcagagattttctctttcccacagttatcggctgcttaccaatgatactacagaatgtttccatcgtaagccttgctggtgcagcagtggcgtcgaccacaggatcaaataagtcccatatatactcttacctgtttccagcaataggcattgtgtccagtgttctcatttcatggaggattaagcagtattcctcagcccttgctgttcctgaagagctgcaaagttcacctactaatggagatcacaatggtgacgctaagctggcttccgcgccatctaaaaataccggatctgggaaaactaggaagagaaggatgtatgccccatggctccccagggcgagcggcgagagttgtccatgaacgggttcctctgcaagcatcccagcaccatcctggcgtccgacttcaagaccctgctgctaaaccacgccggagacctggacagcatagctcggtcgtcggtgagcatggtgaccgctgccgagttcccaggcctgaacaccctgggcctgtcgatggcgcgcaccgacatcgccccctacggggtggtgctcccgcactcccacccgcgggcgtcggagatgatgttcgtacacggtggcagcgtggtggtcggcttcctggacaccgagggcaggctgttccagaagcgtctcggtgagggagaggtgttcgtcttcccccgcggcttgcttcactacgtcatgaactacggtttcggcctcgcgacggcgttctccgtgctgaacagccagaaccccggcgtggtcggtgtcgcccacgctatgttttttgcgagtgattcggacgtagtcgaaggtctaatggccaggatgctcaagtttggagagatggaggtgactggtgacaacaacatcactgctggtttcccatgggcattctgatctgagtaggtgcaattcaagatcgttggttgtttaagttcccagtaacgaataatgtgtacactgtgatgtatctgattgaccgaagctaagtttgtagtctgaactacttgcag

SEQ ID NO: 210997 - DNA, 2309 bp, Zea Mays
gaaaaaccgagcgctccaagccctgattcggagatgaacgcgtccaggaaatccagccatctctccagcaaggacagtgcagagaccgcgagggatatcatcaccacgtccggccaaatccaacccctcaaaatcccggacgctgttgctgcgctcgcacaggctgctgcaaaggcaaatggtgagaccgagaaatatcttccagggtggccgttgttctcgcctcctaaggtgcagttggacaagtgtaccaagtgctccagagaattctgttctgcaatcaacttccggaggcacacacgtgttcatcgtagatccctcaagatagatagggattttccaaagaatagagaccttctcgctgcattctggaataaactcactgtggatgatgccagcaaaattttgtccttgacaggtgttgttattgagggtgtaactggttcatcaattttgacagcactgtcatcatggatgtgtaaaccagggtatgcttcgttgccagttgcatatgccagagctggcagtgagcttctggatctaattcaagcaaagccttcaatgcatctgcctgtttcatcggatgaactatttagtttgctcgatgaagcaagtgaaaaaacatttctttgcacaaatacagctgcttgtatacagaagtttttatttgatggagaggtagaaaaaattgcaactgagttgaaaaatgttgtttcgtgcgctagttacatgcttgaacaaaagctgcttgaagcatggtgtgctgataagactgctgaagcattaagatgccagaagttgctggaggatgaagaggaagctgctcagaaaaggcaagccgaactgatggaaaggaagcggatgaagaaacttaggcagaaagaacagaggttaaaaaacctcaaggatgaggatgcgacagttcagtcacctgaaatcatggatgatgcgacatgttctactgccattcaaagtgtgaattccatttatgatcctgactgttttgagcaagaagaatcgcagtatcttcaatttccagcactaattactttggaaactgacaatgattttaatgtggacctaccagtagaagatatcagttgtgatttggggcctgaaatggataaaggtgttgtattaaggcaacaagttgtttcaaggcatcatttaggcagaacggagaagcttgctgaaagtagcattttatctggttccgtagttacttcaaagcatgcagctttagcaaggccttcaaattacaaggatccaaatgtctgttctgcaccaagtagaaacaaaacttgtgaattgaaactacggtctgagattgaagaacagtgccaaaaacatgagttagatgtagatgaacgtggcattggtcctagcaaaaactctcgtgtgctaataggatctataattgtcgcaattaaagattgtagtgaacacttgctggacttaggttccaagaatgacccagtacctcccaatgtaaagacaaagaaacatgcatcagtcaaggtggtgcaacaagttacccatgagggaaacagaaatgaaggtgttcctgatagtgataaccgttctagcctcagtgttactacagatgaaatcagttattcaacctgctgcgatgcagatttggcagtggatgaacatttacaatgcaccacgttttccagtgaagaagcgacagcctttctttctcaaagatggaaagaagcaatagccgccgatcacgtgaaacttgttgtgtcctgaaaactaaaggaatggcagaataaagaaattctgttgagggcaacagcatggaagctccggccgacttgtcgccggatcccacagccctacaacataggtggttcttatctagcctgcagggtgctatgaaagtttggatgtcaagtttgtgttgcggcatgaatggttgtaaaatggcaggtgcattttgcagctgatttgagattgaagcagagggttctagttttacaaggggacagcttgtgtgatgggatctgtttttggtaaggaaaaaaaagagtgatttgaataatggtttggtcgcacaagttcctaatcttttgtactcgttagagtctgctaaacacgaaatgcatgtgtgttgaacatgttgtgcttgcgggttgcggctttcatattgtcccagttctttctgctgtcagttcacgtaactcgcgttcattttgtatcgcttcgtgctgtataacccgtactatttgcaatctattctggaagtctgcagaaactaagtaatttatagattgaactatttgatgatgagcatgtaacag

SEQ ID NO: 210998 - DNA, 3138 bp, Zea Mays
gcagaaccaagcgaagcatggtgaggcagctgccacacatccgaaaagggcgtagcgccagcgacgtgagccgagtggagatcagatgcaattaaccgcggctggagatcgatgagggggaaggattagtgttggtgcgcggcgagggatttcgtcgaacactttggcagcggggcacgcggcctgccgcagatcttgctggtcactgttcccgcgatcgactggaaaggtgtgctagtacattttgtgggcctatgtggtctgttgaaagagaggggaggagacaacacaaccctcgcccctcgtcttcattcgctcgtccgatcaggaaggacggtggatgaaaaagcgccctgcacgcctgaacaatcggcattattgttcactatctccttttgttttccctctcccgttcatctctctcctctttggccttcctttccttgcgacgacgactgggacgagcgccccccgcgcttctgcaggcgagcaccccgccaccagtcggagatgaacgcgtccaggaaatccagccatctctccagcaaggacagtgcagagaccgcgagggatatcatcaccacgtccggccaaatccaacccctcaaaatcccggacgctgttgctgcgctcgcacaggctgctgcaaaggcaaatggtgagaccgagaaatatcttccagggtggccgttgttctcgcctcctaaggtgcagttggacaagtgtaccaagtgctccagagaattctgttctgcaatcaacttccggaggcacacacgtgttcatcgtagatccctcaagatagatagggattttccaaagaatagagaccttctcgctgcattctggaataaactcactgtggatgatgccagcaaaattttgtccttgacaggtgttgttattgagggtgtaactggttcatcaattttgacagcactgtcatcatggatgtgtaaaccagggtatgcttcgttgccagttgcatatgccagagctggcagtgagcttctggatctaattcaagcaaagccttcaatgcatctgcctgtttcatcggatgaactatttagtttgctcgatgaagcaagtgaaaaaacatttctttgcacaaatacagctgcttgtatacagaagtttttatttgatggagaggtagaaaaaattgcaactgagttgaaaaatgttgtttcgtgcgctagttacatgcttgaacaaaagctgcttgaagcatggtgtgctgataagactgctgaagcattaagatgccagaagttgctggaggatgaagaggaagctgctcagaaaaggcaagccgaactgatggaaaggaagcggatgaagaaacttaggcagaaagaacagaggttaaaaaacctcaaggatgaggatgcgacagttcagtcacctgaaatcatggatgatgcgacatgttctactgccattcaaagtgtgaattccatttatgatcctgactgttttgagcaagaagaatcgcagtatcttcaatttccagcactaattactttggaaactgacaatgattttaatgtggacctaccagtagaagatatcagttgtgatttggggcctgaaatggataaaggtgttgtattaaggcaacaagttgtttcaaggcatcatttaggcagaacggagaagcttgctgaaagtagcattttatctggttccgtagttacttcaaagcatgcagctttagcaaggccttcaaattacaaggatccaaatgtctgttctgcaccaagtagaaacaaaacttgtgaattgaaactacggtctgagattgaagaacagtgccaaaaacatgagttagatgtagatgaacgtggcattggtcctagcaaaaactctcgtgtgctaataggatctataattgtcgcaattaaagattgtagtgaacacttgctggacttaggttccaagaatgacccagtacctcccaatgtaaagacaaagaaacatgcatcagtcaaggtggtgcaacaagttacccatgagggaaacagaaatgaaggtgttcctgatagtgataaccgttctagcctcagtgttactacagatgaaatcagttattcaacctgctgcgatgcagatttggcagtggatgaacatttacaatgcaccacgttttccagtgaagaagcgacagcctttctttctcaaagtaaacatcttgccgctattattttcgaacttccatgaagcgtggttaaccaataaattctcctccacttaagcgagttcatttcactatattaacttgacctagcagttctttctttctttacttttttttaaagaatacaagtaacgatctgtctatgctacatgagagtctgaggaaaagaaagcaagtactcaaattaactgatgccattcaaaaagtagacagcattactttggcatattatgtttggcactagagtaaaataattattcatatctttttaatcaggaatttttattgtggttcttccatatttagctcagtagtgaagcttggttgtattttgcaggatggaaagaagcaatagccgccgatcacgtgaaacttgttgtgtcctgaaaactaaaggaatggcagaataaagaaattctgttgagggcaacagcatggaagctccggccgacttgtcgccggatcccacagccctacaacataggtggttcttatctagcctgcagggtgctatgaaagtttggatgtcaagtttgtgttgcggcatgaatggttgtaaaatggcaggtgcattttgcagctgatttgagattgaagcagagggttctagttttacaaggggacagcttgtgtgatgggatctgtttttggtaaggaaaaaaaagagtgatttgaataatggtttggtcgcacaagttcctaatcttttgtactcgttagagtctgctaaacacgaaatgcatgtgtgttgaacatgttgtgcttgcgggttgcggctttcatattgtcccagttctttctgctgtcagttcacgtaactcgcgttcattttgtatcgcttcgtgctgtataacccgtactatttgcaatctattctggaagtctgcagaaactaagtaatttatagattgaactatttgatgatgagcatgtaacag

SEQ ID NO: 210999 - DNA, 748 bp, Zea Mays
gtgcaggtcgtcgcagcgccgctacgagggggaggggatcgaactcgaaggagaatttccattcgaccccatccacttctcacctcaatctcgcgagaaccggagccggagccggaggcctagtagatgaagacgttcgatccgtaaaaagaacttcttccgccgggaatgaaagcgcatttttccttcctcacggggttcgccatcaccggcttcatcatcactaagatgacggccaacttcaccgaggaggacatcaagaactccaagttcgtccaggagcacaagaagcgctgaccaaccaggtgttgtccgaattgcctgtctggacagccagttatgttatgctgtttgaatgaaaaattagcttctttttcttcatctaaatgcgtgcagcctatgctccatctgtaatgtaataagaggcaactgacttgatccaaaagctaccagcttctgattatgaatgatacttcaagtttgatctggttctctgacctgggcatcgatccacttatatgcatgcaacaaatgcttatatctttatgtaggttttttctggatgttgggttgttgttgaattagttgccaaaataaaggttttgctggaattcacatcatcgcagagtttgaacttcatgcctctcgtcgtgcaaacaaacatctatctatatatatattgccatacagggtgcgtgaatatagccaaattgctcaggatcatctatcgtaatgaactaaagtccat

SEQ ID NO: 211000 - DNA, 2318 bp, Zea Mays
cttattagctatctctcagctaacctccctaggaagaataataagctgcaaaaggcacaagggcgacgccgataccgatgcaaataccatagcgttgatgtaaagtggcgccagaggagaaaaaaaggaagcgagccgagaaacatggacgaggaagaggtccatatcgcagttgggaagaactcaagaaaggagaaagccaacatactgtgggccgccgccaatttccccagggccaccatcgttcttgtccatgttcactggccctccaagtggatgcctttcatgggtggcaaagtgctatacaagttcgctgatgagaaggagaaggagatgcatagaggcagagaaatgaaagtaatggtcaatatgttatcacagtacaaaaaaatgtgcgggacgagaaaggaacatgtcaaggcaagttgtggttcgccagtgctgtcaggtttggctggtactcaacggcaaacacatctccaccagcaatgatcacctggaatatagtgaaaatataggatatggaggggggagctcaggtattttggcatctatacatgagctaggtgaggaatctgacggctacgtgacaccacgaagtgatcttgtagacgaaaccatggatgaggagtcggctgaaatgaatgattctgatcaattagtaacggaagatgaaacattgactgaacaaggcacagaggaatcagtcacttctgaagacatggaaaacttttttcaagagaatgctgatcagtctgatgagatacagaatttcagaaacatagctgacaaggctgaaaaaatcatggaggaaatagaccggctgcaaaagaaactgaaacagctgcaaggagaggagcgtaatcacgacgagaggagcttgtcacctagacaaatggctgcgtcactgaagcgaaagagtctatcagagcctagatatccagagctgcagattccagagaacattgaacaattctcgatgtcgcaaatcgaaaaggcgaccgacaacttccactcaagaaatttcatcggaggaggaggttatggcccagtctacaagggaaaagtgggcagcacatcagtggctattaagctgctgaagcctcgtggtagacaaggtttctcagagtatcagcaagaggtggtggtgctgagcaaattggagcacccacacatcgtgaggctgattggcgtgtgcccggagtcgtgcggcctggtgtacgagcacctccccaacggcacgctcaaggacaggctctccaagggcctcctgtggaaggaccgcgtcaggatcctcggcgagctgcgctctgcgctggcgtacctccactccaggcggccccacgccatcatccacgccgacgtgaagctgaccaacatcctcctggacgccggcaacgcgagccggctgggagacttcgggacggcgcgggcggtgcacgtgaaaccgctggaggaggagaccatcggccgccgcacgaacccgatgggcacggcggggtacatggaccccgtgttcttcatgaccggcgagctcacaacggagtcggacgtgtacgcgttcggcatggtgattctgcagatgctcacggggctgctggatctcaacgtcgcggagcaggcgcgcgaggcggtgaagatggacgccgtgcacagcgtgctggacgcgtccgccgggccctggccggaggtgcaggccgagaagctcatgaagctggcgctcaggtgctgcagcctggagaggaggcggcgaccggcgatcacgtccgatgccgagtggagatcgctcgacatcctacgggctatggtaaacccagctagtaaatcctggaaatggaattcccatgccagctgaatttactgtatgtatgcacctcccagtacatgccttgctgtagcctgcagatgccatgaaacacagtaggggtagctagtgattcttcttgtgattagatatagataagcaaaaatctaagaattgatgtgcattactagaatataagtattcaggggtagtacagtagagaaacaagagatggagcagacagaaatcatgctacatatgaagcagcaattggttagccaagatgatgatggtgcacggttattttttgggaaatctgcacctactcatgttcagtgtcccttgcaggatgcagaaatattatgtgtatattggtagacggtaatataaatctgactatgcacgttttgttcaagatttattacacgaaacggtactgctgatgcatgttccttgaattaatggtgtgagaaagaagtgtcaatcatcagcgaagagtttttttttttcaaaa

SEQ ID NO: 211001 - DNA, 2481 bp, Zea Mays
caccagcataagtacaagtcgaccagatccgaagccacgcttccagcctcttgttgtcacttattagctatctctcagctaacctccctaggaagaataataagctgcaaaaggcacaagggcgacgccgataccgatgcaaataccatagcgttgatgtaaagtggcgccagaggagaaaaaaagcacatgtaggaagcgagccgagaaacatggacgaggaagaggtccatatcgcagttgggaagaactcaagaaaggagaaagccaacatactgtgggccgccgccaatttccccagggccaccatcgttcttgtccatgttcactggccctccaagtggatgcctttcatgggtggcaaagtgctatacaagttcgctgatgagaaggagaaggagatgcatagaggcagagaaatgaaagtaatggtcaatatgttatcacagtacaaaaaaatgtgcgggacgagaaaggttagtgcacattaccttacacatgatgacactgttgccggtgttgtgaacctcataaagaagctcaaaattaaaagaatagtcatcggttcaaggaacatgtcaaggcaagttgtggttcgccagtgctgtcaggtttggctggtactcaacggcaaacacatctccaccagcaatgatcacctggaatatagtgaaaatataggatatggaggggggagctcaggtattttggcatctatacatgagctaggtgaggaatctgacggctacgtgacaccacgaagtgatcttgtagacgaaaccatggatgaggagtcggctgaaatgaatgattctgatcaattagtaacggaagatgaaacattgactgaacaaggcacagaggaatcagtcacttctgaagacatggaaaacttttttcaagagaatgctgatcagtctgatgagatacagaatttcagaaacatagctgacaaggctgaaaaaatcatggaggaaatagaccggctgcaaaagaaactgaaacagctgcaaggagaggagcgtaatcacgacgagaggagcttgtcacctagacaaatggctgcgtcactgaagcgaaagagtctatcagagcctagatatccagagctgcagattccagagaacattgaacaattctcgatgtcgcaaatcgaaaaggcgaccgacaacttccactcaagaaatttcatcggaggaggaggttatggcccagtctacaagggaaaagtgggcagcacatcagtggctattaagctgctgaagcctcgtggtagacaaggtttctcagagtatcagcaagaggtggtggtgctgagcaaattggagcacccacacatcgtgaggctgattggcgtgtgcccggagtcgtgcggcctggtgtacgagcacctccccaacggcacgctcaaggacaggctctccaagggcctcctgtggaaggaccgcgtcaggatcctcggcgagctgcgctctgcgctggcgtacctccactccaggcggccccacgccatcatccacgccgacgtgaagctgaccaacatcctcctggacgccggcaacgcgagccggctgggagacttcgggacggcgcgggcggtgcacgtgaaaccgctggaggaggagaccatcggccgccgcacgaacccgatgggcacggcggggtacatggaccccgtgttcttcatgaccggcgagctcacaacggagtcggacgtgtacgcgttcggcatggtgattctgcagatgctcacggggctgctggatctcaacgtcgcggagcaggcgcgcgaggcggtgaagatggacgccgtgcacagcgtgctggacgcgtccgccgggccctggccggaggtgcaggccgagaagctcatgaagctggcgctcaggtgctgcagcctggagaggaggcggcgaccggcgatcacgtccgatgccgagtggagatcgctcgacatcctacgggctatggtaaacccagctagtaaatcctggaaatggaattcccatgccagctgaatttactgtatgtatgcacctcccagtacatgccttgctgtagcctgcagatgccatgaaacacagtaggggtagctagtgattcttcttgtgattagatatagataagcaaaaatctaagaattgatgtgcattactagaatataagtattcaggggtagtacagtagagaaacaagagatggagcagacagaaatcatgctacatatgaagcagcaattggttagccaagatgatgatggtgcacggttattttttgggaaatctgcacctactcatgttcagtgtcccttgcaggatgcagaaatattatgtgtatattggtagacggtaatataaatctgactatgcacgttttgttcaagatttattacacgaaacggtactgctgatgcatgttccttgaattaatggtgtgagaaagaagtgtcaatcatcagcgaagagtttttttttttcaaaa

SEQ ID NO: 211002 - DNA, 1157 bp, Zea Mays
ctgaagccgccagcgacttctctaatcgaatcatacactccgggcccgtagtctgacactgacctgacgtgctggatgatgctgtacctatactacgcagcacaccagcataagtacaagtcgaccagatccgaagccacgcttccagcctcttgttgtcacttattagctatctctcagctaacctccctaggaagaataataagctgcaaaaggcacaagggcgacgccgataccgatgcaaataccatagcgttgatgtaaagtggcgccagaggagaaaaaaaggaagcgagccgagaaacatggacgaggaagaggtccatatcgcagttgggaagaactcaagaaaggagaaagccaacatactgtgggccgccgccaatttccccagggccaccatcgttcttgtccatgttcactggccctccaagtggatgcctttcatgggtggcaaagtgctatacaagttcgctgatgagaaggagaaggagatgcatagaggcagagaaatgaaagtaatggtcaatatgttatcacagtacaaaaaaatgtgcgggacgagaaaggttagtgcacattaccttacacatgatgacactgttgccggtgttgtgaacctcataaagaagctcaaaattaaaagaatagtcatcggttcaaggaacatgtcaaggcaagttgtggttcgccagtgctgtcaggtttggctggtactcaacggcaaacacatctccaccagcaatgatcacctggaatatagtgaaaatataggatatggaggggggagctcaggtattttggcatctatacatgagctaggtgaggaatctgacggctacgtgacaccacgaagtgatcttgtagacgaaaccatggatgaggagtcggctgaaatgaatgattctgatcaattagtaacggaagatgaaacattgactgaacaaggcacagaggaatcagtcacttctgaagacatggaaaacttttttcaagagaatgctgatcagtctgatgagatacagaatttcagaaacatagctgacaaggctgaaaaaatcatgctggaacgattccaggtgcaatccgatacaaacgaacaaggccttagttaactacaaacacagatggtttcaacttgcgataggaggaaatag

SEQ ID NO: 211003 - DNA, 914 bp, Zea Mays
catttccaggatttactagctgggtttaccatagcccgtaggatgtcgagcgatctccactcggcatcggacgtgatcgccggtcgccgcctcctctccaggctgcagcacctgagcgccagcttcatgagcttctcggcctgcacctccggccagggcccggcggacgcgtccagcacgctgtgcacggcgtccatcttcaccgcctcgcgcgcctgctccgcgacgttgagatccagcagccccgtgagcatctgcagaatcaccatgccgaacgcgtacacgtccgactccgttgtgagctcgccggtcatgaagaacacggggtccatgtaccccgccgtgcccatcgggttcgtgcggcggccgatggtctcctcctccagcggtttcacgtgcaccgcccgcgccgtcccgaagtctcccagccggctcgcgttgccggcgtccaggaggatgttggtcagcttcacgtcggcgtggatgatggcgtggggccgcctggagtggaggtacgccagcgcagagcgcagctcgccgaggatcctgacgcggtccttccacaggaggcccttggagagcctgtccttgagcgtgccgttggggaggtgctcgtacaccaggccgcacgactccgggcacacgccaatcagcctcacgatgtgtgggtgctccaatttgctcagcaccaccacctgaggatcagagcacccccagtgcgattatgactgggccataacctcctcctccgatgaaatttcttgagtggaagttgtcggtcgccttttcgatttgcgacatcgagaattgttcaatgttctctggaatctgcagctctggatatctaggctctgatagactctttcgcttcagtgacgcagccatttgtctagaatgtgatgtttgatgtgtag

SEQ ID NO: 211004 - DNA, 475 bp, Zea Mays
gtccaatgcacgaactgatataagaaaccctagcggagccactaacacagtcgcctccttcctgcgccgccgccgccgccgccgccgctaccaccgcctcgcggccgcctgcggctccgcgtttccgcacggaaggtgattaggtgtgactgtagtcactgtcatgcagttggtgaaggtttcttgaggctgagaacatggtgctgaagacggaactttgccgcttcagcggccagaagatttatcctgggaaaggcattagatttatccgtgctgattctcaggtcttcctttttgccaactcgaaatgcaagcgctacttccacaaccgcctgaagcctgcaaagcttacctggacagcaatgtacaggaagcagcacaagaagattctgaacagaggagaatatggttgaatagaccaaagtgccattgacatatgctgagttttccttgagttattacggttcaaatggag

SEQ ID NO: 211005 - DNA, 1521 bp, Zea Mays
cccatttttaatgcatggtgcttccatcgttacctgttttcgactgaatttgattgatataggcaaggaggttttgcaccatacaagatcgtcaaaattgccgaaatgggaggtataattagtggggactcgcctaggcacagctcaccagcatcgaagttagagaaaaagatggttgacgctatgcaacagagggcattaaaaggaacctctgtgaaatcattcaatagtgtcatcatgaaatttcctaaaatcgacgagagtttgagaaactgcaggactatcttccaggaatttgatgaagattccaatggtgaaatagatcaactggaactcaagcgttgtttccaaaatttgggtatcgaatcaactgatgaggagataaaagatctttttgaggcatgtgacatatatgaacatatgggcatgaagttcaacgagtttattgtcttcctgtgccttgtttatcttctaaatgaccctgcagtgtctgaagcaagaaaaagaatggggttagggaaccttgaaccaacatttgaaacattggttgagtcatttgtcttcttggacaagaacaaagatggatatgtcagtaagagtgagatgatacaggcaataaatgagaccattggaggagagcgctcttcagggcgcataggcatgagaagatttgaggaaatggattgggacaagaatggcacagtgaccttcaaggaattcctttttgcttttactcgctgggtggggatcgataatgaagacgatgatgatgaagataaagaagaatgagtgtgccaactaaggattaggcgttatgaattggccaggttgactggaggcctccagcagcttcctcctaccgttgttcagaagcagtagttcatgttttttgtgtgccgagctgatgaatatgtttatgttcgtataaacaggatgaacactagctatgttaaggatttgcttataaaaagttacaccgggtcagatgctgttctgttagcgtacattgtctttaaaaactatttgcattctgtatgacaatgtaaacttgtgaacggtagtagtgctttactttgtttcaatttggttgtttgctgcttctgttcattttttgtcatggatgtctattatgctctttaattaatacactagtactagaatgcagagaacccaagttgcctgtggttgtggcaagaatttgctgataagaagttgcagccctaccgctattatgaaatttgcaacccgttgttaagaaaatatgcagaacttccaaggttttggtggtgctcgttgcttttgaagtttgctgttgtgggacgagcaacacgtaccgtgtcctacggcctacgcgcttgcttccagtcttttcttcatcagtagcaaaggtgatcaaattggcgtggtagggatcatcatagtctcataggcaatgagcgcattgactcgctgagttaaagcgccgagctgatctgctgatgcaaagttccagttagctccaagctaattaatattataaca

SEQ ID NO: 211006 - DNA, 1502 bp, Zea Mays
atccgttcattttgtgccgtggaatattgatgttttcgctgctgcaaggaggttttgcaccatacaagatcgtcaaaattgccgaaatgggaggtataattagtggggactcgcctaggcacagctcaccagcatcgaagttagagaaaaagatggttgacgctatgcaacagagggcattaaaaggaacctctgtgaaatcattcaatagtgtcatcatgaaatttcctaaaatcgacgagagtttgagaaactgcaggactatcttccaggaatttgatgaagattccaatggtgaaatagatcaactggaactcaagcgttgtttccaaaatttgggtatcgaatcaactgatgaggagataaaagatctttttgaggcatgtgacatatatgaacatatgggcatgaagttcaacgagtttattgtcttcctgtgccttgtttatcttctaaatgaccctgcagtgtctgaagcaagaaaaagaatggggttagggaaccttgaaccaacatttgaaacattggttgagtcatttgtcttcttggacaagaacaaagatggatatgtcagtaagagtgagatgatacaggcaataaatgagaccattggaggagagcgctcttcagggcgcataggcatgagaagatttgaggaaatggattgggacaagaatggcacagtgaccttcaaggaattcctttttgcttttactcgctgggtggggatcgataatgaagacgatgatgatgaagataaagaagaatgagtgtgccaactaaggattaggcgttatgaattggccaggttgactggaggcctccagcagcttcctcctaccgttgttcagaagcagtagttcatgttttttgtgtgccgagctgatgaatatgtttatgttcgtataaacaggatgaacactagctatgttaaggatttgcttataaaaagttacaccgggtcagatgctgttctgttagcgtacattgtctttaaaaactatttgcattctgtatgacaatgtaaacttgtgaacggtagtagtgctttactttgtttcaatttggttgtttgctgcttctgttcattttttgtcatggatgtctattatgctctttaattaatacactagtactagaatgcagagaacccaagttgcctgtggttgtggcaagaatttgctgataagaagttgcagccctaccgctattatgaaatttgcaacccgttgttaagaaaatatgcagaacttccaaggttttggtggtgctcgttgcttttgaagtttgctgttgtgggacgagcaacacgtaccgtgtcctacggcctacgcgcttgcttccagtcttttcttcatcagtagcaaaggtgatcaaattggcgtggtagggatcatcatagtctcataggcaatgagcgcattgactcgctgagttaaagcgccgagctgatctgctgatgcaaagttccagttagctccaagctaattaatattataaca

SEQ ID NO: 211007 - DNA, 691 bp, Zea Mays
ttcattttgtgccgtggaatattgatgttttcgctgctgcaaggaggttttgcaccatacaagatcgtcaaaattgccgaaatgggaggtataattagtggggactcgcctaggcacagctcaccagcatcgaagttagagaaaaagatggttgacgctatgcaacagagggcattaaaaggaacctctgtgaaatcattcaatagtgtcatcatgaaatttcctaaaatcgacgagagtttgagaaactgcaggactatcttccaggaatttgatgaagattccaatggtgaaatagatcaactggaactcaagcgttgtttccaaaatttgggtatcgaatcaactgatgaggagataaaagatctttttgaggcatgtgacatatatgaacatatgggcatgaagttcaacgagtttattgtcttcctgtgccttgtttatcttctaaatgaccctgcagtgtctgaagcaagaaaaagaatggggttagggaaccttgaaccaacatttgaaacattggttgagtcatttgtcttcttggacaagaacaaagatggatatgtcagtaagagtgagatgatacaggcaataaatgagaccattggaggagagcgctcttcagggcgcataggcatgagaagatttgccatggtaaaaaaatgatatcagcatcctacccgcatcttta

SEQ ID NO: 211008 - DNA, 1099 bp, Zea Mays
gtccatttcgctgtcactctgctgcactgtcgccctaccatgtagtattattatgcatggtgctccagtttgtcattagtccatgacaaggggctcggttagtccacagccctagaggctgcagctgcacacttctcttctctgttttcgccggttaaactttccccacttgttgctggccttcgaatctgtggtttgtttgagcttgtaaggatctcttcttcttcactctagcagggaagcgaagaacagggaagcaaggacatggatgctttcagtgcagtgatggacaaggtaaagagccacccagaaatgatggagaaggtaagtgcagtgatggacaaggtgaagaagagccacccagaagcggtggaaaaggtcaaggacgaggtgaagagccttgctgacgctctccacctgcggagacatggatccaaagataaagaacctgagtctgaagagaaggccgtagaaggcgaggcagcgcagagcgtcgaggaggaggagggtacctctgctgacaagactgcagaacctaatgtgttggagcaggccgtacaggagattcaggctgtcgccgcagctttgcagcagacagcacctgaaactgaaactgaaattccagttgagactgctgctgctgctgctcctgaaactttggctgaaggagacaagcctgaagaaacaaacagggatgtggagaaagacgacccaaagaagcggctcgatttcgccgggttcttcgccatgctgtttgagaggttctgctccccggccaacaagaagaaagactgagtgattgcaggtcagctgtggatttctcgttttgtgatcttggacgtggaaattacattttactgggtggtgtacagtctgcacttgtgttctattaagataaatctgctcttgcttttttactttcttctggtgcaatgactacagtttacttgatgtatttattgtcgcccttgtggaattgatttagtttatgtgaacgattgatttattttgggttaagataatgcagtgagtgtgtgatgccttgtatggacatgtgagaaccgattttgctcattgtgaacaaaattttagccctact

SEQ ID NO: 211009 - DNA, 1664 bp, Zea Mays
gccgtgcaaggcacgatcgtcgaccaaccaccatgaatgcctgcagtttgcttgcgtccatttcgctgtcactctgctgcactgtcgccctaccatgtagtattattatgcatggtgctccagtttgtcattagtccatgacaaggggctcggttagtccacagccctagaggctgcagctgcacacttctcttctctgttttcgccggttaaactttccccacttgttgctggccttcgaatctgtggtttgtttgagcttgtaaggatctcttcttcttcactctgtaagtcttgattcagccaatacctaggaataggatcgcaggctttgctcttgcgagcttttcggtgcttctttcatcgttttctctacatgtttctgtatatatatatatatggggatttggcgtcttctctgtagtcgacaataatcctttcccgtctaatcggtcagtcagcggataatccccgcccgtaattctgcactaatcggggcgtgttgaaagcatacagtaataaagggaaggtggagaaagtgtgattagctaatggatctaggtcaccgtaatttataatccttattagcacaatcctaccagtatttcttgtgatgatgctattggattcaactgcacccatcccccacttgcttctgttcttgtccgttcctgtcttcttgacttgtaagatgctattggaccgaaccttatgtatgcctatctaaattagccctcccctgttttccttctctctctctcttgaaaccaaattaagcatccatgtcgatattgtagagcagggaagcgaagaacagggaagcaaggacatggatgctttcagtgcagtgatggacaaggtaaagagccacccagaaatgatggagaaggtaagtgcagtgatggacaaggtgaagaagagccacccagaagcggtggaaaaggtcaaggacgaggtgaagagccttgctgacgctctccacctgcggagacatggatccaaagataaagaacctgagtctgaagagaaggccgtagaaggcgaggcagcgcagagcgtcgaggaggaggagggtacctctgctgacaagactgcagaacctaatgtgttggagcaggccgtacaggagattcaggctgtcgccgcagctttgcagcagacagcacctgaaactgaaactgaaattccagttgagactgctgctgctgctgctcctgaaactttggctgaaggagacaagcctgaagaaacaaacagggatgtggagaaagacgacccaaagaagcggctcgatttcgccgggttcttcgccatgctgtttgagaggttctgctccccggccaacaagaagaaagactgagtgattgcaggtcagctgtggatttctcgttttgtgatcttggacgtggaaattacattttactgggtggtgtacagtctgcacttgtgttctattaagataaatctgctcttgcttttttactttcttctggtgcaatgactacagtttacttgatgtatttattgtcgcccttgtggaattgatttagtttatgtgaacgattgatttattttgggttaagataatgcagtgagtgtgtgatgccttgtatggacatgtgagaaccgattttgctcattgtgaacaaaattttagccctact

SEQ ID NO: 211010 - DNA, 1698 bp, Zea Mays
tgtttaggccgtcgagcgttggccgcgcgtcgtatacgaagtccgagcccgacccgcaacccgaaacccgtctcgcctcgccaaggcaaggcttcctttcctctcccttcccgtccaagatggaagcagagtacccccaccagcaggcggccccctcttactccacgaccgccaccgtcttctggccgtacgcgactcgccgcagaaagagagccgaggacggcagcgacctctcgctggcgtcggatatggatctcgacgccgacgcgcagcgcgccgcagataagctgaaagcagtgtcagaggaacttggacatgagatccgggttttttcaagtgagaactttgctctacaaccgagcaagctgcctagtgcagatcatgaggaaggtgacgacttttatgagcttcagcctgctgattactacaacttgatttcaaacaggatgggagagctatctaaaatgctaaagactcgcaagatgcgggaagcagaacttgctgctcagcgagcaaagcgaacaaaggcagtaatgagggtgcgattccctgatggctacatacttgaggctgactttcttccatcagagaggattcatagtctagtggacctgctcatgaaagtacttgctagaccagatctgccattctatctctatacagtacctccaaagaagcgaatactggacacatcacaggacttctatacatctggttttgttcctggagctaatgttcatttttcttatgatctgcccgaaggtttgttgttaaatgcagatgatctaaaagcaggacccttcctccgtgaaggaattctaagtttggatggattgtcacttctgctgaaacctgctagtcaacctgatgattctagaatgaactcttctactcatcaatctggtgcatctcaatctgaccctgtaccaacaacaaataagaagcctggcagaccaaagtggctgaaaaggtaaaatccagaataatcttcttgccattgtggtacaatagttaaaaggagaaaaacttgtcaagtttctggggataattccaattccttatcaatcttcttaagcaatgatacacagctctcatgcgtatttgagaagaataattccttatcgtcttttggtgataccactccaggcgtcaggtgtgtgctttcaacacagaatcagtctgtaaacactattcatggttgaacaagtttaaagtttggacagactacactgctgcagtacaaggattggaccctctgcccactgaagctgttgggggcattataattggggccccacctttttgtaggtgggagacaagtagcatgtaaacttgaatgtgttgctgactcaaacagaacagtgctctgctctggctaagcacctggccatcttacacatcgtgtaagccccatagtaacttgaatgtgttacacatcgtgtgcctgtctttgctatccagtctttacacagcatttcaggaaacagaaagtgcttgaaagtgtaccaagtgtggccgtgtggggtttcagttcgcccatgatattgtggcaagtcgctttcttgtgattgatggtgatggtgccctcaccagcgactaatttgtcgccaaatggcatgtgttttcttcttatgatggtgacttgctgtccagctataccctgtgtggttgtgatttgtggtttatattcaacgtcca

SEQ ID NO: 211011 - DNA, 1150 bp, Zea Mays
cttccgtcgtggtcgtggaggaactcgcgggcgagctcgcgcgggtctcgcagcagctctccacgccgagttcgtccgcatgaccgcatctccctctcctctctcatcaggagtatattgggcgggatccgagacggccgtgccgcttgcattgctcgatcgaggagggaaaaaaaacaaaagggaagcaggcaggtcgtcgagaggggaggatcggagaatgcagcagcagatggcggcgacggtggaggagcagatgatggtgaaggccatcagggaggagtcgtcgtgggaggtcctccccaagcgcatccaggcagcgctggtctccaaggaagaatggcaccgcagggttgtgaattactgtatacgtaagaggttgccatggagctcctgtttcgccagaaaagtatgcaaggaaggggactactatgaggacctgatgcgctatctccgcaaaaaccttgcattatatccataccatcttgcagacttcatatgccgagtgatgaggatatcacccttcagatattactgtgatgtccttttcgaagctatgaagaatgagcaaccatacgacagtattccaaatttcagtgctgcagatgctctgaggattacaggggtaggaagaaatgaatttattgatatcatgaataagtgcagatcaaagaagataatgtggaaactgaacaaatcaattgcgaaagagttgctcccagcagaacctgcagatttagcaatagaaccatggtggggcgttcgatttgtcaacttcacactggaagaatttaagctttcagaagacgagacatcagcgatagataaaatatgtaaggaggaagtcaattcatatgttctatttgacccggaggtagtacggggcctttataggagagggatggtatacttcgatgtccctgtttatcctgatgatcgttttagagtttccaggcttgaaggttttgtttcaaacaaggatcagtcctacgaagatccaattgaagagctactgtatgctgtattcgttgtatcaagtgaaaatgccacggttgctgaactggctacaactttacaagtcgacctttaccagctccaggcagctgcatcgtttgcttgccgattaggatgggctgtgaagcttctggat

SEQ ID NO: 211012 - DNA, 1135 bp, Zea Mays
gtggtcgtggaggaactcgcgggcgagctcgcgcgggtctcgcagcagctctccacgccgagttcgtccgcatgaccgcatctccctctcctctctcatcaggagtatattgggcgggatccgagacggccgtgccgcttgcattgctcgatcgaggagggaaaaaaaacaaaagggaagcaggcaggtcgtcgagaggggaggatcggagaatgcagcagcagatggcggcgacggtggaggagcagatgatggtgaaggccatcagggaggagtcgtcgtgggaggtcctccccaagcgcatccaggcagcgctggtctccaaggaagaatggcaccgcagggttgtgaattactgtatacgtaagaggttgccatggagctcctgtttcgccagaaaagtatgcaaggaaggggactactatgaggacctgatgcgctatctccgcaaaaaccttgcattatatccataccatcttgcagacttcatatgccgagtgatgaggatatcacccttcagatattactgtgatgtccttttcgaagctatgaagaatgagcaaccatacgacagtattccaaatttcagtgctgcagatgctctgaggattacaggggtaggaagaaatgaatttattgatatcatgaataagtgcagatcaaagaagataatgtggaaactgaacaaatcaattgcgaaagagttgctcccagcagaacctgcagatttagcaatagaaccatggtggggcgttcgatttgtcaacttcacactggaagaatttaagaagacgagacatcagcgatagataaaatatgtaaggaggaagtcaattcatatgttctatttgacccggaggtagtacggggcctttataggagagggatggtatacttcgatgtccctgtttatcctgatgatcgttttagagtttccaggcttgaaggttttgtttcaaacaaggatcagtcctacgaagatccaattgaagagctactgtatgctgtattcgttgtatcaagtgaaaatgccacggttgctgaactggctacaactttacaagtcgacctttaccagctccaggcagctgcatcgtttgcttgccgattaggatgggctgtgaagcttctggat

SEQ ID NO: 211013 - DNA, 1125 bp, Zea Mays
gggcgagctcgcgcgggtctcgcagcagctctccacgccgagttcgtccgcatgaccgcatctccctctcctctctcatcaggagtatattgggcgggatccgagacggccgtgccgcttgcattgctcgatcgaggagggaaaaaaaacaaaagggaagcaggcaggtcgtcgagaggggaggatcggagaatgcagcagcagatggcggcgacggtggaggagcagatgatggtgaaggccatcagggaggagtcgtcgtgggaggtcctccccaagcgcatccaggcagcgctggtctccaaggaagaatggcaccgcagggttgtgaattactgtatacgtaagaggttgccatggagctcctgtttcgccagaaaagtatgcaaggaaggggactactatgaggacctgatgcgctatctccgcaaaaaccttgcattatatccataccatcttgcagacttcatatgccgagtgatgaggatatcacccttcagatattactgtgatgtccttttcgaagctatgaagaatgagcaaccatacgacagtattccaaatttcagtgctgcagatgctctgaggattacaggggtaggaagaaatgaatttattgatatcatgaataagtgcagatcaaagaagataatgtggaaactgaacaaatcaattgcgaaagagttgctcccagcagaacctgcagatttagcaatagaaccatggtggggcgttcgatttgtcaacttcacactggaagaatttaagaagctttcagaagacgagacatcagcgatagataaaatatgtaaggaggaagtcaattcatatgttctatttgacccggaggtagtacggggcctttataggagagggatggtatacttcgatgtccctgtttatcctgatgatcgttttagagtttccaggcttgaaggttttgtttcaaacaaggatcagtcctacgaagatccaattgaagagctactgtatgctgtattcgttgtatcaagtgaaaatgccacggttgctgaactggctacaactttacaagtcgacctttaccagctccaggcagctgcatcgtttgcttgccgattaggatgggctgtgaagcttctggat

SEQ ID NO: 211014 - DNA, 888 bp, Zea Mays
ctcgcgcgggtctcgcagcagctctccacgccgagttcgtccgcatgaccgcatctccctctcctctctcatcaggagtatattgggcgggatccgagacggccgtgccgcttgcattgctcgatcgaggagggaaaaaaaacaaaagggaagcaggcaggtcgtcgagaggggaggatcggagaatgcagcagcagatggcggcgacggtggaggagcagatgatggtgaaggccatcagggaggagtcgtcgtgggaggtcctccccaagcgcatccaggcagcgctggtctccaaggaagaatggcaccgcagggttgtgaattactgtatacgtaagaggttgccatggagctcctgtttcgccagaaaagtatgcaaggaaggggactactatgaggacctgatgcgctatctccgcaaaaaccttgcattatatccataccatcttgcagacttcatatgccgagtgatgaggatatcacccttcagatattactgtgatgtccttttcgaagctatgaagaatggcaaccatacgacagtattccaaatttcagtgctgcagatgctctgaggattacaggggtaggaagaaatgaatttattgatatcatgaataagtgcagatcaaagaagataatgtggaaactgaacaaatcaattgcgaaagagttgctcccagcagaacctgcagatttagcaatagaaccatggtggggcgttcgatttgtcaacttcacactggaagaatttaaggtcagatccattcatggtgatttttatttctgtcgattaagggcattgcaatttgacaggaaaaagaaaaaaagaaatacagtgctatcttcctatcacgtaaagcatacattgtttgctctcaatgc

SEQ ID NO: 211015 - DNA, 3302 bp, Zea Mays
atcccttcgccttcgtcagttcctacctgcccccagccttctctcccacctccaatggcgctgctcttgccacctcccgccctctccacgacgcctccatttctctccgctccccgaccagcacggctaccctgtctcagatgcactagaactaccaccgccacctcaagcgtctccacctgtcctcccgcatcgacgtcttctccctcgacctcctcgccggtggcgtcggacggcgcagttggaaggaagagcaagaataagagcaggcccctcaagccgagttttgaggaacaggccctccgccgctggtccgcccgggcaccttcccagcgtgcctcggtcccctgggaacaacctcagcagcagtcgcctttgccgccttcgctgccgcaccgggctggccgaggaagtggtgatgcgggcgatcaaaaacgcagtggtggaggctcaagcgcaacgttgcgctccatcgtggactactttgctggcggctcctccgatgacgaaggagttcgagtagaggaaggggcgtgcgacaccaccgcagtaccggaccaagcggcacgggagcaggacgatggatcgcattttcggccgagctatctgcttgggagccacccattctctgcgccatggattcacagggaggaatcgaccaatgataggggggtttccggtccggtggccgaagaggaggaaaggttggacattcgtgatgcttctgatgatgaactgggcttggtggatgaggataaggaagagacggataatggtgaggagcttcttactgggggtttagaagatgaattttatgatgattatgccacaccaactatgaattcttcatatggagtggatttgtcagtggacaaagatgcttatggtagcaggttcgataggagtatgatgcagagcagtgtaaacaccatagttaaaacattgaggaattcgatggaggaaagtgacccgaatgccacggttgagttgtctaatgcagaagattttgtccagaaattgggccctgcactcctgccatgggaaagggaggaggaagatgatgaggcattcagcggtggcagggcggtgaggcgcagcaacacggagctggccgagaggtctattccagagcctgaactgcggaggcttagggacacggcgttgaggatgaaggagaggataaaggttgggccagggggtgttactcaagacatagtggagagcatccacaggaaatggaaggtggatgaggtggtcaagatgaggtttgaaggccctccaagcctgaacatgaagagaactcatgatttactagaggacaggactgggggagttgttatatggaggtcagggagatcagttgtgttgtataggggaatgaattacaactttcaatgtgtgcagtcatatgctaaatttatagaaattgattcgggtaagggagttagcgatgctaatagtgctgtattgagccatgatggtcacaacttacaggcctcaagagcagatggcatgaagagtttaacgtctactggcaatttttctctggagtcctctgaaacatttgatattgataacttcttggatcaattgggaccacggtacaaggattggtctggtcgtggccctatccctgttgatgccgacttgcttcctggtgtagtacatggctacaaaccaccatttagagtacttccctacaagattaaaagcactcttagagataaggaaatgacaactctgcgtagacttgcaaggcaaactgctcctcatttcgctctagggagaaacagagaacaccaaggcttagctgctgctatggttaaattatgggagaaaagtgctattgcaaagattgccatcaagagagggattccaaacacatgcaatgacagaatggcagaagaaatcaagaaattgacaggaggagtgctcttgtcaaggaacaaggagttcattgtcttctacaggggcaatgatttcatagctcctaaagtaaggcaggtcttggtggagaagcaagaacaagccattactcaacaggatgaggaagagctggctcggcttaaagcatcagcctcaattattactatccccaaggatataaagggtcctctagttgctggtactctggcagaaactacagaagcaaaatctagatggggaaagtcagttaatgataagcagagggaagaggagatgaagcatttgtctttgttgaagcatacctctcttttgaagaacttgaagagaaaactgattttggcaaaaacaaaagttgcaaaagcagagaaggctctagctaaagtccaggaatttctcactccagcagagcttccaactgatctggaaacagttacagatgaggaacgcttcttatttcgcagaatcggcctgaaaatgagggcctttttgatgcttggcagacgagaagtttttgatggaactgtacaaaacatgcatttgcattggaagcatcgagagttggttaaaattgttgtcaggggaaagagctttgcacaagcgaaacatattgcaatctctctagaagctgagagtgaaggtgttctcatttcacttgacaagacaactaaaggatatgtaatcattttctaccggggtaaaaactacaggcgaccccaaatcatgaagcctaggaatctactaacaaggaggcaagcattggcacgctctatagagttgcaaaggcgggaggccttaaagcatcacatctcaagtctgcaaggcaagatctcgaagttgcagtcgcaacttgtacaaacaaaggttgcaagtgagaaacatgatctgaagctgcttcaaacagttgaggatgacttctcatcatcagatgatgatgtagaggatgatggggaagaagcttatttgcagacttacagcagcgctgatgaagaagatgccgaggatgatgctaatgaatatatttaggccatgtttggatcctcctagctaattgtttgctaatagctaattgtttgccaatagctaacaattagtcggcaaataattagctagcaacaattagctagtgtatgcttggagtcttggctaacagatttctttttctctttatatgatctattagcatttattagtaaggttaaatggctaacgagcaaacagtttgccagtcctccggctcaagggcggattcaaggggtgagcaaggtggactatggccccacctaatttttttgaccccttatacctaggtttagatacacaccaaaataaacaaactttttgtatagttagcgtggacaaatctaatgaaaactagg

SEQ ID NO: 211016 - DNA, 3285 bp, Zea Mays
cgccttcgtcagttcctacctgcccccagccttctctcccacctccaatggcgctgctcttgccacctcccgccctctccacgacgcctccatttctctccgctccccgaccagcacggctaccctgtctcagatgcactagaactaccaccgccacctcaagcgtctccacctgtcctcccgcatcgacgtcttctccctcgacctcctcgccggtggcgtcggacggcgcagttggaaggaagagcaagaataagagcaggcccctcaagccgagttttgaggaacaggccctccgccgctggtccgcccgggcaccttcccagcgtgcctcggtcccctgggaacaacctcagcagcagtcgcctttgccgccttcgctgccgcaccgggctggccgaggaagtggtgatgcgggcgatcaaaaacgcagtggtggaggctcaagcgcaacgttgcgctccatcgtggactactttgctggcggctcctccgatgacgaaggagttcgagtagaggaaggggcgtgcgacaccaccgcagtaccggaccaagcggcacgggagcaggacgatggatcgcattttcggccgagctatctgcttgggagccacccattctctgcgccatggattcacagggaggaatcgaccaatgataggggggtttccggtccggtggccgaagaggaggaaaggttggacattcgtgatgcttctgatgatgaactgggcttggtggatgaggataaggaagagacggataatggtgaggagcttcttactgggggtttagaagatgaattttatgatgattatgccacaccaactatgaattcttcatatggagtggatttgtcagtggacaaagatgcttatggtagcaggttcgataggagtatgatgcagagcagtgtaaacaccatagttaaaacattgaggaattcgatggaggaaagtgacccgaatgccacggttgagttgtctaatgcagaagattttgtccagaaattgggccctgcactcctgccatgggaaagggaggaggaagatgatgaggcattcagcggtggcagggcggtgaggcgcagcaacacggagctggccgagaggtctattccagagcctgaactgcggaggcttagggacacggcgttgaggatgaaggagaggataaaggttgggccagggggtgttactcaagacatagtggagagcatccacaggaaatggaaggtggatgaggtggtcaagatgaggtttgaaggccctccaagcctgaacatgaagagaactcatgatttactagaggacaggactgggggagttgttatatggaggtcagggagatcagttgtgttgtataggggaatgaattacaactttcaatgtgtgcagtcatatgctaaatttatagaaattgattcgggtaagggagttagcgatgctaatagtgctgtattgagccatgatggtcacaacttacaggcctcaagagcagatggcatgaagagtttaacgtctactggcaatttttctctggagtcctctgaaacatttgatattgataacttcttggatcaattgggaccacggtacaaggattggtctggtcgtggccctatccctgttgatgccgacttgcttcctggtgtagtacatggctacaaaccaccatttagagtacttccctacaagattaaaagcactcttagagataaggaaatgacaactctgcgtagacttgcaaggcaaactgctcctcatttcgctctagggagaaacagagaacaccaaggcttagctgctgctatggttaaattatgggagaaaagtgctattgcaaagattgccatcaagagagggattccaaacacatgcaatgacagaatggcagaagaaatcaaggaggagtgctcttgtcaaggaacaaggagttcattgtcttctacaggggcaatgatttcatagctcctaaagtaaggcaggtcttggtggagaagcaagaacaagccattactcaacaggatgaggaagagctggctcggcttaaagcatcagcctcaattattactatccccaaggatataaagggtcctctagttgctggtactctggcagaaactacagaagcaaaatctagatggggaaagtcagttaatgataagcagagggaagaggagatgaagcatttgtctttgttgaagcatacctctcttttgaagaacttgaagagaaaactgattttggcaaaaacaaaagttgcaaaagcagagaaggctctagctaaagtccaggaatttctcactccagcagagcttccaactgatctggaaacagttacagatgaggaacgcttcttatttcgcagaatcggcctgaaaatgagggcctttttgatgcttggcagacgagaagtttttgatggaactgtacaaaacatgcatttgcattggaagcatcgagagttggttaaaattgttgtcaggggaaagagctttgcacaagcgaaacatattgcaatctctctagaagctgagagtgaaggtgttctcatttcacttgacaagacaactaaaggatatgtaatcattttctaccggggtaaaaactacaggcgaccccaaatcatgaagcctaggaatctactaacaaggaggcaagcattggcacgctctatagagttgcaaaggcgggaggccttaaagcatcacatctcaagtctgcaaggcaagatctcgaagttgcagtcgcaacttgtacaaacaaaggttgcaagtgagaaacatgatctgaagctgcttcaaacagttgaggatgacttctcatcatcagatgatgatgtagaggatgatggggaagaagcttatttgcagacttacagcagcgctgatgaagaagatgccgaggatgatgctaatgaatatatttaggccatgtttggatcctcctagctaattgtttgctaatagctaattgtttgccaatagctaacaattagtcggcaaataattagctagcaacaattagctagtgtatgcttggagtcttggctaacagatttctttttctctttatatgatctattagcatttattagtaaggttaaatggctaacgagcaaacagtttgccagtcctccggctcaagggcggattcaaggggtgagcaaggtggactatggccccacctaatttttttgaccccttatacctaggtttagatacacaccaaaataaacaaactttttgtatagttagcgtggacaaatctaatgaaaactagg

SEQ ID NO: 211017 - DNA, 3278 bp, Zea Mays
gtcagttcctacctgcccccagccttctctcccacctccaatggcgctgctcttgccacctcccgccctctccacgacgcctccatttctctccgctccccgaccagcacggctaccctgtctcagatgcactagaactaccaccgccacctcaagcgtctccacctgtcctcccgcatcgacgtcttctccctcgacctcctcgccggtggcgtcggacggcgcagttggaaggaagagcaagaataagagcaggcccctcaagccgagttttgaggaacaggccctccgccgctggtccgcccgggcaccttcccagcgtgcctcggtcccctgggaacaacctcagcagcagtcgcctttgccgccttcgctgccgcaccgggctggccgaggaagtggtgatgcgggcgatcaaaaacgcagtggtggaggctcaagcgcaacgttgcgctccatcgtggactactttgctggcggctcctccgatgacgaaggagttcgagtagaggaaggggcgtgcgacaccaccgcagtaccggaccaagcggcacgggagcaggacgatggatcgcattttcggccgagctatctgcttgggagccacccattctctgcgccatggattcacagggaggaatcgaccaatgataggggggtttccggtccggtggccgaagaggaggaaaggttggacattcgtgatgcttctgatgatgaactgggcttggtggatgaggataaggaagagacggataatggtgaggagcttcttactgggggtttagaagatgaattttatgatgattatgccacaccaactatgaattcttcatatggagtggatttgtcagtggacaaagatgcttatggtagcaggttcgataggagtatgatgcagagcagtgtaaacaccatagttaaaacattgaggaattcgatggaggaaagtgacccgaatgccacggttgagttgtctaatgcagaagattttgtccagaaattgggccctgcactcctgccatgggaaagggaggaggaagatgatgaggcattcagcggtggcagggcggtgaggcgcagcaacacggagctggccgagaggtctattccagagcctgaactgcggaggcttagggacacggcgttgaggatgaaggagaggataaaggttgggccagggggtgttactcaagacatagtggagagcatccacaggaaatggaaggtggatgaggtggtcaagatgaggtttgaaggccctccaagcctgaacatgaagagaactcatgatttactagaggacaggactgggggagttgttatatggaggtcagggagatcagttgtgttgtataggggaatgaattacaactttcaatgtgtgcagtcatatgctaaatttatagaaattgattcgggtaagggagttagcgatgctaatagtgctgtattgagccatgatggtcacaacttacaggcctcaagagcagatggcatgaagagtttaacgtctactggcaatttttctctggagtcctctgaaacatttgatattgataacttcttggatcaattgggaccacggtacaaggattggtctggtcgtggccctatccctgttgatgccgacttgcttcctggtgtagtacatggctacaaaccaccatttagagtacttccctacaagattaaaagcactcttagagataaggaaatgacaactctgcgtagacttgcaaggcaaactgctcctcatttcgctctagagaacaccaaggcttagctgctgctatggttaaattatgggagaaaagtgctattgcaaagattgccatcaagagagggattccaaacacatgcaatgacagaatggcagaagaaatcaagaaattgacaggaggagtgctcttgtcaaggaacaaggagttcattgtcttctacaggggcaatgatttcatagctcctaaagtaaggcaggtcttggtggagaagcaagaacaagccattactcaacaggatgaggaagagctggctcggcttaaagcatcagcctcaattattactatccccaaggatataaagggtcctctagttgctggtactctggcagaaactacagaagcaaaatctagatggggaaagtcagttaatgataagcagagggaagaggagatgaagcatttgtctttgttgaagcatacctctcttttgaagaacttgaagagaaaactgattttggcaaaaacaaaagttgcaaaagcagagaaggctctagctaaagtccaggaatttctcactccagcagagcttccaactgatctggaaacagttacagatgaggaacgcttcttatttcgcagaatcggcctgaaaatgagggcctttttgatgcttggcagacgagaagtttttgatggaactgtacaaaacatgcatttgcattggaagcatcgagagttggttaaaattgttgtcaggggaaagagctttgcacaagcgaaacatattgcaatctctctagaagctgagagtgaaggtgttctcatttcacttgacaagacaactaaaggatatgtaatcattttctaccggggtaaaaactacaggcgaccccaaatcatgaagcctaggaatctactaacaaggaggcaagcattggcacgctctatagagttgcaaaggcgggaggccttaaagcatcacatctcaagtctgcaaggcaagatctcgaagttgcagtcgcaacttgtacaaacaaaggttgcaagtgagaaacatgatctgaagctgcttcaaacagttgaggatgacttctcatcatcagatgatgatgtagaggatgatggggaagaagcttatttgcagacttacagcagcgctgatgaagaagatgccgaggatgatgctaatgaatatatttaggccatgtttggatcctcctagctaattgtttgctaatagctaattgtttgccaatagctaacaattagtcggcaaataattagctagcaacaattagctagtgtatgcttggagtcttggctaacagatttctttttctctttatatgatctattagcatttattagtaaggttaaatggctaacgagcaaacagtttgccagtcctccggctcaagggcggattcaaggggtgagcaaggtggactatggccccacctaatttttttgaccccttatacctaggtttagatacacaccaaaataaacaaactttttgtatagttagcgtggacaaatctaatgaaaactagg

SEQ ID NO: 211018 - DNA, 1247 bp, Zea Mays
cccacccatcatccacatcctccagagaaaccggcgagcggggcttcctggaagctgccgttgacccccgacccggaggcataactagggtgtagggggggcggcctgtagtgtagcgcccctcgactcccgagcagcaaccaaccagcaaccgagccagccatgtcgcccacccctgcaccggccgcccgcgccggcgaggagctgccgtccactgaggtggtggtggtccggcacggcgagaccgcgtggaacgcctcccgcgtcgtccagggccaaatggacccggagctgaacgaggccggcaggcggcaagccgtcgtggtaacgtctgttcgctcggctcaaccccacccacccattgcacccaccatctacccttattttcttcttctccctggcccaaaacaaaacctgacgacgaagctgctttaattttgtaacgagtgacgaaggtggcccgccggctgtcgagagaagccaagcccgccgccgtgtactcgtctgatctgcggcgagccgccgagaccgccgagaccatcgcgagggcctgtggcgtatcaaacgtggtgctgacggaggcgctccgcgagaggcacatggggtacctgcagggcctcaggtgggacgccgcggtggacaagagcccggactccttgcacatcgtcaaggtcatcgagggctctgaccccgacagcagaaaccaggagctgcccggcggtggagagagcctgaaccagctgaacgagcgttgcgtctgcttcctgaacaagatcgcgcaagaacacgccggtacgcgaattaaatcagccgctccctcgttacagccagcagcactgttgaaactttttcccccccacctgtaatgttagacattagccaaaaacataaagttatttcccgtctgcatatatacttgtgtacatagctgctgaccccataccgagcttctgaccgtgttagcatctagcgcaagaggcatcccgcatgacaatagaactgttttacggatcatcaccaccactagaagtcggagcggcgtgtcccaaccccaaaaatattctgttttcatctagtataaaacctgtctactggacgcaagagggacctggcaaaattacttgaatgcaatcctgatgttttcttcaccgtcggcagcttgaacctttaccgctgatgtcagcattgcgcagcgcaatatttgatatgtctacatatgctgtgcggtggaattgttcagatgtgcg

SEQ ID NO: 211019 - DNA, 1209 bp, Zea Mays
cccacccatcatccacatcctccagagaaaccggcgagcggggcttcctggaagctgccgttgacccccgacccggaggcataactagggtgtagggggggcggcctgtagtgtagcgcccctcgactcccgagcagcaaccaaccagcaaccgagccagccatgtcgcccacccctgcaccggccgcccgcgccggcgaggagctgccgtccactgaggtggtggtggtccggcacggcgagaccgcgtggaacgcctcccgcgtcgtccaggtggtgctgacggaggcgctccgcgagaggcacatggggtacctgcagggcctcaggtgggacgccgcggtggacaagagcccggactccttgcacatcgtcaaggtcatcgagggctctgaccccgacagcagaaaccaggagctgcccggcggtggagagagcctgaaccagctgaacgagcgttgcgtctgcttcctgaacaagatcgcgcaagaacacgccggggagcgggtggtggtggtctcccacggcgcagcgatactggagctctgccggcacaccgacccgccgggcagctgcgtccgcaggcacgtccccaacacctcgctcagcgtcttccgcgtctccgccgccaccgggcagtgggcgctcgagaggtgcggggacgtcggccatctcaagggagacggagacggagacagcttcctggagggctcgttcgggggcgacggggcctcggcgtaaacgtacgtacaggccgatcagccgagagctcgcaccagtcttcctttggatcgaaccattctttggttccgatgctgtttggagcttgtattccattgtttttcaaaaagagaaccaaccattggagtttgaaacgttgatcaatttgtggtttacagccttttgctgtagcgccatgcatggcgtttgacaaaactgcggtatctctgagaaaactgtcttcaaacagcgtgatgcatagctctatcaatctgtcattgcctactgtttgcccctatgttcttaagtcaagactccagagcaaccgctgctcccttgctcgcacgattgaagaatgaaaattaaacattgagggcaagtggattttatctctcctgccccctttagcattcttgctcccaaacaagccataaaattggatgggtcacactagtgatgacaacggtaccattccatatccgtacccat

SEQ ID NO: 211020 - DNA, 2137 bp, Zea Mays
tttcattactacgatgtgaaatctccttgcaagcgctttcagttgcgttctcgcttctcttctcgtggatccccaaatcctctccggccaccggcatcgctcctctcccgcccgccgacgccgaccgctcctatccacgccaccgcgtcggtgctcgagttgcctcagagagggagagagagagagagagagggagggagggagggagggagggaacggcgctcacgctgttccgattcgaacgagctcgcccggcgatttttttttttcctggaacgggctggctccgaatctcggcgaagtgtggggagcggctccaccctccaaccaagcaccgcaggatcaaccagaaggcgggcgcgcgggcggcaggcggcggtgctgagaacacgggtggcactgtctggacggacgctgcggatctcggcgattcttcgcggcctgcgtcaagggcggatcggcagcgatgagcggcggcggcggcgggagccccaataacacggagtggcgcttcaaccagaccctccgcaacgtgcaaggaatgcttaaaggacgcagctttcctgggaaggttttgctaacccggcgatccgagcctctctcccctcctgattattctccaagctttgagagcgagcacgatgaagatgagcgcaaggagggttctcgtcaggagggagaaggtcaagcatctggaaactcatttgacaatgcaagttcaaagaaatcaaatattctgtcaacaagtagttcaaattcattgccagatgctcaggggctagtttctggggctagagctactgattctgcaagaattgctaaattcacaacggaactatctaggccagctgttatattagacaaattgcgtgaactatcttggagtggtgtgcctccatatatgcgacctaatgtatggcggcttcttttgggatatgcaccgcctaataaagatagacgagaaggtgttctaacaaggaaaaggctggagtacgtggaatgtgtttctcaatactatgatattccagatagtgaacgctcagatgaagaaattaccatgcttcgccagattgcagttgattgcccaagaaccgtacctgatgttacattttttcagaatcatcagattcagaaatctcttgaacgcattttgtatacatgggctattcgtcacccagcaagtggctacgtccaaggaataaatgaccttgttacgcctttcttggttgtcttcttatcagagcacctagatggcaacatggatacttggtctgtggacaatctttcagcgcaggccatttccaacatagaagcagactgttattggtgtctctcgaagttccttgatggaatgcaggatcattacacctttgcgcaaccaggaattcagcgcctcgtttttcgattgaaggaactagttcgtcgtatagacgaacctgtttccaagcacattgaagagcaaggattagagtttcttcagtttgccttccgctggttcaactgccttctgatacgagaggtacctttccatctcgtaacgcgcctgtgggatacataccttgccgaaggcgactatctgccagattttctcgtgtacatatcggctagttttttgctgacgcacctccccacgaggacctgggcgcaccacgagctggagatggtcctctcgagggcatacatgtggcacacgatgttcaaaagctctcccagccacctcgccggctaggacccacccaagtccaccatgcctgtaagcggcagtcagttccttctgttttttttttgttaagcgcgtgcatactatactatcggtcgcgtcgcaccgatttgtatattttccgtttcctaccgaggaatgcttatctataatgaacaccagaggacaagtattagtgctcaatttgatattcagaccggtagttgtattgtattgtttgccgcgctcttggtggcgcaaggccttttttttttccccaacaccatgagatgctcgttccctgttttgtgaaacgcagagaagcgctgtggcttgtgaaaattgtgatggtccatactgtcctttttgttttcgtttgatgcattgtatagtatagcatgtgatactgatgctgagtggtggtagcactagcacata

SEQ ID NO: 211021 - DNA, 1049 bp, Zea Mays
tggagttagatgttgcttcatataccagcttccattgcttgtgtttgcttgctgactacctatgggtaattgctaaatacatggagctacatattatctgatataccagctgccatcacttggggtttgcttgttgactacctataatggatcagtggttagcagcttctgctggtttatccaaggttttcagttagtacatgaccatcgtatttgtgcttattatgctggaaggcgcaatcactatggatgtatttttgaatagcaactgggaagaggatttccccgctgacccatcaggcaagtttgaggatttcaagcacttcgtgagatcaaatttcgagatatgtgaatgggtaggcctctcagtggtggctgctcaggtgttatcgatcattcttgggatggtactcaggacccttgggcctgaccgtgagaccgactatgacagtgatgatgacgtgaccgtgcctgcaaggctgcctcttttgataaatcagtcccagcatggttcatactatgctgaacctaacacgtctggaaggagtgattcatggaaactgcggattttagacaaggtcaacaactaagatcttaaggatctcatacaacagaccctccagtaaagactctctctccaaggggttcgggagaatgataagagtatacctttttcttcatctcatggagagatgattagcagcagcagtagaatagtttacacacatttgaatgcaatccaacatgcacaagtatttgagtagcatgtgacttgacccccccccccccctcctacaaaacctacacaatgtaggggaaggatgtttattgtaccaaaatgtttcagaaaagagataaagggcatgaacggtggtggtgccttcactgaccaaagacagaaatatttgttctcccccccccccctgcctatcagctcagctgcatcatgcatgtgtttttgatctgcttgtcgggccggcaggtttcctatttgcaccaactgtcaatgccaaagggtgaaaaaaaatgaaatgaaaatgtcttgaaat

SEQ ID NO: 211022 - DNA, 1424 bp, Zea Mays
aacgaaacacgacaacccatgattgaggcgtgcgcgggacgtgacggcgaggcggcgactagtattaacctaccacaacaccaagtccccccccacctccgcattgtctccgccgcgatttgtcaacgtgacgtcacgccgcgcctccgagagggagccagtgtggtggaggacacgaggctgccggagccgcaggtgttgctccggtcagcatcggcatggcggggcggatggtgcggagctgcgtgcagacggcgctcaaggcggccaactccgtcgtggggctcgccggcatggccgtcatcctctacgcgctctggatgctccgcgcttggtacagggaggtcgccgacctccaacaacacctcccggtcccctggtgcatctacacatttcttggactggggatctttctgtgcctactgacttgctctgggcatattgctgccgaaactgcaaacggtcactgcctctcttgttggttagcagcttctgctggtttatccaaggttttcagttagtgcgacctgacgttgatattgcgtctctttttccttaacctgacaacgtagtacatgaccatcgtatttgtgcttattatgctggaaggcgcaatcactatggatgtatttttgaatagcaactgggaagaggatttccccgctgacccatcaggcaagtttgaggatttcaagcacttcgtgagatcaaatttcgagatatgtgaatgggtaggcctctcagtggtggctgctcaggtgttatcgatcattcttgggatggtactcaggacccttgggcctgaccgtgagaccgactatgacagtgatgatgacgtgaccgtgcctgcaaggctgcctcttttgataaatcagtcccagcatggttcatactatgctgaacctaacacgtctggaaggagtgattcatggaaactgcggattttagacaaggtcaacaactaagatcttaaggatctcatacaacagaccctccagtaaagactctctctccaaggggttcgggagaatgataagagtatacctttttcttcatctcatggagagatgattagcagcagcagtagaatagtttacacacatttgaatgcaatccaacatgcacaagtatttgagtagcatgtgacttgacccccccccccccctcctacaaaacctacacaatgtaggggaaggatgtttattgtaccaaaatgtttcagaaaagagataaagggcatgaacggtggtggtgccttcactgaccaaagacagaaatatttgttctcccccccccccctgcctatcagctcagctgcatcatgcatgtgtttttgatctgcttgtcgggccggcaggtttcctatttgcaccaactgtcaatgccaaagggtgaaaaaaaatgaaatgaaaatgtcttgaaat

SEQ ID NO: 211023 - DNA, 1756 bp, Zea Mays
ggtgaacgttacttataaaaaagaaaatttggtggtgaaattgacagaaaatgacaacttaaattatcttgaatgtatcattttattgtaagtcttcgtattgatatctacatgaagcaactcactacaatttaacgtttaattgcaggcgatgtttttatcccctgatgagtccaaggtttcaggccttgtgaatacccttaaagagaaaaaaatcgggattgttgcacacttttatatggatcctgaggtgcaaggcatactgactgctgcaaagaagcagtggccccacatccaaatatctgattccttgattatggcagatagcgctgttaaaatggctgaagcaggatgtgactatattacagttttaggtgttgacttcatgtcagaaaatgttcgggcagtacttgatcaagcaggatttaataaggttgtcgtttatagaatgtccagtgaaccgattggttgttcattagcagatgctgcttcaagttgtgaatatactcattttttgagggaagcttcgagatgttatccatctttgcatgttatttacattaatacttcgctggaaacaaaagctcatgctcatgaacttgttcctacaataacttgcacctcttctaatgttgttccaactatactacaggcattttcccaaataccaaatgttaatgtctggtatggtcctgattcatatatgggtgcaaacatagcagatttatttcagagaatggctacaatgtcagatgaagaaattgcaaaaattcatccagaccacaacagaaaatctttgagttcattactgccacgtctacactattatcagagtggtaactgtatggtacatgacatgtttggccatgaggttgtggagaaaataaaggaacaatattgtgatgcatttctaacagcacactttgaggtccctggagaaatgttctctttggcaatggaagcaaaacaaagaggaatgggagttgttggatccactcagaatatcttggatttcattaaggatcatgtgatgggagctctggacaaaaatgtagatgaacaccttcagtttgtgttaggaacagaatcagggatgatcacttcaattgttgctgctgttcaggaattacttcatttttattcttctcaagagagagcaaacatcaaagtagaaattgtgtttccggtatcttcggatgcaatttctaagacatcgaatggttctcatcatgttggttcttcaatggctactgatttggataatcttactattgttcctggtgtgagttctggcgaaggctgctccattcatggtggttgtgcctcgtgtccctacatgaaggacacctctcggaaaatcagttgcagaggttgggtgtgagcctattctgcatatgcggcatttccagaaaacaaggaggttacccaacaagcttgttcaccaggttgtccatggtaatggtgacaaacccttgcaatagctgttcatcaatacttgtatttattttatcaaggcggctggatgatggagtatatctcaagtgaatgccatgtttagctggcataccgaagaaatctccgggacaagattatttgccctgtacggtagacatctggacttgccctgtacgttagacatgttgacatctgcatgcgaattaatgttgaacaaatggggttggtctaattgtaaaaaataattattctgaataaatcttaattgctttgagcgaaactgataaatcttaaactgaat

SEQ ID NO: 211024 - DNA, 1530 bp, Zea Mays
tatcctggagtggcagttgggatgaatactggaacgatcctagtctgatccaatttatctgttgtgctaccatgttgtcgtttatagaatgtccagtgaaccgattggttgttcattagcagatgctgcttcaagttgtgaatatactcattttttgagggaagcttcgagatgttatccatctttgcatgttatttacattaatacttcgctggaaacaaaagctcatgctcatgaacttgttcctacaataacttgcacctcttctaatgttgttccaactatactacaggcattttcccaaataccaaatgttaatgtctggtatggtcctgattcatatatgggtgcaaacatagcagatttatttcagagaatggctacaatgtcagatgaagaaattgcaaaaattcatccagaccacaacagaaaatctttgagttcattactgccacgtctacactattatcagagtggtaactgtatggtacatgacatgtttggccatgaggttgtggagaaaataaaggaacaatattgtgatgcatttctaacagcacactttgaggtccctggagaaatgttctctttggcaatggaagcaaaacaaagaggaatgggagttgttggatccactcagaatatcttggatttcattaaggatcatgtgatgggagctctggacaaaaatgtagatgaacaccttcagtttgtgttaggaacagaatcagggatgatcacttcaattgttgctgctgttcaggaattacttcatttttattcttctcaagagagagcaaacatcaaagtagaaattgtgtttccggtatcttcggatgcaatttctaagacatcgaatggttctcatcatgttggttcttcaatggctactgatttggataatcttactattgttcctggtgtgagttctggcgaaggctgctccattcatggtggttgtgcctcgtgtccctacatgaagatgaataccctggggtcgctaattaaaatttgccatcagcttcctgataaaaacaacaaattatctgtataccaagctaacagaattaatgtcaggacacctctcggaaaatcagttgcagaggttgggtgtgagcctattctgcatatgcggcatttccagaaaacaaggaggttacccaacaagcttgttcaccaggttgtccatggtaatggtgacaaacccttgcaatagctgttcatcaatacttgtatttattttatcaaggcggctggatgatggagtatatctcaagtgaatgccatgtttagctggcataccgaagaaatctccgggacaagattatttgccctgtacggtagacatctggacttgccctgttgcgcttggtgcaacccatgctcaggcgatgaaggagttgctgatgtcgatccccaagagattcaagacttcatcgagtttgaagattaagctagtgacctcccctagtaagctgctcgtggagggtttatttgcgttggctacgtttctactatatgtactttgat

SEQ ID NO: 211025 - DNA, 1457 bp, Zea Mays
cgttcccatcctcctttcccgaacaaccggagcgcggcgcgagacaggcctctactccccgtctcccccgctccagctgacctcgcccactaggggtacatttagccaccgtcattctgtcctccatgaccaagaaactggagagcagtactgcccactggatcatcttgttatgaaccaagatgaggagctttttactgtgagcaacagttccctgtcagaatttgctgttttgggctttgaattgggttactctatggagaacccaaactcattggtcatatgggaagctcagtttggtgatttttccaatggagctcaagtgatatttgatcagttcctgagtagcggggagtcaaaatggctccgccagactggccttgtggtttgtcttcctcatggatatgatggccaggggcctgaacattctagtgcaagattggagcgctttcttcagatgagtgatgacaacccttatgttatacctgagatggatccaacactgcggaagcaaatccagcagtgcaattggcaagtcgttaatgtaacaactcctgcaaattatttccatgttctgcgtcgccagatacaccgggactttaggaaacctttgattgtgatgtccccaaagaacctccttcgccacaaggactgcaagtcgaacttatctgaatttgatgatcttgcgggccaccctggattcgacaagcaagggacacgcttcaagcggctcattaaagaccagaataatcacaaggacctcgaggagggaattaaccgtctagttctttgctctggaaaggtgtactacgaactggatgaagaaagaaggaagacggagcgcactgatgttgctatatgtagagttgagcagctctgcccattcccctatgacctcatccagcgcgagttgaagagatatccaaatgctgagatcgtgtggtgccaggaggagccgatgaacatgggagcgtacagctacatcaacccccggctgctgacggcaatgaaggctctgggccgtggtggcatcgaggacatcaagtacgtcggcagggccccgtcggctgctactgctacgggcttctactcggtgcacgtgcaggagcagacggagctggtgcaaaaggccctgcagcgcgaccccatcaactacccgttctgaaagaaacgagacccctgtaaattcttggaaaattgggcaccttttgattttgatatacctctatagagagagcaggccttaaggtatgcctgtgctgctgtgcagccatttgttgaaataatcgtttcggactctacagtaccgcattatatagtttataattccatgataaatattgtataagtaattattgattaattaatattatttacttcctccgtccacaaatgtttatcgttatgatattcgtgctagaagtttaactgaatttatagaatatataagtgatatt

SEQ ID NO: 211026 - DNA, 4364 bp, Zea Mays
ctgccccggcacacgtcgtctctgccactcaccgcgagtccgcaaccaaacaataagaagcagccttccttgctctgcgtcagtgcatctccttcccctcccctccttcccctcccctcctctcgtctggggactgggcgtctggctggcacgcagccaagccacacactccctcgtcagcctctgcatgccacgccgcccctgatcaccagaacccgcccggccgccgcatggccctcgcgtcgcagccgccttggtggctcaccacggaggcttgcgacctcccatccgcgcccgccgcggggctcggggaatgggtcgccttcctcttcctctccacgtgctcgcagcagatgctcctctccgccgcgtccgccgtcttcctcgtcgcgctgctctgcctcggcgccgccaagctcatctccacacggcgacgacgccatggcggcggcgccctcaacggcgacaagcagccgctgctggacagggccggggggcgggccggggttcgggtcggcgccgggttcgtcgtcgcgctggcggcgtccggtgtcctcgccgcgttctacgcctcgctgctcgtcctttccctggtcaacagaggcggcggagagggcgaggccctggaggcggtgttcctggcgctgcagtgcgcggcgcacctggccgccgcggccgtcgtcgcgcacgagaagcggttccgcgcggcggcgcacccgctggccctgcgcctgtactggctggcggcgcccgcgctgacggcgctcctcgccggcacctccgtcgcgcgcctcgtggtggccgccgctaggctcccggacgacgcgctcgcgatcgcggcgctggtcctgtcccttcccctcccggtcctctccatcctcgggtcgacgggcatatccgtggcggtggtcaacgacgccaccggggcggcggaggaggagacggcaagcaacaaggcgacggagaaaaacgtgaccccctacgcgacggcgtcgtgggcttcgcgcgcgacgtgggcttggatgaacccgctggtgcagcgcgggcaccgcgcggcgctggagctgtcggacgtgccgacgctggcaccgtcccaccgcccagagcgcatgcacgagctcttcaccctgcactggccgtcggcgtgggcgtccaaggacaacaacccggtccggcacacgctgttccggaccttctgggcgcagttcctgctgaacgcgttgctggcgctgctccggctgaccgtcatgtacgtcggcccgacgctcatccagagcttcgtggacttcacgtccgccggcgggcagcggccgttcggggagggcgcgcggctggtggcgacgctgctggcggccaagtgcgcggaggcgctgtgcagccaccagtacaacttccactgccagaagctggggatgcagatccggggcgccctcatcgtggcgctgtaccgcaagggcctccggctctcgtgctcagcgcgccagaagcacgggctcggcatgatcgtcaactacatggccgtcgacgcgcagcagctctccgacatgatgctgcagatccactacctctggctcatgccgctccaggtaaaggtttgcggcagcacggcatacgtggcgcagacggcatggatccagaacggcaccattgaggaaaacatcctgttcgggaagcccatgcaccgggagaggtacaaggaggtgatcagggtgtgctgcctggagaaggacctggagatgatggaattcggggaccaaacggagatcggggagcgcggcatcaaccttagtggcgggcagaagcagcgcatccagctcgcccgcgccgtctaccaggacttcaacatctacctcctcgacgatgtattcagcgcggtcgatgcgcatacgggcactgagatcttcaaggaatgtgttagaggtgcactcaagaacaagaccatagtactcgtgacacatcaagttgatttcttgcacaatgctgatatcatatatgtgatgaaggacggaatgatcgtgcaatccggcaagtacgatgagctcctccaggcaggcaccgacttcgcggcactggtcgcagcgcacgacagctcaatggagctcgtggagagcgcggcgccggcgagcgagcgcgagctgcccctctcccggcagccgtcaagcaagaacgcggcgtccaacggcgactcgtcctcgtcctccatcgtggcgcccaaggccgagaaggcgtcggcgcggctgatcaaggacgaagagcgcgcgagcgggcacgtcagcttcaccgtgtacaagcagtacatgacggaggcctgggggtggtgggggccgcttgtggtggtggctgtctccgtggtgtggcagtgctctctcatggccagcgactactggcttgccgaccagacctccgacgggaacgaaacctcgttccagccgtcgctgttcatcaacgtgtacgccatcatcgctgccgtctcggtggtgctcgtcgcggctcgctctttcattgtggcgttcattggcctccagacggcggaccggttcttcaagcagatcctcaacagcatcctgcacgcgcccatgtccttcttcgacaccacgccgtccggcaggatcctcagcagggcgtcgtcagatcagacgaacgtcgatctcttcctgccgttcttcgtctggatgagcgtatccatgtacatcaccgtgatcagtgtgctgatcgtcacgtgtcaggtggcgtggccgtccgtcattgccataatccctctggtgatactgaacatctggtaccggggctattacttgtcgacatcgagggagctgactcgcctcgagtcgattaccaaggctccagtgatccaccacttctccgagacggttcaaggtgtcatgaccatcaggtgcttcaggaaggaggaaaacttcttgcaggagaacctgaaccgggtgaactcaagcctgaggatggacttccacaacaatggtgccaacgagtggctcggtttccggctcgagctgattggaagctttgttctctgcttcacagccgtgctcatggtcacattgccgagcaacttcgtgaagccagagtatgttggtctgtcactatcatatggtctatctctcaaccaggtgttgttctgggccatctggatcagttgcttcattgaaaataaaatggtctcagttgagaggataaaacaattcacaaatattccttcagaggccacatggaggatcaaggactgcctaccagattctaattggccaacaaaaggcgacatcaatgtcattgatcttaagtttaggtataggcacaacactcctctagtgttgaagggcatcacaataagcatacatggaggagagaagattggagttgtcggcagaactggtagtgggaaatcaacactgatccaggcactgttcagaatagtggagccttctgaggggagaataatcatcgacggtgttgacatctgcactttaggactccatgaccttaggtcacggtttggtatcatacctcaggaacctgttctctttgaagggaccattaggagcaacattgatccgcttgagcagtattccgatgatgaaatctggcaggcattgggccgctgtcagttgaaagaagccgtagcttcaaaacccgaaaagcttgatgcttcagtcgtcgacaatggtgagaactggagtgttggacaacgtcaactgctatgcctgggccgggtgatgctaaagcacagcagaatactgttcatggacgaggccactgcttccgttgattcccagaccgatgctgtgattcagaagatcatccgggaagactttgcagcttgtaccattatcagcattgcgcacagaatacctacggtgatggactgcgacagggtcctggttatagatgcaggactagcaaaggagtttgaccggcctgcaaatctgatcgagaggccatctctgtttggagcattggttcaagagtacgcgaaccgttcgtccgacgtttagcatttcagggtggcataattttttgactcgagatttgggaggaaacaatgattggaaatttctcggtgtggtgaacgagcaatgctgcattcatgctccaaataaaactgcgagccctcaaaatttcgcgaaacgtaattgggtcatgtggaaggccagaggagaagccacgatcggatgaaggagacatcgagatgactaggatagtaagtagttatcgagatgtatttgagcggtttaagctgaaattttaagactgagctgaagacgatgtatgaatctatgtattgttcaactagaatattactgcgcatgcaaattttctgccgactagtgttaaaacaaacatacaacaaa

SEQ ID NO: 211027 - DNA, 2271 bp, Zea Mays
gttgggagttcctcttaattctctacttccctgccgcccgcggcaaccgtcctccctcctccacctccaccagctgcactccccacgccgcgcacccgcccctctgcccctcctccagctccaaaccggaaacgcggggataccgcgccgtccgcgtggcgtgtccgaagagatcccacgacccggcgggcggcgctgcgaggctgaaggcgcggcggcggcggatttaagggcctcaccggctcgggatctccgcgcgatcgccgctgggccgcgcgctcgaggtatacattggttgttgcagcaagctggtttcttgagatccatattgatgtggtttgttctggaaatttttattcttcatggatgctattaagagccatgcaaagaaggttgatcttgttgatgagactctaagaccaccactagttccatccgagaagcacaatgctttccgagtgaggaatgttgcatccaggtgcaaaactgatctggctgatgccactaagataagaagatgtacatcaccaagtcttggccagacctcagcaattgaaggcacaccagcacccaaaagagctcagtctgcagatagaagaaggccgacaccttcaacccctccctctaaggtgtcaacaccctcaacccctgtgtcaaggtccatcacaccagttcgtgataccactagagacttacacaagagttccaagcgtatagcaagcacaaaggctcctgatggcttgtggccagcaatgcgtaacttgtcttcatctttccagtcggaatctgtggctgcacctactactagaaatgataaggtagtcacggctttggattgtagcaaggggcaagtgagtgttctaacggagaggaagagaagtccttttagaaggaaaaacattggtgaacattgtgagaatgctcaaccttcagaggagccccctaagaggttaattgagcaacacagatggccagccatgatagctgggcaggcgccgaagaatctcatgtcaagaagcattgacctttcggacaaagctaatataccagtcgcatcatcaaatacatcaagaggtctttcaccaaggaagacgccttctgtcagacctgtgccatcatcaaatacatcaagaggcctttcaccaaggaagaccccttccgtcggaccagtcccatcatcaaatacatcaagatgcccttcaccaatgaagaccccttctgttgaagcttcagtgaaactgtcaaatcagtcattggatgaagtggcaaggagtttggctattcaatcaagcagaaaagatgataaggtagattcacagacaatagagagatccaaatctttgagccgaccaaacagaacagttacttttcctgttccaattctacaacgctcatcatcaccaagcagagcattgccagctacgtcctcaacttccagggcctttcagagcccatctcggacaaggccatcaacaccctgtcagtcccaaagtgttggagctatccaatcaagcgttccatcttctcttattaactacatggttgatgcgcggaaaggaaagaagaatgccagccaaatcgaaaatatccaccaagtgcgtttattgcacaatagacatttacagtggctctttataaatgcttatgcagaagatgctttatcttttcaaaaggctactgttgagaataccatgtataatgtttggaggaatactgtaaacctgcgggattctgttaatatgaaaagaataatggtgcaacacttccaacaagaactcaggctttacaacattctgaaagagcagattgcttaccttgaacaatggccaacgctagaaagggagaatagtatctctttactaggggcaactgaggctctgaaagcaagcaccctgcgcctgccagttacattgggagcaaaggctaacacaattgctctcaagaacgctgtaagctcagctgttgatgtcatgcaagttttgggctcatctgtttgctgcattcattcaaagatcacggacagcacatccttggtttcagaactctctgtcatagcaggacaagagaagatcatgcttgatgaatgccgagaactcttagctacagctgcaaaactgcaggtgcaggagtcgagcctacggacacatcttgtgcaacagagacaaaggcttcaggattgaaatggcaacctgaacaagatgcagaagccccaggccatgccattgaacaggctcttcacctagacacactaaagtacaatttaagcagcaa

SEQ ID NO: 211028 - DNA, 2452 bp, Zea Mays
cggcaaccgtcctccctcctccacctccaccagctgcactccccacgccgcgcacccgcccctctgcccctcctccagctccaaaccggaaacgcggggataccgcgccgtccgcgtggcgtgtccgaagagatcccacgacccggcgggcggcgctgcgaggctgaaggcgcggcggcggcggatttaagggcctcaccggctcgggatctccgcgcgatcgccgctgggccgcgcgctcgagagccatgcaaagaaggttgatcttgttgatgagactctaagaccaccactagttccatccgagaagcacaatgctttccgagtgaggaatgttgcatccaggtgcaaaactgatctggctgatgccactaagataagaagatgtacatcaccaagtcttggccagacctcagcaattgaaggcacaccagcacccaaaagagctcagtctgcagatagaagaaggccgacaccttcaacccctccctctaaggtgtcaacaccctcaacccctgtgtcaaggtccatcacaccagttcgtgataccactagagacttacacaagagttccaagcgtatagcaagcacaaaggctcctgatggcttgtggccagcaatgcgtaacttgtcttcatctttccagtcggaatctgtggctgcacctactactagaaatgataaggtagtcacggctttggattgtagcaaggggcaagtgagtgttctaacggagaggaagagaagtccttttagaaggaaaaacattggtgaacattgtgagaatgctcaaccttcagaggagccccctaagaggttaattgagcaacacagatggccagccatgatagctgggcaggcgccgaagaatctcatgtcaagaagcattgacctttcggacaaagctaatataccagtcgcatcatcaaatacatcaagaggtctttcaccaaggaagacgccttctgtcagacctgtgccatcatcaaatacatcaagaggcctttcaccaaggaagaccccttccgtcggaccagtcccatcatcaaatacatcaagatgcccttcaccaatgaagaccccttctgttgaagcttcagtgaaactgtcaaatcagtcattggatgaagtggcaaggagtttggctattcaatcaagcagaaaagatgataaggtagattcacagacaatagagagatccaaatctttgagccgaccaaacagaacagttacttttcctgttccaattctacaacgctcatcatcaccaagcagagcattgccagctacgtcctcaacttccagggcctttcagagcccatctcggacaaggccatcaacaccctgtcagtcccaaagtgttggagctatccaatcaagcgttccatcttctcttattaactacatggttgatgcgcggaaaggaaagaagaatgccagccaaatcgaaaatatccaccaagtgcgtttattgcacaatagacatttacagtggctctttataaatgcttatgcagaagatgctttatcttttcaaaaggctactgttgagaataccatgtataatgtttggaggaatactgtaaacctgcgggattctgttaatatgaaaagaataatggtgcaacacttccaacaagaactcaggctttacaacattctgaaagagcagattgcttaccttgaacaatggccaacgctagaaagggagaatagtatctctttactaggggcaactgaggctctgaaagcaagcaccctgcgcctgccagttacattgggagcaaaggctaacacaattgctctcaagaacgctgtaagctcagctgttgatgtcatgcaagttttgggctcatctgtttgctgcattcattcaaagatcacggacagcacatccttggtttcagaactctctgtcatagcaggacaagagaagatcatgcttgatgaatgccgagaactcttagctacagctgcaaaactgcaggtgcaggagtcgagcctacggacacatcttgtgcaacagagacaaaggcttcaggattgaaatggcaacctgaacaagatgcagaagccccaggccatgccattgaacaggtaaactgtgcaagttgaactgcaaacagaaaagtaatctgtagagtctaaacaataggaacaaaacaaatgttaaacatcccctggagattcatggtgtgatgccacaactaactacccgcagtgcatagatatgacaggtttactgaaaaaacctcatcatatgtaaatggttttcaccatataatgcactcccagccttttctagtattttttgtttctttgtatagagtggatccctccctctttgccattgtattttttgacattttgaaagaaatacatagataatggatgagctaagatggtgatatcattttttttttcagttttccttgttagaaacatatatatt

SEQ ID NO: 211029 - DNA, 2425 bp, Zea Mays
cggcaaccgtcctccctcctccacctccaccagctgcactccccacgccgcgcacccgcccctctgcccctcctccagctccaaaccggaaacgcggggataccgcgccgtccgcgtggcgtgtccgaagagatcccacgacccggcgggcggcgctgcgaggctgaaggcgcggcggcggcggatttaagggcctcaccggctcgggatctccgcgcgatcgccgctgggccgcgcgctcgaggtatacattggttgttgcagcaagctggtttcttgagatccatattgatgtggtttgttctggaaatttttattcttcatggatgctattaagagccatgcaaagaaggttgatcttgttgatgagactctaagaccaccactagttccatccgagaagcacaatgctttccgagtgaggaatgttgcatccaggtgcaaaactgatctggctgatgccactaagataagaagatgtacatcaccaagtcttggccagacctcagcaattgaaggcacaccagcacccaaaagagctcagtctgcagatagaagaaggccgacaccttcaacccctccctctaaggtgtcaacaccctcaacccctgtgtcaaggtccatcacaccagttcgtgataccactagagacttacacaagagttccaagcgtatagcaagcacaaaggctcctgatggcttgtggccagcaatgcgtaacttgtcttcatctttccagtcggaatctgtggctgcacctactactagaaatgataaggtagtcacggctttggattgtagcaaggggcaagtgagtgttctaacggagaggaagagaagtccttttagaaggaaaaacattggtgaacattgtgagaatgctcaaccttcagaggagccccctaagaggttaattgagcaacacagatggccagccatgatagctgggcaggcgccgaagaatctcatgtcaagaagcattgacctttcggacaaagctaatataccagtcgcatcatcaaatacatcaagatgcccttcaccaatgaagaccccttctgttgaagcttcagtgaaactgtcaaatcagtcattggatgaagtggcaaggagtttggctattcaatcaagcagaaaagatgataaggtagattcacagacaatagagagatccaaatctttgagccgaccaaacagaacagttacttttcctgttccaattctacaacgctcatcatcaccaagcagagcattgccagctacgtcctcaacttccagggcctttcagagcccatctcggacaaggccatcaacaccctgtcagtcccaaagtgttggagctatccaatcaagcgttccatcttctcttattaactacatggttgatgcgcggaaaggaaagaagaatgccagccaaatcgaaaatatccaccaagtgcgtttattgcacaatagacatttacagtggctctttataaatgcttatgcagaagatgctttatcttttcaaaaggctactgttgagaataccatgtataatgtttggaggaatactgtaaacctgcgggattctgttaatatgaaaagaataatggtgcaacacttccaacaagaactcaggctttacaacattctgaaagagcagattgcttaccttgaacaatggccaacgctagaaagggagaatagtatctctttactaggggcaactgaggctctgaaagcaagcaccctgcgcctgccagttacattgggagcaaaggctaacacaattgctctcaagaacgctgtaagctcagctgttgatgtcatgcaagttttgggctcatctgtttgctgcattcattcaaagatcacggacagcacatccttggtttcagaactctctgtcatagcaggacaagagaagatcatgcttgatgaatgccgagaactcttagctacagctgcaaaactgcaggtgcaggagtcgagcctacggacacatcttgtgcaacagagacaaaggcttcaggattgaaatggcaacctgaacaagatgcagaagccccaggccatgccattgaacaggtaaactgtgcaagttgaactgcaaacagaaaagtaatctgtagagtctaaacaataggaacaaaacaaatgttaaacatcccctggagattcatggtgtgatgccacaactaactacccgcagtgcatagatatgacaggtttactgaaaaaacctcatcatatgtaaatggttttcaccatataatgcactcccagccttttctagtattttttgtttctttgtatagagtggatccctccctctttgccattgtattttttgacattttgaaagaaatacatagataatggatgagctaagatggtgatatcattttttttttcagttttccttgttagaaacatatatatt

SEQ ID NO: 211030 - DNA, 1913 bp, Zea Mays
tcgaagttttggcgctgaaatcggtatacattggttgttgcagcaagctggtttcttgagatccatattgatgtggtttgttctggaaatttttattcttcatggatgctattaagagccatgcaaagaaggttgatcttgttgatgagactctaagaccaccactagttccatccgagaagcacaatgctttccgagtgaggaatgttgcatccaggtgcaaaactgatctggctgatgccactaagataagaagatgtacatcaccaagtcttggccagacctcagcaattgaaggcacaccagcacccaaaagagctcagtctgcagatagaagaaggccgacaccttcaacccctccctctaaggtgtcaacaccctcaacccctgtgtcaaggtccatcacaccagttcgtgataccactagagacttacacaagagttccaagcgtatagcaagcacaaaggctcctgatggcttgtggccagcaatgcgtaacttgtcttcatctttccagtcggaatctgtggctgcacctactactagaaatgataaggtagtcacggctttggattgtagcaaggggcaagtgagtgttctaacggagaggaagagaagtccttttagaaggaaaaacattggtgaacattgtgagaatgctcaaccttcagaggagccccctaagaggttaattgagcaacacagatggccagccatgatagctgggcaggcgccgaagaatctcatgtcaagaagcattgacctttcggacaaagctaatataccagtcgcatcatcaaatacatcaagaggtctttcaccaaggaagacgccttctgtcagacctgtgccatcatcaaatacatcaagaggcctttcaccaaggaagaccccttccgtcggaccagtcccatcatcaaatacatcaagatgcccttcaccaatgaagaccccttctgttgaagcttcagtgaaactgtcaaatcagtcattggatgaagtggcaaggagtttggctattcaatcaagcagaaaagatgataaggtagattcacagacaatagagagatccaaatctttgagccgaccaaacagaacagttacttttcctgttccaattctacaacgctcatcatcaccaagcagagcattgccagctacgtcctcaacttccagggcctttcagagcccatctcggacaaggccatcaacaccctgtcagtcccaaagtgttggagctatccaatcaagcgttccatcttctcttattaactacatggttgatgcgcggaaaggaaagaagaatgccagccaaatcgaaaatatccaccaagtgcgtttattgcacaatagacatttacagtggctctttataaatgcttatgcagaagatgctttatcttttcaaaaggctactgttgagaataccatgtataatgtttggaggaatactgtaaacctgcgggattctgttaatatgaaaagaataatggtgcaacacttccaacaagaactcaggctttacaacattctgaaagagcagattgcttaccttgaacaatggccaacgctagaaagggagaatagtatctctttactaggggcaactgaggctctgaaagcaagcaccctgcgcctgccagttacattgggagcaaaggctaacacaattgctctcaagaacgctgtaagctcagctgttgatgtcatgcaagttttgggctcatctgtttgctgcattcattcaaagatcacggacagcacatccttggtttcagaactctctgtcatagcaggacaagagaagatcatgcttgatgaatgccgagaactcttagctacagctgcaaaactgcagctcaggcagagtcacggcatgatggcatgcggcggaagccaaacaggcccttaa

SEQ ID NO: 211031 - DNA, 728 bp, Zea Mays
gagagttctgcgtacgccattattatccacaacactcatcgatctacacacatacatagtttcttctactacacgacgacaaacatggggaagcctgcgaagatcggagagtggggtggatacgccggcgatcgtcgggatctgagggctactccggaccggctgatcgaggtgaaggtcacggcggacaacagcagctgcatccgctccatctccttcatctacatcggagccgatggcaaaccgtacgaggaggggccatggggtttcggccatgctggcacggagtacaagattgatctgtgcaggttcgacgagagcttgacggagatctccgggaccacgggcccagcctacaacattgacaatctggtcaagtctctcaaattcgtcaccaacaaacgcgcttacggaccgtacggcagggacgagggcaccccgttccgtgtcaaggtgatgaacaacggccacgtcgctggcttctttggccgctctggagattgcctggacgcgatcgggctctacgtgaaccccaactaataactaaaacgatggatcggatcatctgcatgcatgcatatgcagtatgcatgctgcttgcctgcctgtaacgaatatgaatgcataaaataacgcccctgctgctcccatgcatcagcagtgtgtaccactatgttatatatatatatattgtatttcgctaccgaataaaaacataaataaaagat

SEQ ID NO: 211032 - DNA, 1762 bp, Zea Mays
tctccaatccaactgcccttgcgatgctctgcctgctgcacattttcctcccactactacactttattaatcacacagaccgaatcccacgccttctctttccttccccttcgttctctccctgctgctctgctcctgccgcctggctgccgtgccgccgctgatccctctccctctcttccccctcaaagccccaattgccgggtgctcctcttccacccccattgccgactgcttcccgccagagagtggggaagggaggggggtgagaagggagatggcttcttggatagggagtgggtgcaggaaaaaattctaaacctgcgaaggttttctccacgctttcttggagctggtcttttaaatctcagcaggctagcagagaagcctcagttctgaattctagtgcttctggatatggttaccatggcaagacactggagaagctttatgacgaggaacaaaaactctacaagttaatcaagaatttgcaaggctccagtataagaaacatgtctcagtgctacaaaagctggaatcaggagggcatgatagactgcatgccgaaagacttcgggattctattgaagaactgcaaactcggataatctcattggaagaagctgtgagtttggcatgtttttccatatcaaatctcagagacgaggaattatatcctcagatcattgaattatctgcagggcttgtgcatatgtggaaaaacatgcacgagtgccatcaggtccagaaccatattgcccagcaagttagtctccttggcaacagacctgggagtgaaccaacaagtgacactcatcgccaggcaacatctcagctggaaattgaggtgtctggatggcacactgccttctgcaatcttatcacatcgcagcgtgaatacgttagcatccttagccaatggattggtctcacagactgccttccggatgatggtggcttaatgagaagttcatctggaatccttagcctctctgaggaactccagcgtgctcttgacaggctaccagagaaggtagcagctgaagcgataaagacctttatgtcagtcatacactctatagttgtacagcaaagtgaagagcgccaactaaagaagaagtcagataacatggatagcaagttccagacccagttagagaaacacagtgaaaatacaatgcaaaactcggcccagcctccaaataagaataactattcagcatcaaagaatggaacgaaactggatgcatttataaagcaggtcgaggaggagaaagccagatacctaacctctgtgagggtaagccgagccatgacactgaacagtctgcagacaagccttcgaaatgtgttccatgctctggagggattctcaggagtgtgcgtacaggcatttgaaggtatcagcagatgcagtgaagttgctgttattcactcgggagcagcttcacctgctatttcctcgtgaccttgcttcaatgactgtgattattcattgtaagtaggcaaaggataaactggttccacgtgaatacccttcgcttctaattttcagaactttgaatagctttcgggggattatgtgaagtcaatataggcataatagtcttgaatacatcacaatgtctcaacttacattttggttcttattgcatgggatgtactgctctgtacataatcatttacattttgaccgaaccagtatttttctcccttcacattatatctatacataattgttttgattctgcctctgatttat

SEQ ID NO: 211033 - DNA, 856 bp, Zea Mays
gcactcgccgtcgccgttggcctgcaggaggggttcgccagctcgctatttgccaccgtcgccgtcttcgcctccgtggtaatgtcaaatttactgtattattatggcatgtgtaatgtcgtgaaggatattttgttgcaacactactttggaaagggagtacgtggaggctcggttgaacctgaatcagatattgtgcaggcttgcagaagctttctagatcaacgacagtgcattaatgtgtggcgatttatccaaactatcaacgagagaaaagacttgacagagaacctgaagcagctacagtgcaggacactaatttttgttggtgagaattcccagttccatgctgaagttgtgcacatgactgcaaagcttgataggcgatatagcgctcttgtggaggtacaagcttgtggctcggttgtgacagaggagcaaccacacacaatgctgataccaatggagtactttctcatgggatatggactgtacaggccaagccagataaactttagccctcgtagccctctgaatccgttttgtatatcaccagagctcctctctcctgagagcaagggggttaagctaaagccaaccaagacacgagccaaccttaaagcataggaacaggtgatgagaatgcataggaactgatgtgcatcccttgattttttttttgtgctgaagtgacatagctgttgtttccgtgatgtacataagacaagaggttagtcgggtcaaggttgggtgggtggtcgattccattgatttgtagcctttaaaacagttgtacattgtcacagatttatttgttgaagggagaagaaataataaggggagatgagatgttgcc

SEQ ID NO: 211034 - DNA, 2004 bp, Zea Mays
ccccccgtggtcccgtcgcccggccgtgagacccaacggcgtttggacgagtgcaacagccgcacgccacgagcgtgggcgtgagtcgtgaccacgtgcggcctgggccagtaccggatccgggcgcgggcggacaccggacggacacaccgcaccgccatcgcccatcggcatcgcctcccaaccgtggttgacgagctcctggagcagatcacccaaacgcgaaagccaaaagccaaagcgagcggagcacaatttatcgtgcgcagcatcggcgcagcccctttccccgcccgcccacaccgcgcaccgcccgaccagctacgggagcacgccgcccctcccccctccccctccccgccccgtgccgtcgctcaccagccccagcgtcgccgttccctgctaactctatcccctccgcctctcgtcgtgctgaggagggcggagacaactgcggtgcggtggtgcctcctcaaatccccgccgacactttctgccgcccccaggtggatcctgtccgcggatccaggaggtgctatctagctccctgatccaagctgaaattaggatctgaaccttccggggcgagctgatgtacggctcgccggtgtccaaggacctcaacgtcccggtgcagccgcccatgatctcgtccgggctgctgaggtacagatcggcgcccagcacggtgcttggcgacctctgcgaggacttcctcccttccgcgtccggcgccgccagccccgacaacgtcttctccaggttcctcgccgagcaccacacccgggacgacaagccgtcgccgccaccgcctgccgcggtccacttcccgagcgaagcggacatggcttcccagcagcagcagcaaatgatgttccactcccaccaccaccagcagcagcagcagatggtgggtgccaagtccggcctttaccgcaccgtgagctcagacatagaaaccgcggccgctgttggcaccggtggcgccagcaacctgattcggcagagcagctcccccgccggattcctcgatcatctgaacatggacaacggatacggggccatgctgagggcgggcatggccacggcggactccctcgcaggtagcggtagcaggctaaagggccagctgagcttctcgtcacggcaggggtcattgatgtcccagatctcagagatggacagcgaggaggtcggagggagcagcccagaggctgccggcggaggcagggggtacatccctgggtacccaatgggttctggttctgggtgggaggactcatcggcgctcatgtcagacaatttgtctggcctgaaacgcccccgggactcgtcggagcctggccagttccaggacgcggtgccttgtaagatccgtgccaagcggggatgcgccacccatccgcgcagcatcgccgagagggtgaggagaacaaagatcagtgagcgaatccgaaagctgcaagaactcgttccgaacatggacaagcaaaccaacacatctgacatgctagatttggctgtcgactacatcaaggaactccagaagcaggttaaggtgttaaaggagacccaagctaattgcacctgcccagcaagcaagagccagcagcactcttgctgaagccctgatgcacactatacatgacctgcagaactcgaaagcatcttcacttgggatagaaaaagattgtgtagctttatatgagcacaggggaatggaacaatggcatcatcctcaagcattcaagtgatagggagaagggtaaaattggggagatatataggagaaacaactgtatagtttcgttgtagctttgctatatgtatactacactttcggtataaagtggttaatttacccctattgctagtcgtagcagctgtaaatgtgccgcagataagttgtagaaaaacttggatgcgttcaatgcgagcgatagtgtttcgactctgaacatatattatcattgaattaatgggcatcctctactgaggtctggg

SEQ ID NO: 211035 - DNA, 340 bp, Zea Mays
ctttgctaaattgttgatccagccttgtttgaataacgaagtggtgttcatcattggaccagagaaggaggtcaggaaagctgaggccatctttcgaggccgaatgctggagttctagagatgttaccctttgcgatacaggtttcaactgctttatattttgaacgtaaaaaggggaatatccaaaaggtgtatgcgggaccgtggatcccttgaccgtctgtgaatcatgaaaacaaaataaaggatttcaacttggcacttcgcgtttctggcctgttttcctcaacgcgtcaggatgcagaagcatgtttagatttcactctagcctccacctgtg

SEQ ID NO: 211036 - DNA, 775 bp, Zea Mays
gtgtattctcaagggaagtctggtttaatatcctgaaaacggcatactatatcctgaaaaggaagaagtccgtacccttctaaggcaggaccctaacttttggacaattaggcccttgtctgatatgatggttcgagctgccacagatgatgtccgcttccttctcagtatatatgcgaaaatgatggaaaagttaagcaaagtatctttatggcgtctggcagttcgcagtgagctgtactgtaggtgcttttgcttaagcgacaaccagtttgcagattggtcacctcttcctcctgtccctgatgacattgaggctgatgtttatgttcctgaagccgatatcctgtcagtcttagatgtgcctcctgggaaaatgggacgagttattggcagaaaggggtcaacgataatggctgtgaaagaatgttgcaaggttgaaatacatattggtggtgctaaggggcctccagacagggtgttcatcattggaccagagaaggaggtcaggaaagctgaggccatctttcgaggccgaatgctggagttctagagatgttaccctttgcgatacaggtttcaactgctttatattttgaacgtaaaaaggggaatatccaaaaggtgtatgcgggaccgtggatcccttgaccgtctgtgaatcatgaaaacaaaataaaggatttcaacttggcacttcgcgtttctggcctgttttcctcaacgcgtcaggatgcagaagcatgtttagatttcactctagcctccacctgtg

SEQ ID NO: 211037 - DNA, 1376 bp, Zea Mays
gctagcggtaaccgtcgcctcacttccgcagcaccggcgcggcgactattagctatagccgagtaggcgcagccgcgcacggcgcacccctcgtgttcccttttcgtccttgttcctcaacgtcgccggtgcgcccgcctcctgcctctctccccctgcgagcgatcgtgaggggatcgggatggcctcccaccattccgagcccctcgaccccgccgacgctgacgacccctcagataacaacccagaattaccatgcccctcctatcatatcgttaccaaacctggtcaactcccagtcgagtttcttgaaccctcagctgcccagaagttggtaattggatttgactgtgaaggtgttgatctctgccgcaatggtgctctctgtattatgcagcttgcattccctgatgctgtttacctagttgatgctattgagggtggaaaagaacttattcaagcttgtaagcccgcacttgagtctgatcatatcaccaaagttattcatgattgtaaaagggacagtgaggctttgtattttcagtttggcataaaactgcataatgtgatggatacacagattgcttattctctgatagaagagcaggagcaggaaggaaaaaagatgacatctgatgattacaattacatatcttttgtcagccttcttgctgataaacgatactgtggaccctaacttttggacaattaggcccttgtctgatatgatggttcgagctgccacagatgatgtccgcttccttctcagtatatatgcgaaaatgatggaaaagttaagcaaagtatctttatggcgtctggcagttcgcagtgagctgtactgtaggtgcttttgcttaagcgacaaccagtttgcagattggtcacctcttcctcctgtccctgatgacattgaggctgatgtttatgttcctgaagccgatatcctgtcagtcttagatgtgcctcctgggaaaatgggacgagttattggcagaaaggggtcaacgataatggctgtgaaagaatgttgcaaggttgaaatacatattggtggtgctaaggggcctccagacagggtgttcatcattggaccagagaaggaggtcaggaaagctgaggccatctttcgaggccgaatgctggagttctagagatgttaccctttgcgatacaggtttcaactgctttatattttgaacgtaaaaaggggaatatccaaaaggtgtatgcgggaccgtggatcccttgaccgtctgtgaatcatgaaaacaaaataaaggatttcaacttggcacttcgcgtttctggcctgttttcctcaacgcgtcaggatgcagaagcatgtttagatttcactctagcctccacctgtg

SEQ ID NO: 211038 - DNA, 484 bp, Zea Mays
gtgcaagctagggaatatttggatgcagaggtagccgcaaggaaagctgaagcagctgagaagcgagctgatgatatcgcttcgggagcggcgcagatgaacggccgcgagctgttccaacatgagccctgggtgttcgacaacaacatttactgagatcgtgtcgggctactgttcctgcattagtccaagctccagcggtggtttcattttgtactgctatatcagctttgcgaaactgtggattttatttcaccgtttctaagattattctctcaataggtaattgaacttgtttcaaatacgttttgccaaatctttgtgcagtcaccgaatggtatctagtgtcgctattctttttctaaaactcttacaaacaaagagtattggtcggaagagaattctcgatcttcagattatcgttgttttcatctttcagttatcctattgtgaagtctgatgcaagctatagggcaaagttgtg

SEQ ID NO: 211039 - DNA, 2396 bp, Zea Mays
caactaagctttatatatatttcatataatttttttactcccgtcgcaacgcacgggtactcacctagtataatctataagctgaaacaaacaactccattgtcagtgtggccattgttacaaaatttgacctacaccgttttttgaaattaaatagtaaaataaaaaaaggacaaaagcgtctccgttgctttgttcccgcggtgaagagaaagcatcgacgaagcggtaactttgcccactttggatctgaacgggcaggcaggcagatcaacaagtcgcagcgcagtcaagcaaggcacgtcggtccaagagcacgacgagcagacgacgctgccggcccggccgtgctgctcctctgagtccgagatctgaaggcgcggcaggaaggaaacgggcgggcgagaggatccagcagccctcccccacgcgcgcgcgacggttagcgcgtcccagatctcggtgcggcgcctcccgcccggccctgccggcgagagcgcggcccgatgaggcggcggccgttcctggaccagcggcggccttcgttcaagcgccggtggcagcagcgcccgtggtgggtgcgcctcgcgctttccctcctcctcgccctcgcatgcgtcctcctcctcgccgtcctcctcggctcccccgaccccggcgcctcgccgtccacctccgccgcgtcctccggatctgagaccacctcctcacctctcctccgtcagagaacttacctggagggaatcacggatgcgctcaacatgactgacgaaatgctgagcgcccgctcgttctcgaggcagctcatggaccagatttatctagccaaaacatatgtcgtcgttgccaaggaggccaacaacctgcagtttgtggcggagcttagtgcccaggtacggcgggcgcagagcatccttgcgcatgctgcagcctatgggggcacggtgatggagcaggaagcagagaaggcgatcagggatatgtcggtgctgctcttccaggcgcagcagcttcggtacgacagcagtatcacaatcatgaagttgaaaggccagattcagtccctagaggagaagtcgaaagttgaggtggagaaaagcacaaaatatggccagattgctgctgaggacctcccaaagggactttattgccttggtgtccggttaaccatggaatggtttaagagtcccgagcttcagaggaagttttcggataggagcccagcagtgcagagcaatctgagggataacagcctctatcatttttgtgtcttctcagacaacatccttgctgtttcagttgttgttaattctacggctataaactcgaggcaccctgacaaggttgtttttcacttagtgactgatgagttgaactatgctccgatgaaggcatggtttggcatgaatgactacagaggggtcactgtggagatacaaaaggtggaggactttacctggctcaatgcatcgtatgttcccgttcttaaacagctacagaatgctgctacacagaagttctacttctctggcagtggtagtcgtggaacaccaattaaattcaggaacccaaagtacttatcaatgcttaaccacttgaggttttatattccagaaatatatcctgaattgcagaaggtggtatttcttgatgatgatatcgttgttcagaaggacctatcagaattgtttactatcaacctcaatggcaatgtgatgggtgctgtagagacttgcatggagacattccacagatttcataagtatcttaaccattcccatcctctaatccgtgctcattttgaccctgatgcttgcggctgggcatttggtatgaacgtgcttgatctggttgaatggaggaacaagaatgtgacaggcatatatcattattggcaggagcgcaatgctgatcatactctatggaagcttgggtctttaccacctggacttcttgctttctatggcttggttgaagcattggatcccaaatggcatgtcttgggacttggctacacaaatgtggatcttgctactatcaaggaaggtgcagtactgcactacaatggaaatatgaagccatggctcaaaatcggaatggagaagtacaagagcttttgggataactatgtggactattcacaccctttgattcagcagtgcttcatgcgttgattgatgtgtatcaacattagaatttttgtaagcttcatggtagatatgttccgagcacatgctccaactgccacacggaaacattgtagttaaatcagttggcttttctctcaagttacaatctctgacaaaacatcagtggatgtctatagcatctgtagttgatggagcacaacaattgcatatctctagccacaggacggtaaagcttatttgcaaata

SEQ ID NO: 211040 - DNA, 1786 bp, Zea Mays
agaaaatgttcattgaggaggtcatggatcttgtagagctcacatcactgaggggtgcacttgttgggcttcctggagtgagtggcctgtcaactgagcaacgcaagaggctaactattgctgttgagcttgttgccaatccttcgatcattttcatggatgagcctacctccggtcttgatgctcgtgcagctgcaattgtgatgaggactgttaggaacactgtcaatactggaaggactgttgtttgcaccattcaccagccaagcattgacatatttgaagcatttgatgagcttttcttaatgaagagaggtggagaagagatatatgttggtccagtgggccagaattcatcaaaattgattgagtactttgagggaattgaaggtattagccagataaaggatgggtataacccagccacgtggatgttggaagtgagctctagttctcaggaagagatccttggggttgatttcagtgaaatctacaggcaatcagaattataccaaaggaacaaggcactcatagaggagctgagcaccccacctcctggctctagtgacctcaatttccctacacagtactccagatcgttctttactcagtgcctagcctgcttctggaagcagaaaaagtcgtattggaggaacccaacctacacagcagtgaggctactgttcactgtagtcattgcgctcatgtttgggaccatgttctgggaccttggacgaaaaactaataaacagcaggatctgttcaatgccatgggatcaatgtatgccgcagttgtatacatcggaatgcagaactctggctctgttcaaccagtggtggtggtggagcgaacagtcttctaccgagaacgagcagcgggcatgtattcagctttcccgtatgcatttggacaggtcgcaattgaaattccttatatctttgtacagactttgctatatggagtgctagtctattcaatgattgggtttgagtggactgttgccaagttcctctggtacctgttcttcatgtacttcacactgctttacttcacgttctacggaatgatggcggttggcttgactcccaacgaaaccatagccgtcattacctcatcggcgttctacaacgtgtggaacctcttctcaggatatctgatcccccgacctaaactgcctgtctggtggaggtggtacagctggatctgcccagtcgcatggacactctacggattggttgcctcccagttcggcgacatcgcgcatccgctggaggactcaccgacaggccagacggtggcgcagttcatcacggattacttcggcttccatcacgacttcctgtgggttgtcgcaggggtgcacgtcgggctgaccgtgctcttcgcgttcctgttcagttttgccatcatgaagttcaacttccagaatagatgaggacaggaggcccaggccattggcaatttttgcattcgtttgttggctgtgggtgggtgggtggacaagcatacctgctgtgcgtgtagcatctacggcccatcgattaggctgagcaagctaccatagtaccatgtaacggtgtatagagtttattttgtatttcaagcttatagaattagaaacactagaagttgtaggcgaacaaaagccttgacaagagttgagcctcctgctgccatggccagctgtagctttatacctgtcagaggcacggagcgcttctcagagaatgtaaaccgtatactggcattctaatgaatcagtgggagcagaattttgaccaagta

SEQ ID NO: 211041 - DNA, 284 bp, Zea Mays
cttacacggtagcagctgtcacacaccggtgtaagcgccgccggcggcaggaacaccccgatctcgacgatagatcgagaaagcgatggcgctgaccaacttcatcgtgacggtggccgttgtcggcgcgggtgtgctcctcttcaccaccgacatgcgcaggtccggcgccctcttccgccgcaatgcgcgccagctccagcagtggctccaggaggacacggcctccgccgcgtccaagtaatcatgcgaaagtggtggatcattggagtacctttttggtc

SEQ ID NO: 211042 - DNA, 2894 bp, Zea Mays
tttttccctcggagctctctgactctctgagattttttttttgtcttcatttcaaattttgtggtttcctcccacattcccttcccccgctcccctccaggctccagccgctcgcttcgattcgcttcagctctgccttcccgtctcatggccacctaccagcccacgcccggtgacgccttcccagcccgctgctgactgcaccgattcacccacagttggccttcaggcaaccctagcgtcgccgatccgccgctccggcgagatgccggtgggccacatcgccgtctctcccgccgccgtctatggagaacagggatagcttcactcgccccccagcgccctcctacgcccacggaacccaaaccgctaagggcgtcgcggtccctaccggcggggacacggccgccaccaacctgacgtcgtcgtcagggttgtcctcgtctctcacgctctcccctccccacttcctgcaacagattcatgcagctgtcaagcggcagaggcctttcgtctaaacttccaagagcaacacgggtcctggtttccggaggtgagcgtgcaaataaaattggtgccaacccttctgtttcgaaagaccaggaacgaattgttacgcagcctcagagaggcatgttgggaccctctatgctgccaaatgtgacgcctgatcaacagaaagtcgatagcacttctaaattagggtcctctgccccagatgagttgatgttgacagcaccctcaatgctaaaaagtaccactgatacctgtgcacaacgtgttggccagcagaaaaacaaggctaatctgttgatggatacagagaagtcagctttcgatgctttgtcatctcaaattacatcatgcaatgcattgatgggggaaagtttcaagaaaggacagcttgattcggttgttaatccacagttgacgtcacaaagagataattttcctgcaaatcaaggagctcagaatgatcaccagaagaaccatcaggagcttcaaactgttgatatagcagctgatatggatatcgaatatgatgcgtctaatttgtctcggagagggatccaagaggctcgtaatcagaatcatggaaagcatatgattcctttctctgccattggttcatctgtgactgctatgtctcttcactcgggacctactgtccaaagttcacagactccacaggttggcggatacacttcaccagtgcagataccagaatctgctgtagaatcctccaagggtgcactgggccatggtgctcaaaaggagcatgctggtgcaactggtgttggtgactggaatccccacaaccagcaggttcaaaatctaggtaatggtgccacggacaaagctgtttctagcattggcagattgcgttctgaaggattacctgcaaatgatcagtctacatctgccagggatggtggtggttcccgaccaaacaagggtgagaaggagcgccgtaaaaagaattatgatcctaatgttttctttaaggtgaacgggaaactttatcagaaacttggtaaaataggatctgggggtagcagtgaagtacataaagttatatcatcagattgcataatatatgccttgaaaaagatcaagcttagaggtcgtgattaccctactgcatatggtttctgtcaagaaattgagtacttaaataagttgaaaggaaggagcaatatcatacaaatgattgattatgaggtcactgataaaagtctacttctagaaagtaccgtgtcacccagggatgggagaattaaggatgatcactacatttacatggttctggaatatggtgaaattgacttggctaacatggttgctcagaagtggaaggagaggaacaactctactatgaaaattgatgaaaattggctgcgcttttattggcagcaaatacttgaagctgtcagtacaatacacgaggaacgaattgtccactctgatttgaagcctgcaaactttatgcttgtgaggggctcacttaaactaattgactttggcatcgccaaggctataatgaatggtacaacaaacattcaacgtgatgctcaggtagggactctcaactacatgtcacctgaagcgttcatgtgcaatgatacagactcggatggtaacattattaagtgcgggctcccctcagatatctggtctcttggctgtattctttaccagatggtgtatggcaagacaccatttgcagactacaagactttctgggacaaatataaaggagtgactgataggaaccacaagatcatgtatgaaccagttgacaacccatggctcattgatttgatgcaaaggtgtctcgcctgggaccgaaatgaacgatggagaacacctcagcttcttaagcacccttttctcaatcctccagttccaagggatttacctccctctgacgatgatccatataggttgctcattgagaggatcagagtccactgggataacccaatggttcaaaaacttcgtagtttaattgaagaactcgatggggatcagtaaaaatgggtttttaacaatcctgattgatactcgatctagggcctgggtagtggtggcacaagtgttttagtttctgtattgttcctgattgatagggtactgttgtaatttgtaattagagagtggcggcatcggttggagacgtcggagcatattatgatgccctggcatttttgcttcctcgtgtttggaggttgatgtgacactttgtcagaaatggcggctagttaacgttaagagtcaagatatttttgttgtctgatcagtggaagcatctccaggtgtaaatagttgaaccaattggtagtttgtgttttaccatgaatcaagcgagccaacgagccatgagcatttcgtct

SEQ ID NO: 211043 - DNA, 2885 bp, Zea Mays
ttcaaattttgtggtttcctcccacattcccttcccccgctcccctccaggctccagccgctcgcttcgattcgcttcagctctgccttcccgtctcatggccacctaccagcccacgcccggtgacgccttcccagcccgctgctgactgcaccgattcacccacagttggccttcaggcaaccctagcgtcgccgatccgccgctccggcgagatgccggtgggccacatcgccgtctctcccgccgccgtctatggagaacagggatagcttcactcgccccccagcgccctcctacgcccacggaacccaaaccgctaagggcgtcgcggtccctaccggcggggacacggccgccaccaacctgacgtcgtcgtcagggttgtcctcgtctctcacgctctcccctccccacttcctgcaacagattcatgcagctgtcaagcggcagaggcctttcggtccaatgcagtctaaacttccaagagcaacacgggtcctggtttccggaggtgagcgtgcaaataaaattggtgccaacccttctgtttcgaaagaccaggaacgaattgttacgcagcctcagagaggcatgttgggaccctctatgctgccaaatgtgacgcctgatcaacagaaagtcgatagcacttctaaattagggtcctctgccccagatgagttgatgttgacagcaccctcaatgctaaaaagtaccactgatacctgtgcacaacgtgttggccagcagaaaaacaaggctaatctgttgatggatacagagaagtcagctttcgatgctttgtcatctcaaattacatcatgcaatgcattgatgggggaaagtttcaagaaaggacagcttgattcggttgttaatccacagttgacgtcacaaagagataattttcctgcaaatcaaggagctcagaatgatcaccagaagaaccatcaggagcttcaaactgttgatatagcagctgatatggatatcgaatatgatgcgtctaatttgtctcggagagggatccaagaggctcgtaatcagaatcatggaaagcatatgattcctttctctgccattggttcatctgtgactgctatgtctcttcactcgggacctactgtccaaagttcacagactccacaggttggcggatacacttcaccagtgcagataccagaatctgctgtagaatcctccaagggtgcactgggccatggtgctcaaaaggagcatgctggtgcaactggtgttggtgactggaatccccacaaccagcaggttcaaaatctaggtaatggtgccacggacaaagctgtttctagcattggcagattgcgttctgaaggattacctgcaaatgatcagtctacatctgccagggatggtggtggttcccgaccaaacaagggtgagaaggagcgccgtaaaaagaattatgatcctaatgttttctttaaggtgaacgggaaactttatcagaaacttggtaaaataggatctgggggtagcagtgaagtacataaagttatatcatcagattgcataatatatgccttgaaaaagatcaagcttagaggtcgtgattaccctactgcatatggtttctgtcaagaaattgagtacttaaataagttgaaaggaaggagcaatatcatacaaatgattgattatgaggtcactgataaaagtctacttctagaaagtaccgtgtcacccagggatgggagaattaaggatgatcactacatttacatggttctggaatatggtgaaattgacttggctaacatggttgctcagaagtggaaggagaggaacaactctactatgaaaattgatgaaaattggctgcgcttttattggcagcaaatacttgaagctgtcagtacaatacacgaggaacgaattgtccactctgatttgaagcctgcaaactttatgcttgtgaggggctcacttaaactaattgactttggcatcgccaaggctataatgaatggtacaacaaacattcaacgtgatgctcaggctaattgtggttctcactgcactgagcaggtagggactctcaactacatgtcacctgaagcgttcatgtgcaatgatacagactcggatggtaacattattaagtgcgggctcccctcagatatctggtctcttggctgtattctttaccagatggtgtatggcaagacaccatttgcagactacaagactttctgggacaaatataaaggagtgactgataggaaccacaagatcatgtatgaaccagttgacaacccatggctcattgatttgatgcaaaggtgtctcgcctgggaccgaaatgaacgatggagaacacctcagcttcttaagcacccttttctcaatcctccagttccaagggatttacctccctctgacgatgatccatataggttgctcattgagaggatcagagtccactgggataacccaatggttcaaaaacttcgtagtttaattgaagaactcgatggggatcagtaaaaatgggtttttaacaatcctgattgatactcgatctagggcctgggtagtggtggcacaagtgttttagtttctgtattgttcctgattgatagggtactgttgtaatttgtaattagagagtggcggcatcggttggagacgtcggagcatattatgatgccctggcatttttgcttcctcgtgtttggaggttgatgtgacactttgtcagaaatggcggctagttaacgttaagagtcaagatatttttgttgtctgatcagtggaagcatctccaggtgtaaatagttgaaccaattggtagtttgtgttttaccatgaatcaagcgagccaacgagccatgagcatttcgtct

SEQ ID NO: 211044 - DNA, 3116 bp, Zea Mays
cttgtccctattttacaggatccatcttctagagcctcacaggcagggtagaggaatacagaggagatagaggaaagtcactggtgatccatccggggagggcggcggtcgcctcctcttcccctgcggccgagctcgccagtcgcctgaacttgtctcgcccgctgccgatctcctctctccgctcgtcgcgccgcaacctggagaggggaccgcgctcggtcgactgccacctggggagcgggtgggcggcgtccgccctctgcactccccggtgtccccgcgaccggttccggcgcggccggcacacaggttcgcagggtttgaaaacttcttgtatgctcacgcgttcggcgctgattgttgaaagtagctttgggactctgaggacctaaattctaatcaattgtgaaatctgaaaggtgtagctatttgtacttctggaggtgtgggaagaaatggaatgcaacaaagatgaggcccaaagggcgaagggtattgcaaagaagaagtttgaagcaggggacttgcagggtgccaggaaattcgccctcaaggctcagactctctttcctgcgcttgagggcgttgatcaaatgatcgccacctttgatatctatcttgcttcagaagggaaggttgctggggagaaggactggtactctatcctttccgttcccatgaacgcaaacgatgaaaagatcaagaaacagtacaggaagttggttcttcagttccaccctgataaaaacaagtcagtgggcgctgagggtgctttccagatggttcaagaggcatacacggtgctatccgatagaaccaagcgagctgtatatgaccaaaagaggaatgtgaggacattccaacagaggacagcacaatcaggtaaagcaagcacggtccctggtgcatccaatggcttctataatttcgcagctaatgctgctactgcctccaagcggacagtaaacaagcaaacagtgggatcagcaacacatgccccatctgcaccttcaactgctactcgtgcacctgtggcaaagcctgatacattttggacctcatgcaacaaatgcaagatgaactatgagtacctcagggtgtatttgaataaccatcttcgctgccctagttgccgtcagccattcctagcaaaagaagtacaaaagccaccagcagggaacgtggtacaagattcaaacatcagtggtgctaatcaaaacacaaccactaatagaaatttgcggtggggtccattttcaagggctgctggtgcagctagtgccactgcatcgtctgctgctgctgctcaagctgctaatgtagttcatcagacatatgaaaaagttaggagggagagggaggaggcacaagcagcggcaacaagggaagaggctcttcgccggaagtacaatcctctaaagaggcatgcaagcatgtcagggaatgctaatcttggaccaggtgatgcaacatctggaaagaagacaaggactatgactaaagatgctgaagttggttcttcatccaccatatccagtccaggagcaaatttttttagagtgcctggtgtgaatatatccttttccaacaacattggggcctatgagtttcaaggcgttgatggtggccccaattggaaacccaggcctctgatccgcttaagtttagtcaagaccttctctcagatggatcttaggggtcttttgctggaaaaaacgaaaactgagcttaaaaacaagctaacagtaataaaaagtaaaacatcccaagttgctagtgaaaaagcgagcaagaaaattgcggtcaaggaaaatggtggggataatgaagctcttggaccagaagatcctacagctaataaagattctcatgattcagaacagattggttctaatactagcacagatgctgaaaatgaagatgatgaccccttatcttataatgttcctgatccagatttccatgattttgacaagaatcgcactgaggaatgtttccaaagtgatcaaatttgggctacatatgatgatgaagatggaatgcctcgttattatgcatttattcagaaagttctttccttgaaaccattcaagctcagaataagctatctcacatcaagggcaaatagcgaatttgggccttcgaattgggtttcttctggcttcataaagacttgtggtgatttcaggattggtaaatatgaaagctgtgatatagtcaacatgttctctcaccagatgaaatgggataaagggccgcgtgggcttatcaaaatttatccacagaaaggtgatatctgggctgtttatcggaattggtcctctgactgggatgaagatactccagataatgtgctccatgcctacaatgtggttgaggtactggatgcctatgatgaagtccatggcatctccataattcccttagtcaaggatgtcaggcgaagaagctgcaaatgtccccaaagatagttatgagcttgatccagctgctatttctaaagaactgcttcaggggatcacggaagcagtggagccaaatggaacctaaggcagttgatgatgcctgccttggttaacctgccattttgaagtaatcgagcaaaaagatattaacacttgctagttttatagatttccttctgcttttgactatcacctttgcatagaagagatacaatggggccagtcattcaggagtcagctgcttagcagcttctggtgtaattagcaggctctgatatgaattttgctgtgatatgttacttagggcttgtttagatgcatgtggattggaggggattgaagtgacatataatcccttactagtccatgcccctcaatcccatgcatccaaaccagcccttagcaactctagatgtgggtgtactaacgcgaagctcaagcagtttttatggtcagtgttgacacctgttatctgtcttatcttgagagtggatctgttgctttttttgcgaattcaaatgctaattgaactcgtggccgtttgttggttctgttattttgaaacacccatacgttgtatgtgaaaaactactagcattgcttcactcagtaatttcataaattccagcctactgcggtatactgtat

SEQ ID NO: 211045 - DNA, 3187 bp, Zea Mays
ccccgatcttctctctcctttacacgccaacagctcgcccctctccgtctgcttgattctgctccaggctccagcctcagaccggcactcgctcaaaaatgtcattacgcacccaatccgcttgtagctgtatgctggaacctactctgccttgtcttcttgcatcacactaagaatgcgcgcaacccccacccacccacgggccacgactaggccggcctttgctgctgtcctactttgccacccacgacattggccggcgacgagcaccaccaggacagcagggtttgaaaacttcttgtatgctcacgcgttcggcgctgattgttgaaagtagctttgggactctgaggacctaaattctaatcaattgtgaaatctgaaaggtgtagctatttgtacttctggaggtgtgggaagaaatggaatgcaacaaagatgaggcccaaagggcgaagggtattgcaaagaagaagtttgaagcaggggacttgcagggtgccaggaaattcgccctcaaggctcagactctctttcctgcgcttgagggcgttgatcaaatgatcgccacctttgatatctatcttgcttcagaagggaaggttgctggggagaaggactggtactctatcctttccgttcccatgaacgcaaacgatgaaaagatcaagaaacagtacaggaagttggttcttcagttccaccctgataaaaacaagtcagtgggcgctgagggtgctttccagatggttcaagaggcatacacggtgctatccgatagaaccaagcgagctgtatatgaccaaaagaggaatgtgaggacattccaacagaggacagcacaatcaggtaaagcaagcacggtccctggtgcatccaatggcttctataatttcgcagctaatgctgctactgcctccaagcggacagtaaacaagcaaacagtgggatcagcaacacatgccccatctgcaccttcaactgctactcgtgcacctgtggcaaagcctgatacattttggacctcatgcaacaaatgcaagatgaactatgagtacctcagggtgtatttgaataaccatcttcgctgccctagttgccgtcagccattcctagcaaaagaagtacaaaagccaccagcagggaacgtggtacaagattcaaacatcagtggtgctaatcaaaacacaaccactaatagaaatttgcggtggggtccattttcaagggctgctggtgcagctagtgccactgcatcgtctgctgctgctgctcaagctgctaatgtagttcatcagacatatgaaaaagttaggagggagagggaggaggcacaagcagcggcaacaagggaagaggctcttcgccggaagtacaatcctctaaagaggcatgcaagcatgtcagggaatgctaatcttggaccaggtgatgcaacatctggaaagaagacaaggactatgactaaagatgctgaagttggttcttcatccaccatatccagtccaggagcaaatttttttagagtgcctggtgtgaatatatccttttccaacaacattggggcctatgagtttcaaggcgttgatggtggccccaattggaaacccaggcctctgatccgcttaagtttagtcaagaccttctctcagatggatcttaggggtcttttgctggaaaaaacgaaaactgagcttaaaaacaagctaacagtaataaaaagtaaaacatcccaagttgctagtgaaaaagcgagcaagaaaattgcggtcaaggaaaatggtggggataatgaagctcttggaccagaagatcctacagctaataaagattctcatgattcagaacagattggttctaatactagcacagatgctgaaaatgaagatgatgaccccttatcttataatgttcctgatccagatttccatgattttgacaagaatcgcactgaggaatgtttccaaagtgatcaaatttgggctacatatgatgatgaagatggaatgcctcgttattatgcatttattcagaaagttctttccttgaaaccattcaagctcagaataagctatctcacatcaagggcaaatagcgaatttgggccttcgaattgggtttcttctggcttcataaagacttgtggtgatttcaggattggtaaatatgaaagctgtgatatagtcaacatgttctctcaccagatgaaatgggataaagggccgcgtgggcttatcaaaatttatccacagaaaggtgatatctgggctgtttatcggaattggtcctctgactgggatgaagatactccagataatgtgctccatgcctacaatgtggttgaggtactggatgcctatgatgaagtccatggcatctccataattcccttagtcaaggttactggatttcgaacagtatttcagcgccatcaggatccaaatgctaccatgaagattcctaaagaagagatgtttcggttttcacacctagtgcctttttacaggatgtcaggcgaagaagctgcaaatgtccccaaagatagttatgagcttgatccagctgctatttctaaagaactgcttcaggggatcacggaagcagtggagccaaatggaacctaaggcagttgatgatgcctgccttggttaacctgccattttgaagtaatcgagcaaaaagatattaacacttgctagttttatagatttccttctgcttttgactatcacctttgcatagaagagatacaatggggccagtcattcaggagtcagctgcttagcagcttctggtgtaattagcaggctctgatatgaattttgctgtgatatgttacttagggcttgtttagatgcatgtggattggaggggattgaagtgacatataatcccttactagtccatgcccctcaatcccatgcatccaaaccagcccttagcaactctagatgtgggtgtactaacgcgaagctcaagcagtttttatggtcagtgttgacacctgttatctgtcttatcttgagagtggatctgttgctttttttgcgaattcaaatgctaattgaactcgtggccgtttgttggttctgttattttgaaacacccatacgttgtatgtgaaaaactactagcattgcttcactcagtaatttcataaattccagcctactgcggtatactgtat

SEQ ID NO: 211046 - DNA, 3020 bp, Zea Mays
acgacattggccggcgacgagcaccaccaggacagcaggatttcctgatggtttgcaacaccgtggaatccttctttcttctttccagagctagcagtgtcagcaaaagcagacacgggtttgaaaacttcttgtatgctcacgcgttcggcgctgattgttgaaagtagctttgggactctgaggacctaaattctaatcaattgtgaaatctgaaaggtgtagctatttgtacttctggaggtgtgggaagaaatggaatgcaacaaagatgaggcccaaagggcgaagggtattgcaaagaagaagtttgaagcaggggacttgcagggtgccaggaaattcgccctcaaggctcagactctctttcctgcgcttgagggcgttgatcaaatgatcgccacctttgatatctatcttgcttcagaagggaaggttgctggggagaaggactggtactctatcctttccgttcccatgaacgcaaacgatgaaaagatcaagaaacagtacaggaagttggttcttcagttccaccctgataaaaacaagtcagtgggcgctgagggtgctttccagatggttcaagaggcatacacggtgctatccgatagaaccaagcgagctgtatatgaccaaaagaggaatgtgaggacattccaacagaggacagcacaatcaggtaaagcaagcacggtccctggtgcatccaatggcttctataatttcgcagctaatgctgctactgcctccaagcggacagtaaacaagcaaacagtgggatcagcaacacatgccccatctgcaccttcaactgctactcgtgcacctgtggcaaagcctgatacattttggacctcatgcaacaaatgcaagatgaactatgagtacctcagggtgtatttgaataaccatcttcgctgccctagttgccgtcagccattcctagcaaaagaagtacaaaagccaccagcagggaacgtggtacaagattcaaacatcagtggtgctaatcaaaacacaaccactaatagaaatttgcggtggggtccattttcaagggctgctggtgcagctagtgccactgcatcgtctgctgctgctgctcaagctgctaatgtagttcatcagacatatgaaaaagttaggagggagagggaggaggcacaagcagcggcaacaagggaagaggctcttcgccggaagtacaatcctctaaagaggcatgcaagcatgtcagggaatgctaatcttggaccaggtgatgcaacatctggaaagaagacaaggactatgactaaagatgctgaagttggttcttcatccaccatatccagtccaggagcaaatttttttagagtgcctggtgtgaatatatccttttccaacaacattggggcctatgagtttcaaggcgttgatggtggccccaattggaaacccaggcctctgatccgcttaagtttagtcaagaccttctctcagatggatcttaggggtcttttgctggaaaaaacgaaaactgagcttaaaaacaagctaacagtaataaaaagtaaaacatcccaagttgctagtgaaaaagcgagcaagaaaattgcggtcaaggaaaatggtggggataatgaagctcttggaccagaagatcctacagctaataaagattctcatgattcagaacagattggttctaatactagcacagatgctgaaaatgaagatgatgaccccttatcttataatgttcctgatccagatttccatgattttgacaagaatcgcactgaggaatgtttccaaagtgatcaaatttgggctacatatgatgatgaagatggaatgcctcgttattatgcatttattcagaaagttctttccttgaaaccattcaagctcagaataagctatctcacatcaagggcaaatagcgaatttgggccttcgaattgggtttcttctggcttcataaagacttgtggtgatttcaggattggtaaatatgaaagctgtgatatagtcaacatgttctctcaccagatgaaatgggataaagggccgcgtgggcttatcaaaatttatccacagaaaggtgatatctgggctgtttatcggaattggtcctctgactgggatgaagatactccagataatgtgctccatgcctacaatgtggttgaggtactggatgcctatgatgaagtccatggcatctccataattcccttagtcaaggttactggatttcgaacagtatttcagcgccatcaggatccaaatgctaccatgaagattcctaaagaagagatgtttcggttttcacacctagtgcctttttacaggatgtcaggcgaagaagctgcaaatgtccccaaagatagttatgagcttgatccagctgctatttctaaagaactgcttcaggggatcacggaagcagtggagccaaatggaacctaaggcagttgatgatgcctgccttggttaacctgccattttgaagtaatcgagcaaaaagatattaacacttgctagttttatagatttccttctgcttttgactatcacctttgcatagaagagatacaatggggccagtcattcaggagtcagctgcttagcagcttctggtgtaattagcaggctctgatatgaattttgctgtgatatgttacttagggcttgtttagatgcatgtggattggaggggattgaagtgacatataatcccttactagtccatgcccctcaatcccatgcatccaaaccagcccttagcaactctagatgtgggtgtactaacgcgaagctcaagcagtttttatggtcagtgttgacacctgttatctgtcttatcttgagagtggatctgttgctttttttgcgaattcaaatgctaattgaactcgtggccgtttgttggttctgttattttgaaacacccatacgttgtatgtgaaaaactactagcattgcttcactcagtaatttcataaattccagcctactgcggtatactgtat

SEQ ID NO: 211047 - DNA, 926 bp, Zea Mays
caaacacaacacaaatcacttcgtttgagcacaggaaaaaaatgcttttcgaatcctaagacttgggcccactgtcagcctcggtagatatcacactcactagtccactcccctcttcactcccgtcggtggattccatgtccaaccgcgtcgccggaggccggaaccatgaagcctgtcagtgtcgccgaacacaacaaccaccagcctcgcctgcactcccccacgccggcgtcggcgaccaagatctcgatccccatctcttcgagcgaggcggcgctgttcgggaagggtaggtacaaggtgtgggccctcgcggccatcgcgctcctagcgctctggtccatgttcgccgcctccgtcacgctgcgcttgtcctccgtcgatctcgccaccacgttcggggacgcgagcgatccgctcatcgacgaacttgatcccctggagatggagcaaagagaaaagctagtgcgccggatgtgggatgtgtacacacgcacagataatcatctatatctgagattgctcgcatgtcaatccataggcctgaggttgagcaatcgtcgaataaggattaggagatcagaggaacaggacagatatttggaagggtggaactggtacgctgaaggtgaagaacgttaaaaatggtgccgtcccatctaaagacggagttgcaaagtctgacccttagcgccgcagcaatttaaggagatgtttggtttgaataatcaatctattttagatgaggtgatgtatcataagttcattccacaaatttggtagaataaatttattcctcatattatgactaattattaacctatgaggaataaaattatggtggatcaacctattctattatttaaaccaaaagtaaggagtaagaagatggactatctcatttctcaaactaaacatctcat

SEQ ID NO: 211048 - DNA, 779 bp, Zea Mays
gcttttcgaatcctaagacttgggcccactgtcagcctcggtagatatcacactcactagtccactcccctcttcactcccgtcggtggattccatgtccaaccgcgtcgccggaggccggaaccatgaagcctgtcagtgtcgccgaacacaacaaccaccagcctcgcctgcactcccccacgccggcgtcggcgaccaagatctcgatccccatctcttcgagcgaggcggcgctgttcgggaagggtaggtacaaggtgtgggccctcgcggccatcgcgctcctagcgctctggtccatgttcgccgcctccgtcacgctgcgcttgtcctccgtcgatctcgccaccacgttcggggacgcgagcgatccgctcatcgacgaacttgatcccctggacgattagcagttagcaccatgctaaactgttaataaacagctacacttacatgaactttagtctccattggtgcaaggagatggagcaaagagaaaagctagtgcgccggatgtgggatgtgtacacacgcacagataatcatgtacggctaccacggttctggcaagaagcatttgaggctgcatatgaggagcttgctggtgatgatacgcttactactgatgcagctatatctgagattgctcgcatgtcaatccataggcctgaggttgagcaatcgtcgaataaggattaggtattcttccggaggtggtttccatttctcagtttgaagcaacgtccattggatcttttataattttgagctggttgaac

SEQ ID NO: 211049 - DNA, 2145 bp, Zea Mays
ctgagaaatccggcagctgcagctctccatgactgacttgagcgaggacgacgacgctacgactcctcgcctcctctagtcctaggaatagaatccttggcggcttggcctgcatgcagttggcgtatcttcattttatttatttatttatttatttattgtgtttgtgtatatataagggcggttatcatatcttggcgagtagcagctgcggacttgcgagcccaggcaggagaggactcgtccacatctattccttccttgttcggccgcccttcctcagttggtcgtcccctcttaccattacttctcctcctccctcgccccgtcggcgggcggccattgacgactggatccttcattcttgttctcaggggaaggacgacccaagacaggaggaggaggaggaggaggaggaggaggaggaggaggaggaggaggaggaggaggaggacagtgccgccatgaccggaggaggggaggagcaggggaggtcgctgttcggcgtgtctctgacaaacaggcctaggtggcagcagttcatgatctgctcctcgggcttcttcttcggctacctcgtcaatggcatctgcgaggagtacgtgtacaacaggcttcagttcagctacggctggtacttcacgtttgtgcaggggttcgtgtacctggcgctgatacggctgcaggggttcacggtgaagcagatggtgaacccgtggcggacctacgtgcgcctctcggcggtgctcatgggctccaatggcctcaccaagggatccctcgccttcctcaattaccctgcacagatcatgttcaagtcaaccaagatagcacagctatgaatgaaaagggagcacaagtagtgtacctggcatcaagatttgatgttttggttaggtgccaaactagccatctatgtcatgtctctctctactttaggggtacgaatactacatctctggctacagcgagaatagctaagccaagcaatttggactcttctttactgagatcgatataattaatgagatcgatataactgcaaacaagcattctgatctgaacagaaataccaagctgtatactaatccttcaggttctaccggtgatggtgatgggagccttcatccctggtctgaggcgcaagtacgcgttccaagagtacgtgtcggccgtgatgctcgtcgtcggcctcatactcttcacgctcgcggacgcgcagacgtcgcccaacttcagcatggccggcgtggccatggtgtccggggcgctcgtcatggatgctttccttggcaacctgcaagaagcaatcttcaagatgaacccggacacgactcagatggagatgctgttctgctccactgtcgttggccttccgttcctagcggtgcccatggtgttaacaggagagctcgtgacggcttggacttcctgctcccagcatctgtacgtgtacgcggtgctggtgttggaggcgatggccacgttcgtcggccaggtctccgtgctctccctcatcgcgcttttcggtgcagcaaccacagccatggtgacgacggcgaggaaggcggtgacgctgctgctgtcgtacctgatattcaccaagcccctcacggagcagcacgcgacggggctcctcctcataaccatgggcatcgtcatcaagctcctgccggagaacaaggagagacgcccgcgccggctgcccaagaatgacgacgacgacaagccccgggagagcagagaagcgggggaggaaacagcatgactgctgctatagacccgacacccgagcaaagcagaactgacgccagctcgatcagcaaccctagaagaaattctcagtcctccaaaacagcaatcccaggaggaggatgggatatacatgcaggatagagcactacatacagtaataataacctttttcctcgctcctcccctcgcttttctcatgtgctgtggttaatgttaattgtgcacttcgctctaacatcttaagctttttataaaggcaagggccagaggtctgaattctaattagcgcaatatctaaggtcttgttcagttattcctatcctatgtggattgtatgagattaaaaaaaatttataaaagattttgacttattcaggattgaaatccact

SEQ ID NO: 211050 - DNA, 1585 bp, Zea Mays
cacactttatttggcgcacttctattcttgccacataacttttcgcagcacttgtggttgccgattcggccgccacaaacttgagacccgccacacttctctagggcgccagcgccggccctagcacctccactgcaactcccttgatacttggaccaccggatctgatgctggctgtcgactgccattagaaggacttgttgcaagctgagggcaccaggagacccttgtttgctactgctcaagttcacaggatgcgttgaggattggaccaaggaaatgaggatgcaacacctcaaaagaagtcataaaaagatgcatagaattccaagactcaagaacaaaagaagcccaaagaaatcagcgaagaaacctgagaagagggctgtcagccagcgcctggtgacgcaccggacagtgcacagtacctgtgtggtgtgcaccggacagacggcaacggtcggatccaacggtcgactgctacagctgccaacgatcggctgacgtggcgtgcaccggacactccacagtagttgtcgggtggtgcaccggactgtccggtgcacccgacgacagaaagttgctgctttctgtccaacggctagtttggggtgtggaggctataaataccaccccaaccgaccattctctagtgtgggagcccaagcaacataccaagacacatagtgcatatttccaagagctcaaacacccaagtgcttaatagaatcactcggtgattagtgtaggtgctttgcgaagtgcttaggctagttagaccgctctagcgcttgctctaggtgaaccctagattgttgagtgagtttagacaaacctcacaacccctcggctcttgcgtgagccgtagtaattgtaccgagtggggcgagagtcttgcgagaccgtgacaaccgcgtttgtgtcacagccgccaccgtgtatcggagggaacgaggcccgcggcgtttcggccggaagctcgatagtggagacggcggggagcgtccgagaggagccggaagcggagcaccacttgcgcgtggagaaggcccgtggctctctacggagttactcgaccgaggtgcttggccctcgcgtgggcttccctttgcgtaggggcaccaacgaggattagttgggaccttgcgcggttccggatacctcggtaaaaataccggcgtcatccacgagagtttgcttctctactttgctctttaagtttccgcatttatattaagcatttaagtttcaatcttgtatacatacttatttagtgtagattgaaacttagccattgcggtagagatagcaacacttagacaaaacctagtttgcacattctagtttgattatttgcataggttttgctctagggatttaattgtggcctagtttagtaaaagttttagaagtcctaattcacccccctcttaggcgtcacccgtttcctacagagtgtacattttaattaccttgcattttttagatgggttcaaagaagatgtatcttgagtattgcaataactataatcaatacctacgaaggagaagggtgcttgttttcattaccatccgcattgtttca

SEQ ID NO: 211051 - DNA, 721 bp, Zea Mays
tgccacataacttttcgcagcacttgtggttgccgattcggccgccacaaacttgagacccgccacacttctctagggcgccagcgccggccctagcacctccactgcaactcccttgatacttggaccaccggatctgatgctggctgtcgactgccattagaaggacttgttgcaagctgagggcaccaggagacccttgtttgctactgctcaagttcacaggatgcgttgaggattggaccaaggaaatgaggatgcaacacctcaaaagaagtcataaaaagatgcatagaagtccaagactcaagaacaaaagaagcccaaagaaatcagcgaagaaacctgagaagagggctgtcagccagcgactggtgacgcaccggacagtgcatagtacctgtccggtgtgcaccggactgtccggtgggacaaccggacagtctgcgcagagaggccgaagtcaggcgctctcgggctgtagcaccggactgtccggtgtgcggcaacggtcagatccaacggtggactgctacagctgccaacggtcggctgacgtggcgtgcaccggacactccacagtagctgtccggtggtgcaccggactgtccggtgcacccgacgacagaagttgctgctttctgtccaacggctagtttggggtgtggaggctaataccaccccaaccggccattctctagtgtgggagcccaagcaacat

SEQ ID NO: 211052 - DNA, 2559 bp, Zea Mays
ccacttcctcgggggcccaccacaacatatcccccaattcccccttcccctccaacggccaacggctgctcctcctcctctcaggctctcacaccaatccccactctccctccttccgtaattgcgtctctcaccacctcggcaactccaatcccaaacggccacaccctagctggtctggtggcatcggccggcacacggcgatgcctgccacggtcttcgcctccccctccatcgccgcgtcgccgtcgccgtcgctgtctccgtggtccccacgtccgcctcctcgtcgcgtccacgtccgtgtccgcgtccgcccgcccccgccgagaagcggaagcagcgggggcgacgagccctctactgccaccccgtgggcgagccccgactggctcacgtctctctcgcgcgcggtcggccggagcggcggcgacgactcggggatccccgtcgcgtccgccaagctcgatgatgtgcgggacctcctcggcggcgcgctcttcctgccgctcttcaagtggttccgcgaggaagggcccgtgtaccgccttgccgcggggccacaggactttgtcatcgtcagcgaccccgccgtcgccaggcacgtgctgcgtgggtacggctcgcgctacgctaagggactagtcgctgaagtctccgagttcctcttcggctccggcttcgccatcgcagaaggcgacttatggacggtgagacgcagagctgttgtgccttccctgcacaaaagatttctgtccattatcgtggacaaggtattttgtaaatgtgctgagagactaatagacaaacttgagccatatgctttgagtggggaacctgtcaatatggaagcgaggttttctcagttgacattggatgtgattggtttatcattgttcaactacaattttgattccctcacaacagatagtcctgtcattgatgctgtttatactgcactcaaagaagcagagcttcgttctacagatcttttgccatactggaaggttggtttcttgtgcaagataatcccaagacagataaaagcagagaatgcggttatgattataaggaacactgttgaagagctgattatgaagtgtaaagaaatagtggaagctgaaaatgaacagattgagggtgaggaatatgtaaacgaaggggatcctagcattctacgcttcctacttgctagccgagatgaggtaagcagtgtacaattacgtgatgatctcttgtcaatgttagttgctggtcatgaaacaacaggctctgtactgacgtggacaatctatcttctcagtaaggatccgactgcactgaggagagctcaagatgaagtagatcgtgttctacaaggtagactacccaaatatgaggatgtaaaggagctgaagtacttgatgcgctgtataaatgagtctatgcggctgtatccacaccctcctgtgctgttacggcgtgcaatagttgatgatgttcttcctggaaactataaggttaaggctggtcaagatattatgatatctgtgtacaatatacacaggtccccagaggtttgggatagagcagatgagttcattccagagaggtttgatttagagggacctgttccaaatgagtcaaacacagatttcaggtttattccattcagtgggggtcctcggaaatgtgttggagatcaatttgctctcctagaagcaatagtggcacttgcagttgtgttgcagaagatggatatgcagcttgtgccagatcaaaagattaacatgactactggagctacaattcatacaaccagtggactatatatgaatgtaagcctgcgtaaagttcagcaagaagctgagttagcgctgagcgaatcgaaatagatggaaacgacttcagacaagaatagagctcctgaactggatacaatcatacaaatatgaaatatgcttctccagtttctcgttgaaagctctactgtactatactagatgtcaatgcgtcggcatacagattacagattcgcttctcttgaaacatgaaaggatccttcgctggctgattcgtttggctattcgtgagtgtaaaatttatcttaggctttatttagatactcaagtattgacctcaatcaacatgtgttgatgtggatttggatgtaattagttcaaattacacctaaatccatctcaatactcaatacatgtggatttaggtcaatactagaatatccaaactaggtcttagtggtaatccaagaccgaacagaaacatgtttctacttagctgacggcggcacaaatatagtattagtgctagtttgggaacttaaatcccctcagtgattggagggattgaaaaagaaattagtttattttcccctaatcttctctaatcatagaggagatttgagtttccgaactagcccttacatacacatattttgtctggttttctccccgaaacataaatccagttttaagcctcattcatttatttatacagtttcatgcatgcacccacagacgcactcacacaaaccacacatgcataaacagttgatttata

SEQ ID NO: 211053 - DNA, 2511 bp, Zea Mays
cccaattcccccttcccctccaacggccaacggctgctcctcctcctctcaggctctcacaccaatccccactctccctccttccgtaattgcgtctctcaccacctcggcaactccaatcccaaacggccacaccctagctggtctggtggcatcggccggcacacggcgatgcctgccacggtcttcgcctccccctccatcgccgcgtcgccgtcgccgtcgctgtctccgtggtccccacgtccgcctcctcgtcgcgtccacgtccgtgtccgcgtccgcccgcccccgccgagaagcggaagcagcgggggcgacgagccctctactgccaccccgtgggcgagccccgactggctcacgtctctctcgcgcgcggtcggccggagcggcggcgacgactcggggatccccgtcgcgtccgccaagctcgatgatgtgcgggacctcctcggcggcgcgctcttcctgccgctcttcaagtggttccgcgaggaagggcccgtgtaccgccttgccgcggggccacaggactttgtcatcgtcagcgaccccgccgtcgccaggcacgtgctgcgtgggtacggctcgcgctacgctaagggactagtcgctgaagtctccgagttcctcttcggctccggcttcgccatcgcagaaggcgacttatggacggtgagacgcagagctgttgtgccttccctgcacaaaagatttctgtccattatcgtggacaaggtattttgtaaatgtgctgagagactaatagacaaacttgagccatatgctttgagtggggaacctgtcaatatggaagcgaggttttctcagttgacattggatgtgattggtttatcattgttcaactacaattttgattccctcacaacagatagtcctgtcattgatgctgtttatactgcactcaaagaagcagagcttcgttctacagatcttttgccatactggaaggttggtttcttgtgcaagataatcccaagacagataaaagcagagaatgcggttatgattataaggaacactgttgaagagctgattatgaagtgtaaagaaatagtggaagctgaaaatgaacagattgagggtgaggaatatgtaaacgaaggggatcctagcattctacgcttcctacttgctagccgagatgaggtaagcagtgtacaattacgtgatgatctcttgtcaatgttagttgctggtcatgaaacaacaggctctgtactgacgtggacaatctatcttctcagtaaggatccgactgcactgaggagagctcaagatgaagtagatcgtgttctacaaggtagactacccaaatatgaggatgtaaaggagctgaagtacttgatgcgctgtataaatgagtctatgcggctgtgctgttacggcgtgcaatagttgatgatgttcttcctggaaactataaggttaaggctggtcaagatattatgatatctgtgtacaatatacacaggtccccagaggtttgggatagagcagatgagttcattccagagaggtttgatttagagggacctgttccaaatgagtcaaacacagatttcaggtttattccattcagtgggggtcctcggaaatgtgttggagatcaatttgctctcctagaagcaatagtggcacttgcagttgtgttgcagaagatggatatgcagcttgtgccagatcaaaagattaacatgactactggagctacaattcatacaaccagtggactatatatgaatgtaagcctgcgtaaagttcagcaagaagctgagttagcgctgagcgaatcgaaatagatggaaacgacttcagacaagaatagagctcctgaactggatacaatcatacaaatatgaaatatgcttctccagtttctcgttgaaagctctactgtactatactagatgtcaatgcgtcggcatacagattacagattcgcttctcttgaaacatgaaaggatccttcgctggctgattcgtttggctattcgtgagtgtaaaatttatcttaggctttatttagatactcaagtattgacctcaatcaacatgtgttgatgtggatttggatgtaattagttcaaattacacctaaatccatctcaatactcaatacatgtggatttaggtcaatactagaatatccaaactaggtcttagtggtaatccaagaccgaacagaaacatgtttctacttagctgacggcggcacaaatatagtattagtgctagtttgggaacttaaatcccctcagtgattggagggattgaaaaagaaattagtttattttcccctaatcttctctaatcatagaggagatttgagtttccgaactagcccttacatacacatattttgtctggttttctccccgaaacataaatccagttttaagcctcattcatttatttatacagtttcatgcatgcacccacagacgcactcacacaaaccacacatgcataaacagttgatttata

SEQ ID NO: 211054 - DNA, 2306 bp, Zea Mays
attcccccttcccctccaacggccaacggctgctcctcctcctctcaggctctcacaccaatccccactctccctccttccgtaattgcgtctctcaccacctcggcaactccaatcccaaacggccacaccctagctggtctggtggcatcggccggcacacggcgatgcctgccacggtcttcgcctccccctccatcgccgcgtcgccgtcgccgtcgctgtctccgtggtccccacgtccgcctcctcgtcgcgtccacgtccgtgtccgcgtccgcccgcccccgccgagaagcggaagcagcgggggcgacgagccctctactgccaccccgtgggcgagccccgactggctcacgtctctctcgcgcgcggtcggccggagcggcggcgacgactcggggatccccgtcgcgtccgccaagctcgatgatgtgcgggacctcctcggcggcgcgctcttcctgccgctcttcaagtggttccgcgaggaagggcccgtgtaccgccttgccgcggggccacaggactttgtcatcgtcagcgaccccgccgtcgccaggcacgtgctgcgtgggtacggctcgcgctacgctaagggactagtcgctgaagtctccgagttcctcttcggctccggcttcgccatcgcagaaggcgacttatggacgatagtcctgtcattgatgctgtttatactgcactcaaagaagcagagcttcgttctacagatcttttgccatactggaaggttggtttcttgtgcaagataatcccaagacagataaaagcagagaatgcggttatgattataaggaacactgttgaagagctgattatgaagtgtaaagaaatagtggaagctgaaaatgaacagattgagggtgaggaatatgtaaacgaaggggatcctagcattctacgcttcctacttgctagccgagatgaggtaagcagtgtacaattacgtgatgatctcttgtcaatgttagttgctggtcatgaaacaacaggctctgtactgacgtggacaatctatcttctcagtaaggatccgactgcactgaggagagctcaagatgaagtagatcgtgttctacaaggtagactacccaaatatgaggatgtaaaggagctgaagtacttgatgcgctgtataaatgagtctatgcggctgtatccacaccctcctgtgctgttacggcgtgcaatagttgatgatgttcttcctggaaactataaggttaaggctggtcaagatattatgatatctgtgtacaatatacacaggtccccagaggtttgggatagagcagatgagttcattccagagaggtttgatttagagggacctgttccaaatgagtcaaacacagatttcaggtttattccattcagtgggggtcctcggaaatgtgttggagatcaatttgctctcctagaagcaatagtggcacttgcagttgtgttgcagaagatggatatgcagcttgtgccagatcaaaagattaacatgactactggagctacaattcatacaaccagtggactatatatgaatgtaagcctgcgtaaagttcagcaagaagctgagttagcgctgagcgaatcgaaatagatggaaacgacttcagacaagaatagagctcctgaactggatacaatcatacaaatatgaaatatgcttctccagtttctcgttgaaagctctactgtactatactagatgtcaatgcgtcggcatacagattacagattcgcttctcttgaaacatgaaaggatccttcgctggctgattcgtttggctattcgtgagtgtaaaatttatcttaggctttatttagatactcaagtattgacctcaatcaacatgtgttgatgtggatttggatgtaattagttcaaattacacctaaatccatctcaatactcaatacatgtggatttaggtcaatactagaatatccaaactaggtcttagtggtaatccaagaccgaacagaaacatgtttctacttagctgacggcggcacaaatatagtattagtgctagtttgggaacttaaatcccctcagtgattggagggattgaaaaagaaattagtttattttcccctaatcttctctaatcatagaggagatttgagtttccgaactagcccttacatacacatattttgtctggttttctccccgaaacataaatccagttttaagcctcattcatttatttatacagtttcatgcatgcacccacagacgcactcacacaaaccacacatgcataaacagttgatttata

SEQ ID NO: 211055 - DNA, 2445 bp, Zea Mays
cctctcaggctctcacaccaatccccactctccctccttccgtaattgcgtctctcaccacctcggcaactccaatcccaaacggccacaccctagctggtctggtggcatcggccggcacacggcgatgcctgccacggtcttcgcctccccctccatcgccgcgtcgccgtcgccgtcgctgtctccgtggtccccacgtccgcctcctcgtcgcgtccacgtccgtgtccgcgtccgcccgcccccgccgagaagcggaagcagcgggggcgacgagccctctactgccaccccgtgggcgagccccgactggctcacgtctctctcgcgcgcggtcggccggagcggcggcgacgactcggggatccccgtcgcgtccgccaagctcgatgatgtgcgggacctcctcggcggcgcgctcttcctgccgctcttcaagtggttccgcgaggaagggcccgtgtaccgccttgccgcggggccacaggactttgtcatcgtcagcgaccccgccgtcgccaggcacgtgctgcgtgggtacggctcgcgctacgctaagggactagtcgctgaagtctccgagttcctcttcggctccggcttcgccatcgcagaaggcgacttatggacggtgagacgcagagctgttgtgccttccctgcacaaaagatttctgtccattatcgtggacaaggtattttgtaaatgtgctgagagactaatagacaaacttgagccatatgctttgagtggggaacctgtcaatatggaagcgaggttttctcagttgacattggatgtgattggtttatcattgttcaactacaattttgattccctcacaacagatagtcctgtcattgatgctgtttatactgcactcaaagaagcagagcttcgttctacagatcttttgccatactggaaggttggtttcttgtgcaagataatcccaagacagataaaagcagagaatgcggttatgattataaggaacactgttgaagagctgattatgaagtgtaaagaaatagtggaagctgaaaatgaacagattgagggtgaggaatatgtaaacgaaggggatcctagcattctacgcttcctacttgctagccgagatgaggtaagcagtgtacaattacgtgatgatctcttgtcaatgttagttgctggtcatgaaacaacaggctctgtactgacgtggacaatctatcttctcagtaaggatccgactgcactgaggagagctcaagatgaagtagatcgtgttctacaaggtagactacccaaatatgaggatgtaaaggagctgaagtacttgatgcgctgtgctgttacggcgtgcaatagttgatgatgttcttcctggaaactataaggttaaggctggtcaagatattatgatatctgtgtacaatatacacaggtccccagaggtttgggatagagcagatgagttcattccagagaggtttgatttagagggacctgttccaaatgagtcaaacacagatttcaggtttattccattcagtgggggtcctcggaaatgtgttggagatcaatttgctctcctagaagcaatagtggcacttgcagttgtgttgcagaagatggatatgcagcttgtgccagatcaaaagattaacatgactactggagctacaattcatacaaccagtggactatatatgaatgtaagcctgcgtaaagttcagcaagaagctgagttagcgctgagcgaatcgaaatagatggaaacgacttcagacaagaatagagctcctgaactggatacaatcatacaaatatgaaatatgcttctccagtttctcgttgaaagctctactgtactatactagatgtcaatgcgtcggcatacagattacagattcgcttctcttgaaacatgaaaggatccttcgctggctgattcgtttggctattcgtgagtgtaaaatttatcttaggctttatttagatactcaagtattgacctcaatcaacatgtgttgatgtggatttggatgtaattagttcaaattacacctaaatccatctcaatactcaatacatgtggatttaggtcaatactagaatatccaaactaggtcttagtggtaatccaagaccgaacagaaacatgtttctacttagctgacggcggcacaaatatagtattagtgctagtttgggaacttaaatcccctcagtgattggagggattgaaaaagaaattagtttattttcccctaatcttctctaatcatagaggagatttgagtttccgaactagcccttacatacacatattttgtctggttttctccccgaaacataaatccagttttaagcctcattcatttatttatacagtttcatgcatgcacccacagacgcactcacacaaaccacacatgcataaacagttgatttata

SEQ ID NO: 211056 - DNA, 2097 bp, Zea Mays
cctctcaggctctcacaccaatccccactctccctccttccgtaattgcgtctctcaccacctcggcaactccaatcccaaacggccacaccctagctggtctggtggcatcggccggcacacggcgatgcctgccacggtcttcgcctccccctccatcgccgcgtcgccgtcgccgtcgctgtctccgtggtccccacgtccgcctcctcgtcgcgtccacgtccgtgtccgcgtccgcccgcccccgccgagaagcggaagcagcgggggcgacgagccctctactgccaccccgtgggcgagccccgactggctcacgtctctctcgcgcgcggtcggccggagcggcggcgacgactcggggatccccgtcgcgtccgccaagctcgatgatgtgcgggacctcctcggcggcgcgctcttcctgccgctcttcaagtggttccgcgaggaagggcccgtgtaccgccttgccgcggggccacaggactttgtcatcgtcagcgaccccgccgtcgccaggcacgtgctgcgtgggtacggctcgcgctacgctaagggactagtcgctgaagtctccgagttcctcttcggctccggcttcgccatcgcagaaggcgacttatggacggttggtttcttgtgcaagataatcccaagacagataaaagcagagaatgcggttatgattataaggaacactgttgaagagctgattatgaagtgtaaagaaatagtggaagctgaaaatgaacagattgagggtgaggaatatgtaaacgaaggggatcctagcattctacgcttcctacttgctagccgagatgaggtaagcagtgtacaattacgtgatgatctcttgtcaatgttagttgctggtcatgaaacaacaggctctgtactgacgtggacaatctatcttctcagtaaggatccgactgcactgaggagagctcaagatgaagtagatcgtgttctacaaggtgctgttacggcgtgcaatagttgatgatgttcttcctggaaactataaggttaaggctggtcaagatattatgatatctgtgtacaatatacacaggtccccagaggtttgggatagagcagatgagttcattccagagaggtttgatttagagggacctgttccaaatgagtcaaacacagatttcaggtttattccattcagtgggggtcctcggaaatgtgttggagatcaatttgctctcctagaagcaatagtggcacttgcagttgtgttgcagaagatggatatgcagcttgtgccagatcaaaagattaacatgactactggagctacaattcatacaaccagtggactatatatgaatgtaagcctgcgtaaagttcagcaagaagctgagttagcgctgagcgaatcgaaatagatggaaacgacttcagacaagaatagagctcctgaactggatacaatcatacaaatatgaaatatgcttctccagtttctcgttgaaagctctactgtactatactagatgtcaatgcgtcggcatacagattacagattcgcttctcttgaaacatgaaaggatccttcgctggctgattcgtttggctattcgtgagtgtaaaatttatcttaggctttatttagatactcaagtattgacctcaatcaacatgtgttgatgtggatttggatgtaattagttcaaattacacctaaatccatctcaatactcaatacatgtggatttaggtcaatactagaatatccaaactaggtcttagtggtaatccaagaccgaacagaaacatgtttctacttagctgacggcggcacaaatatagtattagtgctagtttgggaacttaaatcccctcagtgattggagggattgaaaaagaaattagtttattttcccctaatcttctctaatcatagaggagatttgagtttccgaactagcccttacatacacatattttgtctggttttctccccgaaacataaatccagttttaagcctcattcatttatttatacagtttcatgcatgcacccacagacgcactcacacaaaccacacatgcataaacagttgatttata

SEQ ID NO: 211057 - DNA, 2499 bp, Zea Mays
cctctcaggctctcacaccaatccccactctccctccttccgtaattgcgtctctcaccacctcggcaactccaatcccaaacggccacaccctagctggtctggtggcatcggccggcacacggcgatgcctgccacggtcttcgcctccccctccatcgccgcgtcgccgtcgccgtcgctgtctccgtggtccccacgtccgcctcctcgtcgcgtccacgtccgtgtccgcgtccgcccgcccccgccgagaagcggaagcagcgggggcgacgagccctctactgccaccccgtgggcgagccccgactggctcacgtctctctcgcgcgcggtcggccggagcggcggcgacgactcggggatccccgtcgcgtccgccaagctcgatgatgtgcgggacctcctcggcggcgcgctcttcctgccgctcttcaagtggttccgcgaggaagggcccgtgtaccgccttgccgcggggccacaggactttgtcatcgtcagcgaccccgccgtcgccaggcacgtgctgcgtgggtacggctcgcgctacgctaagggactagtcgctgaagtctccgagttcctcttcggctccggcttcgccatcgcagaaggcgacttatggacggtgagacgcagagctgttgtgccttccctgcacaaaagatttctgtccattatcgtggacaaggtattttgtaaatgtgctgagagactaatagacaaacttgagccatatgctttgagtggggaacctgtcaatatggaagcgaggttttctcagttgacattggatgtgattggtttatcattgttcaactacaattttgattccctcacaacagatagtcctgtcattgatgctgtttatactgcactcaaagaagcagagcttcgttctacagatcttttgccatactggaaggttggtttcttgtgcaagataatcccaagacagataaaagcagagaatgcggttatgattataaggaacactgttgaagagctgattatgaagtgtaaagaaatagtggaagctgaaaatgaacagattgagggtgaggaatatgtaaacgaaggggatcctagcattctacgcttcctacttgctagccgagatgaggtaagcagtgtacaattacgtgatgatctcttgtcaatgttagttgctggtcatgaaacaacaggctctgtactgacgtggacaatctatcttctcagtaagtgttacactactgaaggatccgactgcactgaggagagctcaagatgaagtagatcgtgttctacaaggtagactacccaaatatgaggatgtaaaggagctgaagtacttgatgcgctgtataaatgagtctatgcggctgtatccacaccctcctgtgctgttacggcgtgcaatagttgatgatgttcttcctggaaactataaggttaaggctggtcaagatattatgatatctgtgtacaatatacacaggtccccagaggtttgggatagagcagatgagttcattccagagaggtttgatttagagggacctgttccaaatgagtcaaacacagatttcaggtttattccattcagtgggggtcctcggaaatgtgttggagatcaatttgctctcctagaagcaatagtggcacttgcagttgtgttgcagaagatggatatgcagcttgtgccagatcaaaagattaacatgactactggagctacaattcatacaaccagtggactatatatgaatgtaagcctgcgtaaagttcagcaagaagctgagttagcgctgagcgaatcgaaatagatggaaacgacttcagacaagaatagagctcctgaactggatacaatcatacaaatatgaaatatgcttctccagtttctcgttgaaagctctactgtactatactagatgtcaatgcgtcggcatacagattacagattcgcttctcttgaaacatgaaaggatccttcgctggctgattcgtttggctattcgtgagtgtaaaatttatcttaggctttatttagatactcaagtattgacctcaatcaacatgtgttgatgtggatttggatgtaattagttcaaattacacctaaatccatctcaatactcaatacatgtggatttaggtcaatactagaatatccaaactaggtcttagtggtaatccaagaccgaacagaaacatgtttctacttagctgacggcggcacaaatatagtattagtgctagtttgggaacttaaatcccctcagtgattggagggattgaaaaagaaattagtttattttcccctaatcttctctaatcatagaggagatttgagtttccgaactagcccttacatacacatattttgtctggttttctccccgaaacataaatccagttttaagcctcattcatttatttatacagtttcatgcatgcacccacagacgcactcacacaaaccacacatgcataaacagttgatttata

SEQ ID NO: 211058 - DNA, 2478 bp, Zea Mays
cctctcaggctctcacaccaatccccactctccctccttccgtaattgcgtctctcaccacctcggcaactccaatcccaaacggccacaccctagctggtctggtggcatcggccggcacacggcgatgcctgccacggtcttcgcctccccctccatcgccgcgtcgccgtcgccgtcgctgtctccgtggtccccacgtccgcctcctcgtcgcgtccacgtccgtgtccgcgtccgcccgcccccgccgagaagcggaagcagcgggggcgacgagccctctactgccaccccgtgggcgagccccgactggctcacgtctctctcgcgcgcggtcggccggagcggcggcgacgactcggggatccccgtcgcgtccgccaagctcgatgatgtgcgggacctcctcggcggcgcgctcttcctgccgctcttcaagtggttccgcgaggaagggcccgtgtaccgccttgccgcggggccacaggactttgtcatcgtcagcgaccccgccgtcgccaggcacgtgctgcgtgggtacggctcgcgctacgctaagggactagtcgctgaagtctccgagttcctcttcggctccggcttcgccatcgcagaaggcgacttatggacggtgagacgcagagctgttgtgccttccctgcacaaaagatttctgtccattatcgtggacaaggtattttgtaaatgtgctgagagactaatagacaaacttgagccatatgctttgagtggggaacctgtcaatatggaagcgaggttttctcagttgacattggatgtgattggtttatcattgttcaactacaattttgattccctcacaacagatagtcctgtcattgatgctgtttatactgcactcaaagaagcagagcttcgttctacagatcttttgccatactggaaggttggtttcttgtgcaagataatcccaagacagataaaagcagagaatgcggttatgattataaggaacactgttgaagagctgattatgaagtgtaaagaaatagtggaagctgaaaatgaacagattgagggtgaggaatatgtaaacgaaggggatcctagcattctacgcttcctacttgctagccgagatgaggtaagcagtgtacaattacgtgatgatctcttgtcaatgttagttgctggtcatgaaacaacaggctctgtactgacgtggacaatctatcttctcagatccgactgcactgaggagagctcaagatgaagtagatcgtgttctacaaggtagactacccaaatatgaggatgtaaaggagctgaagtacttgatgcgctgtataaatgagtctatgcggctgtatccacaccctcctgtgctgttacggcgtgcaatagttgatgatgttcttcctggaaactataaggttaaggctggtcaagatattatgatatctgtgtacaatatacacaggtccccagaggtttgggatagagcagatgagttcattccagagaggtttgatttagagggacctgttccaaatgagtcaaacacagatttcaggtttattccattcagtgggggtcctcggaaatgtgttggagatcaatttgctctcctagaagcaatagtggcacttgcagttgtgttgcagaagatggatatgcagcttgtgccagatcaaaagattaacatgactactggagctacaattcatacaaccagtggactatatatgaatgtaagcctgcgtaaagttcagcaagaagctgagttagcgctgagcgaatcgaaatagatggaaacgacttcagacaagaatagagctcctgaactggatacaatcatacaaatatgaaatatgcttctccagtttctcgttgaaagctctactgtactatactagatgtcaatgcgtcggcatacagattacagattcgcttctcttgaaacatgaaaggatccttcgctggctgattcgtttggctattcgtgagtgtaaaatttatcttaggctttatttagatactcaagtattgacctcaatcaacatgtgttgatgtggatttggatgtaattagttcaaattacacctaaatccatctcaatactcaatacatgtggatttaggtcaatactagaatatccaaactaggtcttagtggtaatccaagaccgaacagaaacatgtttctacttagctgacggcggcacaaatatagtattagtgctagtttgggaacttaaatcccctcagtgattggagggattgaaaaagaaattagtttattttcccctaatcttctctaatcatagaggagatttgagtttccgaactagcccttacatacacatattttgtctggttttctccccgaaacataaatccagttttaagcctcattcatttatttatacagtttcatgcatgcacccacagacgcactcacacaaaccacacatgcataaacagttgatttata

SEQ ID NO: 211059 - DNA, 3733 bp, Zea Mays
gggccagtcactgtcttgaattgcagaagcagcagactcaggcaccaatatcttctctctccctctcaccaatatgttctaaatcagcagaagcagctgatcgatttactcaccaatatgttctctccccctctcaccctagggtatgccctgtctgccctgctgtatcctcatctgcgctgcgggagccagtaaagggcacaggaggagttcttgtggcgtactgcagcttctcctcgtcctccctaactcttgtttgttagcggctaatttcagagcttttgttggcaactgggggaaccatagtgcgggggttcctcgcccccctctttccatgggagcttagaagctgttggatctctgcaagtgaccatgagccagagttttgacatcaacgtacttcgtgaagaagcaaggagtaggtggttaaagccttctgaagtgtactatatcttgcagaatcacgagaggttccctatcacccatgaggcaccaaagaagccacccagtggttccctattcctttacaatcgtcgtgtcaatcggtatttccggagagatggtcacacatggcggaggaagaaggatggaagaacagttggggaggctcatgaacgactgaaggttggaaatgttgattctttgagctgctattacgctcatggggagcaaaatccatgtttccagagacggtgtttctggatgttggaacctgcatatgaacacattgtgctggtacaatacagagaggttgctgagggcagatattattcatcacaactatcaaatggccccccagaacctctttcatccttgggatatccaaatgccatctgtggaaaccaataccacagatccacttctggcactagtgagggcagtgagtcccatcagagctattccaatttgagttctgtaactgaagtaagttcctattccggtaacaaggagtacaacaaaaatgatggcagtttactaagcataccagaggttggacacacttgtcaacaaaatcagactggtaatggtaactcaaaaaataaatctgagcttaatatggctttaaagaagatagctgagcagttaagtttgggtgaagatgatgatgatgactatatttactcaaatcaaactcattccatgggaggtgacaaccaaataaaacaaattcgacaagaaggaacacagaaaggtttgagtaggaatatagcaccatcatgggaagatgtactgcactccagttcaggtttaccaacttcatccatataccagcaatctgatgtcaagtatcagaaaaaatcagaataccagccaccggaaatcctggacagcagtgatttgcgcatacaactttctgctactaaaaggtttcttttaggaccagaagccagcattgactcaccatctttgaactctgtgctgagaaacagagtcaacagtgtaactgataccatttcagcttatgacagtagatttgaaagctctctgaacccagattggcaaacaaaaacagcattaacatttcaaagcaattctcagggctctgaaataacggagttgtttgaccatgatcattttgaaccctactccagagaagatacaacaatttccttaggacagacaaacaagtttaacattcgtgaggtctctccagaatgggcattttcctatgagatcaccaaggtcatcattacgggagattttctgtgtgatccatcgaatttgtgttgggctgtgatgtttggtgacaatgaggtacccgttgaaatagttcagccaggtgttctccgctgtcacacaccactgcacagcaatgggaatctcagaatctgcattacttcgggaaacagagaagtttgtagtgaattcaaagactttgagttccgctcaaaaccaacctcttctagtttcacagacattgcaccatcttctagacatctgaaatccagtgaagagttattacttcttgcaaaatttgctagaatgcttttgtctgggaatggaaaccgtgaagttccagatggtgatccccaatctggacagtgtccaaaacttaagacgaacgaagagctctgggataggttgattaacgaacttaaagtagggtgtgaaaatccattaagctcggttgattggattgtggagcaactgctgaaaagtaatctacaacagtggttatcagtgaagctcagaggattcaatggaacggattttttatccaagcaagagcagggtattatacacttaatctctgccctaggctatgagtgggcattgtctccagttctcagtgctggtgttggtctaaattttcgtgattcaaatggatggactgctcttcattgggctgcttattttggaagggaaaagatggttgctgcacttcttgctgctggtgcatcggcaacagcagttactgatcccactgcacaagacccagtgggtaaaacagcagctttcctggcttctgaacgagggcatacgggacttgcaggttatctttctgaagtgtcgctaactagctatcttgcatcactcactatagaagaaagtgatgtctcaaaaggatcagctgaagttgaagcagagagagctgtggaaggcatatctcagaggaatgcccaacggcatggtggcacagaagatgagctatcaatgaaggattctttggcggcagtgaggaatgcagctcaagcagcagctcgcatccagaatgctttccgtgccttctctttcaggaagagacagcagaagactgctcgacttagggatgtgtatggaatgacccaagaggatatagatgaacttgcagctgcatcaaggttgtaccaccaagctcatgcttcaagtggtcagttttatgatagagcagctgtttcgattcagaagaaatacaaaggatggaaaggtcgcaaacattttctcaacatgagaagaaatgcagttaaaatacaggctcatgtaagaggccatcaagtgagaaagaaatacagaacaattgtaagcactgtcagtgtgctagagaaagtaatacttcggtggcgccggaaaggtcatggcctacgtggcttccgagctgagcagcaaccaatggtcgaagcaatagaggaagatgatgaggaagacgacgatttcgatgatgatgaagcagtcaaggtcttccgtcggcagaaggtcgatcaagctgtaaaagaggctgtgtcaagggtgctgtccatggtagactctaccgaagcgaggatgcaatatcgacgaatgcttgaggagtttcgccaggcaactaattggaaggatcaaatgaagtgacatcaatatttgacagtgacttagagttattagggatcaacaatttcatgtaaagagcatttcggtttcaagatctgagcaatgacataaattaagtatctacggaatgggtttcacctgctactaactaggacctgataatggtcgtcagtttatacagtgtttacgaaatggaaagtagattattgctgctatgatgtattgccactctatatttaggtgtattttcccagtggcagttcaatgaacactacattgtggtgtttgtaacttttaataccccgtttggatgtagatattagagtacaaaattgaaaattagaatcagctttccaaaattctgatgtttgattgcacatagaattgagatttagaatcagagactcaattccctgaaattgaactataactagaaattcagcttttc

SEQ ID NO: 211060 - DNA, 640 bp, Zea Mays
aatggagtgagcaacgagggttgggttcggcagcagcgagggaaaagccaaagccccccagggcagcaggaagcaatagaagcgagcgaggcagcggcgtggggcgaggagtggaggacaccgatccccgccggagagcgcgtccatcccaaatggcgactgcagcttcgcccgccgctgcctttccccacatcctctccctctcctcctaatcccctcccaatccccccctctctctctcttcctcgccagctggttcgttccgcacccgccgccgcattgggtgccgaggagggacgcaatggagcagtacgagaaggtggagaagatcggggagggcacgtacggggtggtgtacaaggcgctggacaaggccaccaacgagacgatcgcgctcaagaagatccgcctcgagcaggaggacgagggcgtcccgtccaccgccatccgcgagatctctctcctcaaggagatgaaccacggcaacatcgtcaggttacatgatgttgtccacagcgagaagcggatatacctcgtcttcgagtacctggatctggacctcaagaagttcatggactcttgcccggagtttgctaagaatcccactttgattaagggcacatggttttatctcctcaag

SEQ ID NO: 211061 - DNA, 647 bp, Zea Mays
ctttgaccgtatgtctgacgacgacgacgtccaaggctcccagcactccagcagggtgggtggcggaggaggaccacatcgtcaacttcccaaccgtgcggctcaagcgaggcatgcccgtcaggctcaccagcaaagactagctagctagtcactacgacctgcttgtgcatgccatgcatgcagatttcagtcacgtcatatgcaatatatattggaccctggaggttgcacgtgtacagaagagaggatgcaggagctagcagatgatcggaggtatttaggcagactgaaattgaatcgaccgcgaagagtagcacactactataccacgagtatgatctgtagtagtagtaataagaggaatataatatcattagtgtggtagtatttacttattatactactctctcttttcgtttttatttatcgtgttttagtttaaaaatgaactagcgaggttagtcaataggcgtgcatgcatggcccatcatggtcatggatatataggccttgatggttatactagtataagcagtagtgttatgtcacaagggattactgggatctgggatgatgatccacaatcccatctaaaacgaaaagagttaataaagattgttaagtttactgctgggagcctggga

SEQ ID NO: 211062 - DNA, 1016 bp, Zea Mays
cgcgtctttactgttagagaacaagggaggagaacatgcagctgaagaggcggaaaaccgacgtgggagagaccttgcagtggacggactacatgtcactgtcgttcacacaacatgtgataacggagacactgcggatggggaatatcatcaacgggatcatgcgcaaagcggtgcgggacgtggaggtgaaggggcacctcatccccaagggctggtgcgtgttcgtgtacttccggtcggtccacctcgacgacaagcgctacgacgagccctacaggttcaacccgtggaggtggaaggagaaggacacgagcaccatgggcttcaccccttttggcggtgggcagaggctgtgcccaggcctggatctggccaggctggaagcttccatctttctccatcacctggtgaccagcttcaggtgggtggcggaggaggaccacatcgtcaacttcccaaccgtgcggctcaagcgaggcatgcccgtcaggctcaccagcaaagactagctagctagtcactacgacctgcttgtgcatgccatgcatgcagatttcagtcacgtcatatgcaatatatattggaccctggaggttgcacgtgtacagaagagaggatgcaggagctagcagatgatcggaggtatttaggcagactgaaattgaatcgaccgcgaagagtagcacactactataccacgagtatgatctgtagtagtagtaataagaggaatataatatcattagtgtggtagtatttacttattatactactctctcttttcgtttttatttatcgtgttttagtttaaaaatgaactagcgaggttagtcaataggcgtgcatgcatggcccatcatggtcatggatatataggccttgatggttatactagtataagcagtagtgttatgtcacaagggattactgggatctgggatgatgatccacaatcccatctaaaacgaaaagagttaataaagattgttaagtttactgctgggagcctggga

SEQ ID NO: 211063 - DNA, 2179 bp, Zea Mays
cggctctccaccacttctctactctgtgcggctgtgcctgtcgtctctccctctctcctcgcctgtagtatgtagtgtactttctgcacttgccgattcgattccatgcttccattgacgccacgaccacgctacatataagtggcgtctgcggtgcctctcctccgaccctcgtcctcgtcctcgcgcagcctctgcttccatataactcgctcactgctcgcgcgcctcggtgggtgcaaacgcgcacagggacagaaacagagacagagccagccatgtcgaccaccaccctgcagctggttccgtggccgccggagccggcgccttcgggtggccgctggtgggcgagacgctggacttcgtgtcctgcgcctactcctcccgcccggaggccttcgtcgacaagcgccgcctgctgcacgggagcgcggtgttccggtcgcacctgttcggctcggcgacggtggtgacgtcggacgcggaggtgagccggttcgtgctgcacagcgacgcgcgcgccttcgtgccctggtacccgcggtcgctgacggagctcatgggcgagtcctccatcctgctcatcaacggcagcctgcagcggcgcgtgcacggcctcgtcggcgccttcttcaagtcgccgcagctcaaggcgcaggtcaccgccgacatgcagcgccgcctcgcgcccgcgctcgccgcctggaaggttcggtgcgcctccgcgccgccgctccgcatccaggaccacgccaagacgatcgtgttcgagatcctggtgaggggtctgatcgggctggaggcaggcccggagatgcagcagctcaagcaccagttccaggaattcattgtcggcctcatgtccctccccatcaagctgccggggactaggctctacaggtccctccaggccaagaagaggatggccacgctgatacaggggatcatacaggagaagaggcggcggcggagggccgcccttgaggatggcggagagggcgagggcgaggccggtcccccgcgcgacgtcatcgacgtgctcataagcggcggcgacgagctcaccgacgagctcatatccgacaacatgatcgacctgatgatccccgccgaggactctgtgcccgtgctcatcacgctcgccgtcaagtatctcagcgagtgcccgcttgctctgcaacaacttgaggaggagaacatgcagctgaagaggcggaaaaccgacgtgggagagaccttgcagtggacggactacatgtcactgtcgttcacacaacatgtgataacggagacactgcggatggggaatatcatcaacgggatcatgcgcaaagcggtgcgggacgtggaggtgaaggggcacctcatccccaagggctggtgcgtgttcgtgtacttccggtcggtccacctcgacgacaagcgctacgacgagccctacaggttcaacccgtggaggtggaaggagaaggacacgagcaccatgggcttcaccccttttggcggtgggcagaggctgtgcccaggcctggatctggccaggctggaagcttccatctttctccatcacctggtgaccagcttcaggtgggtggcggaggaggaccacatcgtcaacttcccaaccgtgcggctcaagcgaggcatgcccgtcaggctcaccagcaaagactagctagctagtcactacgacctgcttgtgcatgccatgcatgcagatttcagtcacgtcatatgcaatatatattggaccctggaggttgcacgtgtacagaagagaggatgcaggagctagcagatgatcggaggtatttaggcagactgaaattgaatcgaccgcgaagagtagcacactactataccacgagtatgatctgtagtagtagtaataagaggaatataatatcattagtgtggtagtatttacttattatactactctctcttttcgtttttatttatcgtgttttagtttaaaaatgaactagcgaggttagtcaataggcgtgcatgcatggcccatcatggtcatggatatataggccttgatggttatactagtataagcagtagtgttatgtcacaagggattactgggatctgggatgatgatccacaatcccatctaaaacgaaaagagttaataaagattgttaagtttactgctgggagcctggga

SEQ ID NO: 211064 - DNA, 1468 bp, Zea Mays
tggcacctcccacatctgcactttactatcgtcggcttcaaattttcagatcgtgttcgagatcctggtgaggggtctgatcgggctggaggcaggcccggagatgcagcagctcaagcaccagttccaggaattcattgtcggcctcatgtccctccccatcaagctgccggggactaggctctacaggtccctccaggccaagaagaggatggccacgctgatacaggggatcatacaggagaagaggcggcggcggagggccgcccttgaggatggcggagagggcgagggcgaggccggtcccccgcgcgacgtcatcgacgtgctcataagcggcggcgacgagctcaccgacgagctcatatccgacaacatgatcgacctgatgatccccgccgaggactctgtgcccgtgctcatcacgctcgccgtcaagtatctcagcgagtgcccgcttgctctgcaacaacttgaggaggagaacatgcagctgaagaggcggaaaaccgacgtgggagagaccttgcagtggacggactacatgtcactgtcgttcacacaacatgtgataacggagacactgcggatggggaatatcatcaacgggatcatgcgcaaagcggtgcgggacgtggaggtgaaggggcacctcatccccaagggctggtgcgtgttcgtgtacttccggtcggtccacctcgacgacaagcgctacgacgagccctacaggttcaacccgtggaggtggaaggagaaggacacgagcaccatgggcttcaccccttttggcggtgggcagaggctgtgcccaggcctggatctggccaggctggaagcttccatctttctccatcacctggtgaccagcttcaggtgggtggcggaggaggaccacatcgtcaacttcccaaccgtgcggctcaagcgaggcatgcccgtcaggctcaccagcaaagactagctagctagtcactacgacctgcttgtgcatgccatgcatgcagatttcagtcacgtcatatgcaatatatattggaccctggaggttgcacgtgtacagaagagaggatgcaggagctagcagatgatcggaggtatttaggcagactgaaattgaatcgaccgcgaagagtagcacactactataccacgagtatgatctgtagtagtagtaataagaggaatataatatcattagtgtggtagtatttacttattatactactctctcttttcgtttttatttatcgtgttttagtttaaaaatgaactagcgaggttagtcaataggcgtgcatgcatggcccatcatggtcatggatatataggccttgatggttatactagtataagcagtagtgttatgtcacaagggattactgggatctgggatgatgatccacaatcccatctaaaacgaaaagagttaataaagattgttaagtttactgctgggagcctggga

SEQ ID NO: 211065 - DNA, 2274 bp, Zea Mays
tatttccaggaaaacgttttctgggcctcgtctcgactgaaactcttcgagccttcgacgtgcctctcctccgctcgtggccaccgatttcactggcttcatttcgaatcataaatttcatctcctggagtgttgctttgcttgctcctggaatcttcggaaccgaaggccaccgcgccaaccgcccaattaccgaaccaaaccctaccggtcgcggctcctccatagtccatactctcgcgcgcctaaaccctagccatcctcctcgccgccggcgaccgccgccatgagccgctacgacggccgcgctgcggacgcgggctcctaccgcgaccgccgcagcgagggggcgttcggaggcgggtcgagggcgttctcggcgccgagcaaggcggacgcttccgcggcggcctcggagctagatgggctgccgcgcttcgagaagaacttctacgtggagtcacccgcggtggccggcatgacggaggaagaggtggaggcgtaccgccgccgccgggagatcaccgtcgacggccgcgacgtgcccaagccggtgcgtgagttccgtgatgtgggcttcccagaatatgtgttgcaagagatcacaaaagctggttttgtggaacctacccctatccaatcgcaaggttggccgatggcattgagaggccgcgaccttattggcattgcagagacaggatcagggaaaactcttgcttaccttttacctgccattgttcatgtgaatgcgcagcctattctttcccctggcgatggtccaattgtcttggtgttagctcctacacgtgaacttgctgttcagatacagcaagaagcaaccaagtttggtgcatcatcaaagataaaaagtacttgcatatatggtggtgtgccaaaaggtccacaagttcgtgatcttcaaaaaggtgttgaaattgttatagctacaccaggacgactaattgatatgattgaatcacatcatacaaacttgcgaagggtcacatatcttgttttagatgaagcagaccggatgctagacatgggatttgaacctcagattaagaaaattgtttctcagattcgtccagatcgccaaacactttactggagtgctacctggccgaaggaagttgagcagctagcaaggaatttcctttttgacccatacaaggtcactattggttctgaagacttgaaggctaatcatgccattgttcagcatgtagagatattatctgagagtcagaagtataacaagctggttaatctactggaggatataatggatggtagccgaattttaatatttatggacaccaagaagggatgcgatcagactactagacagcttcgaatggatggttggcctgctttgtctatccatggtgacaagagccaagcagaacgggattgggtcctttctgaatttaagtcagggaaaagtcctattatgacggccactgatgttgctgctcgaggcctagatgtcaaggatgtgaagtatgtcattaactatgactttccggggtcactcgaggattatgttcatcgtataggtcgaactggcagagcaggtgcaaaaggaacagcgtacacctttttcactgcagctaatgccagatttgccaaggaacttattaatattctggaagaagctggacaaaaggtcagctctgaattagctgctatgggtcgtggtgcacctcctccatcttcaggttaccgtgatagatatagggggtatgggggtggccgatcgtggagttgacgttcaaatgcttagttgctgctaagagcaatgctttacgtttgtttgttgatggatatgttgttttggcgcactgataagagcaatgctttacattttggctagtattcgcataattcaatgttcatccctgaaaaatcgcagtctgaaatcaatagctctgttatagcatgtggtaagcaaggatctggcagaagatggggttgtggtcatcgctgctgtcccgtatcgaatacatctgtcaatcggagctatctgcaacgctaagctgaaaactggattttgtctgtatcaatagcttctggattttagaaattacctgcatgattgcgtgaagatcttatcatcatcatcatctgttgtttagattataccatttgtttacattgctcttgatatagaaggaaagcctttactaagcttgttcccataactgtctggtaaaatcaagcgagttgatttttttttcgtagatgggtaagaaagagatgtgtttagttctg

SEQ ID NO: 211066 - DNA, 1874 bp, Zea Mays
atcgaccaattcatccaatagtggatactttgtctccaagtctcaaaacccaattcgacccacttggaaccggccttgttccccgttggatccagcctaataaaattccccattccaacacacacagatctcgcatcccggcagtggcgacgaatctcgcggggcggaggtggtggcgcgacagaggcggtgtcgactccgacgaactcgcagccaccggtggatacgcaccagcagcaccggcgcactccaccgacgttcatatttaaggacttggtttggatagttctactcgtcaacaaaagtgattaaaaatggtggttcttgcagcttcaatcgtttcaaagtcggggaaagccatctctcttgggaacaaggaaaatgtgacagtgcaacaagttaaacaatattgtgagatggagagccatgaagagaaggcacacaagctgatgatgcaagccaaaatcaacgaaaccaaggatctcatgaagaagagggctaatgaacttgacaaaatgaggatggaaagaggcaagcttgacaaaggaggatactcatcaatatctggtccacgcgtgattgaaaaaacgtttagtgacatgagcatcagtggttctggatttggtagtggttctggattaggtggactgagcactgatatggactcatttgccagcaagcccaaaggtcgtccatctacagcagctactgcacctggtaaaggttttggtatgaaattaggcaagacacagaagacaaatcaattcctcgagtctttgaaagctgaaggagaagtcattttggaggatgtacaaccaagtgcagtttctacaagatcatctgctcttccaccaagtgaccctgtcacagtgaacatagaagagaagctcaatgttgttgttaaaagagatggtggtattagtaactttgatgttcaaggaacacttgctcttcaggttcttaatgatactgatgggttcatccatttgcagattgaaagccaagatatgcctgggcttagcttcaaaacacacccaaatatcaataaggatttgtttaacagtcagcaaattttgggagcaaaagatccaaacaggccctttccgagtggtcaaaatgaaactcctctggtgaaatggagaatccaggggatggatgagtcatctttacctctgtcagtcaattgctggccgtcagtatctggaaatgaaacctatgtgaacattgaatatgaagcttctgagatgtttgatctgcacaacgttgtcatatctatacctctgccagcacttcgggaggctccgagtgttagacagatcgatggagagtggaagttcgactcaagaaactctgtgttggaatggtctattctccttatcgatcagtcgaatcgcagtggttccatggaatttgttgttcccccagctgacccatcatcgtttttccccatctccgttggattttctgcatcgagtactttcagtgatctgaaggttactggaattcttcctctgaaggaaggcaaccctcccaagttttctcagcgggctcgtttgctcactgctaactaccaagttgtttaacgcttgtaccgcgagtgttggtccacttgaatgctccaatagcagatgttattgccgtggacttatgcaagccatggcacgggagattattttgtgtttggaaaatttctttactatgcgcttctcattgttatagcatattgcacaaatgttgttctaatgtattgccaccagagaaataagtaatgttcttgcattttgttggcatgcattttgtacccgtctctttcctcctatgaggatgttgtcaggacagtgttatctcctgggcttggtgtaatgtgatcgtag

SEQ ID NO: 211067 - DNA, 1962 bp, Zea Mays
ctcctctagatccgggccgcctctgccaatttacttttcggtgttcatatttaaggacttggtttggatagttctactcgtcaacaaaagtgattaaaaatggtggttcttgcagcttcaatcgtttcaaagtcggggaaagcacttgtttcaagacagtttgttgacatgtctcgcataagaattgaaggattacttgctgcgttcccgaaactggttggaactgggaaacagcacacttatgttgaaactgaaaatgtgcgttatgtttatcaacctattgaaggattatatcttctacttatcacaaacaagcagagcaatattcttgaagatctggacacattgaggcttctctccaagcttgtgcctgaatactccccttccttggatgaggacggtatttgtaaaacagcatttgagattatatttgcttttgatgaagccatctctcttgggaacaaggaaaatgtgacagtgcaacaagttaaacaatattgtgagatggagagccatgaagagaaggcacacaagctgatgatgcaagccaaaatcaacgaaaccaaggatctcatgaagaagagggctaatgaacttgacaaaatgaggatggaaagaggcaagcttgacaaaggaggatactcatcaatatctggtccacgcgtgattgaaaaaacgtttagtgacatgagcatcagtggttctggatttggtagtggttctggattaggtggactgagcactgatatggactcatttgccagcaagcccaaaggtcgtccatctacagcagctactgcacctggtaaaggttttggtatgaaattaggcaagacacagaagacaaatcaattcctcgagtctttgaaagctgaaggagaagtcattttggaggatgtacaaccaagtgcagtttctacaagatcatctgctcttccaccaagtgaccctgtcacagtgaacatagaagagaagctcaatgttgttgttaaaagagatggtggtattagtaactttgatgttcaaggaacacttgctcttcaggttcttaatgatactgatgggttcatccatttgcagattgaaagccaagatatgcctgggcttagcttcaaaacacacccaaatatcaataaggatttgtttaacagtcagcaaattttgggagcaaaagatccaaacaggccctttccgagtggtcaaaatgaaactcctctggtgaaatggagaatccaggggatggatgagtcatctttacctctgtcagtcaattgctggccgtcagtatctggaaatgaaacctatgtgaacattgaatatgaagcttctgagatgtttgatctgcacaacgttgtcatatctatacctctgccagcacttcgggaggctccgagtgttagacagatcgatggagagtggaagttcgactcaagaaactctgtgttggaatggtctattctccttatcgatcagtcgaatcgcagtggttccatggaatttgttgttcccccagctgacccatcatcgtttttccccatctccgttggattttctgcatcgagtactttcagtgatctgaaggttactggaattcttcctctgaaggaaggcaaccctcccaagttttctcagcgggctcgtttgctcactgctaactaccaagttgtttaacgcttgtaccgcgagtgttggtccacttgaatgctccaatagcagatgttattgccgtggacttatgcaagccatggcacgggagattattttgtgtttggaaaatttctttactatgcgcttctcattgttatagcatattgcacaaatgttgttctaatgtattgccaccagagaaataagtaatgttcttgcattttgttggcatgcattttgtacccgtctctttcctcctatgaggatgttgtcaggacagtgttatctcctgggcttggtgtaatgtgatcgtag

SEQ ID NO: 211068 - DNA, 950 bp, Zea Mays
ctttagtccaggtgtaatgtattggaagaggcgcctagcgaggataacccggaagaagatgaagaagctgagattggcatgtgggaggcagtaacatggcttgcggtgttaacattctgggtgtcttttctttctgagtacctagttaacgccattgagggagcatctgattcattgaacctaccggtggcttttatcagtgttattttgcttcctattgtgggcaatgcagctgaacatgcaagcgcaataatgtttgccatgaaagataagcttgacataacacttggtgttgcaattggttcatcaacacagatatcaatgtttgtgatggacttgaattttcagctatttgagacagcaactctcttcataacagtacttgtggtggcatttatgttacaggatggcactgcgaactacttgaaaggacttatgctgatcctatgttatctaatagttgctgccagtttctttgttcacgttgatccacaatcaagtgaaggctgaagccatatatcctgtaagtaacgcgccaaataccttttgagacttaataatcttgttttgttccgcctgtctcaagccgggttccttcatgaactgcagaaggaatttttgtattttgttttgtggatactgatgtgtactagggtagtctcgatgtatacagaaacaagaagtggcagcatgttatattcgattaattgtatgggttttctgttttccttgaaatttaactattgggctgaatgtaaatttgggtatatgatttgatgatgacagatgctagatctttcatcatttttttgtagttgatgatgtctgcatagtcacggttctgcatcaatgtttcttttccttccctagtgattgtgtacacttttgatggcagatcaattttatatggccggtcattgtaaaaaaaagtctggttacatcagattcag

SEQ ID NO: 211069 - DNA, 1442 bp, Zea Mays
cctcgtccgtctccgccgcctctccgatctactctgcagctagctatagctagctagctctgtacgccaccggccggcccggtagcagcattgtcggaggggctgggctggtggtggcgcaggcaggcaggcaggtagaagaaggagatccaaccaagggatcggataggataggataggagctgggatcgtcgtcgtcggaacgaagatgagcagcaaggacgctgtgttgaacgcgttcctgagctgcttcatgcacgtgggcctggcgctggtgctcctcgtctacctccccgccgcctccgtcctccgcctcctcgtccgccccttgttggccaacaagcaggccgaggacctccgcggcaaggtcgtcctcgtcaccggcgcgtcatccggcatcggcgagtgaatcatctggtggccaacgcggggatctggtccagctgcttttttgaggagatcaccaacataaccgccttccataatgtgatggacctcaacttctggggtgccgtgtacccgacctacttcgcgctgccgtacctcaaggccagccggggcaacatcgtcgtcaccgcctccgtcgccggcagggtcccgacagccaggatgagcttctacaacgcaagcaaaggcgccgtgatacgtttctacgagacgctaagggccgagctggggtcgcacgtgcgcgtcaccatcctcatgcccggctacgtcgtctccaacctcaccaagggcaggggcctccagaaggacggccgcgtcggcgtcgacgaggaggcccgcgacatcaacgtggggccgatgccggtgggcaagacggagtcgctggcggaggtggtggtggcgagcgtgcggcgcggggactactacgtgacgtggcccggctggtactggcccttccacatggtcatgtgcgccgcgccggagctgctcgactggttctcccgggccttctacgtctccaagtccggcggccaggacggcggcgccgcgctgagtaagaagatcctggaggccgtcggcgggaagaagttcctctacccccagaccatccgctgccagcagaccaccatgggtgccagctaactactgactcgctcaagatgttagccagacataaagataccacattttacatgtataaactcgcgcatggttgatgtgctgttggattagcacggcatgaggatcaaagggccggctgggtgaagttgatgaaatgcttttattcgttttctttctttctttttttttcattttctctacctttaatttctcccctttccgtttaaaagtgatcaatgtgtgtatgatacggatgtttagtcgtagttggtttgtacgcccgtcatattgggggcgtgtgccaattgcaaaatggatgtatgtaaaagacagcatttatttgctgatttcaaacagaacattatatcacctgg

SEQ ID NO: 211070 - DNA, 1318 bp, Zea Mays
cctcgtccgtctccgccgcctctccgatctactctgcagctagctatagctagctagctctgtacgccaccggccggcccggtagcagcattgtcggaggggctgggctggtggtggcgcaggcaggcaggcaggtagaagaaggagatccaaccaagggatcggataggataggataggagctgggatcgtcgtcgtcggaacgaagatgagcagcaaggacgctgtgttgaacgcgttcctgagctgcttcatgcacgtgggcctggcgctggtgctcctcgtctacctccccgccgcctccgtcctccgcctcctcgtccgccccttgttggccaacaagcaggccgaggacctccgcggcaaggtcgtcctcgtcaccggcgcgtcatccggcatcggcgagcacctggtgtacgagtacgcgaggaacggcgcgtgcgtggcgctggtggcgcggacggaggtggcgctgcgcgccgtggccaaggcggcgcgcgacctcggctcccccgacgtgctggtcgtgccggccgacgtcaccaaggtggacgacgccaagcgcgccgtcgacgagaccctcgcgcacttcggcaaactgaatcatctggtggccaacgcggggatctggtccagctgcttttttgaggagatcaccaacataaccgccttccataatgtgatggacctcaacttctggggtgccgtgtacccgacctacttcgcgctgccgtacctcaaggccagccggggcaacatcgtcgtcaccgcctccgtcgccggcagggtcccgacagccaggatgagcttctacaacgcaagcaaaggcgccgtgatacgtttctacgagacgctaagggccgagctggggtcgcacgtgcgcgtcaccatcctcatgcccggctacgtcgtctccaacctcaccaagggcaggggcctccagaaggacggccgcgtcggcgtcgacgaggaggcccgcgacatcaacgtggggccgatgccggtgggcaagacggagtcgctggcggaggtggtggtggcgagcgtgcggcgcggggactactacgtgacgtgggccggctgggtgaagttgatgaaatgcttttattcgttttctttctttctttttttttcattttctctacctttaatttctcccctttccgtttaaaagtgatcaatgtgtgtatgatacggatgtttagtcgtagttggtttgtacgcccgtcatattgggggcgtgtgccaattgcaaaatggatgtatgtaaaagacagcatttatttgctgatttcaaacagaacattatatcacctgg

SEQ ID NO: 211071 - DNA, 983 bp, Zea Mays
ctacgactttttcgtccagtcctgctcacgatattcacatgcgccgtttcctctgtacacccgcgccgcgcccctttccctttctcgcttctgcccctctgcggctctgctgcctgcggcctgcccctttttttattcccaaaaaaactcccatctcgcggcggaaagagagagaggagaggtgcgagctggtaagatggatcggttggaggagcggaacattaagaagggggagagggagatggaggaggcgcgcaaggaagaggagcggaaggaggaggcgggggacaggaatacccaggagccgcagcaaggtcaaggcctcagcctctcactcgccaacggcagcgacagcggcaggtctggaatgttgccgatgtcgaacccttcagctaatcccacacagcttacaattttctatggtggatcagtatgtgtgtatgactcggtgccaccagaaaaggctcaggcaatcatgcttatagctgcggctgcagcagctgcggcagccaccaaaggcagtgctgccactgcttttaatcctccaatgagcacttctgtagcagctggacaagctcaggttgttgctgaccctagctcaataagcaagcttcaggctgatctccccattgccaggaggcactctctccagcgcttccttgagaaacgtcgtgacagggtcgtgagcaaagctccgtacagccccgccaagtcgttcgatggcatggagtcagcgggaatggagatgactgcggacggcaagcagggcgcaaggcccagtatcttgaaaggttggggagccgcgaagtctgaagtctgaacggtgaaaggctggctgacgctgtggggaggaagggacagggacgtgctgttggttttattatattggtatttatgttattatatactgtatgtggtagcagcagcgtggaaccgcactaataatggggaccttaacacctctattttactgtcaaaaaaaa

SEQ ID NO: 211072 - DNA, 2211 bp, Zea Mays
ttatttacacaatttctagcttggtacatgtcatatataaatggacatgggcaggcactcccgctgagggtgcttcttggcttcgtctgtagaggcttgctgatatttggcataggatattgttaatttgtgggtatgatgcatggattatttgagatctttgaacagataaagcaatcattatcatctcaaagggagggtattgatttcatggccgtgattccccctctcccagtcaaagccatccaagccgcaattacttcagggacagggtgttcactggggctagaaggattctgtttttattgcacgacacatgacaacatatccaagtagtccttgattgatttagcagcagggagtaagcgtcttgctaaaagtggctccacaggtgaacttaggtgagtgtttggttaccatgtatttccagatcaatgacatactaaatttgttctttgcacatataaatacaaaaaaaataggtataggaaaagaaatgacatgcaacccaataaatctttttgtatttatttataagaaatgacagaaaaaatctccctcattaaaataagtgaaagaatctaacaaccactaattatcttccaaaaaatcaattattatttttgcaccaagttgtaacaatactgaaaccatattcctttcatctcattctatctgtttaacacaatgattttaataagttcaatatcacactgtaaagagtgaaccaatgatttgtcatagactacaggcattagctctcttttgatactaaatccatattcctttcatcctttgatctcatttaatatgtttaatacattgattttagtacgttcaacatcacactacaagcatggttattttttaaagatgcctaccatttttatcggtcagactatttcttaaaattgttccacgacataatatttaccaatctatacatccatacatcattcaacaatgctagatcttggtagcgagacaacgttcttcgatgtttttgatggtcatggaggtaatcacaatatatgccttttatgttccttgaattagactgcctacgaggaataccattatgccaagtatttatagaacctctctttaacatttcacaacctcatacggtcataccattgctttacttaggaagagtagctgtcaaattctgtacaaaatacccgcataatcaagttctcaaaagtgaagcctattcagttggtgacctaggtcctactgtcctaataaagcttaaatatttattatatgtatacaacaaacacaaagttgattgtgtaaatgctctgttgatagtggctttctaattcaacatatatccctataactgcatatctgtattgaatatgataatgttatctgcatttaaatggacctgtgggtaagactcatatgaatgaacaaccgtctagaggccattttgtatttacattaaagatatccaaatctaatgaggtagaatggaacattcactattatcataccaagatctaccaaaatatagtgttccttatgctctctttcagactcgcgacaatccctttttaaacaaatattttgcatgccaaataactaatcctgagaaagtatagctcccatttttttggttgaagaaaacagaccaacctggccaaagagtcattaacttgattgattttgctgcagcgatcgtcttgctaaaagtggttgtacaggtgatcgcttgaaggaaactcaggttcaagaaggacacatgagtatccgagaaaaaactcccaagaaatcttcccaaaactgaatgttgccttctaccatcaacaacctttgaagttctagggtgtttatttttgtatgttctctacaattatgtgtatatatatatatattcatccttttcaagacaatttttataaatataacaacttgatttcaaatgttgaaacacgataatttacctaactctatttagatgagtatatgtatatcttgctcaaaatgttatcacttatactacaatttttgcccacgcgcgcaggtcgtctgcgcgcgccagttactagtattatctatatgaaaccagctcaacggtagtacatgggtgtaagcaatctctccctaaaacaacaaaaggcgcgggaacggcatactgctttgtccagctagtctaacgaaacagcagttgttagactgtctctattagagcataggaaatag

SEQ ID NO: 211073 - DNA, 785 bp, Zea Mays
agctagggattgaagctgttgcagataaagcaatcattatcatctcaaagggagggtattgatttcatggccgtgattccccctctcccagtcaaagccatccaagccgcaattacttcagggacagggtgttcactggggctagaaggattctgtttttattgcacgacacatgacaacatatccaagtagtccttgattgatttagcagcagggagtaagcgtcttgctaaaagtggctccacaggtgaacttagcgatcgtcttgctaaaagtggttgtacaggtgatcgcttgaaggaaactcaggttcaagaaggacacatgagtatccgagaaaaaactcccaagaaatcttcccaaaactgaatgttgccttctaccatcaacaacctttgaagttctagggtgtttatttttgtatgttctctacaattatgtgtatatatatatatattcatccttttcaagacaatttttataaatataacaacttgatttcaaatgttgaaacacgataatttacctaactctatttagatgagtatatgtatatcttgctcaaaatgttatcacttatactacaatttttgcccacgcgcgcaggtcgtctgcgcgcgccagttactagtattatctatatgaaaccagctcaacggtagtacatgggtgtaagcaatctctccctaaaacaacaaaaggcgcgggaacggcatactgctttgtccagctagtctaacgaaacagcagttgttagactgtctctattagagcataggaaatag

SEQ ID NO: 211074 - DNA, 2175 bp, Zea Mays
cagcaccttacatttacattgtcaaacttaaaaacccggccacttctctctactctagatctcactgctgcgccgtagcgctagtgccgccgcccgctcaccctcatcccctaggcctccacttctctgattggggcgacttcatggcgagcgggcacaaatccgacatgggcgcctctgctccgacgaccgctctctcctctgcgcctccactgcccctctccctgttaggcggcgacagcaaggaggaggaggaggaagggttggctgggccaccgtcggcaccacgcgaggcacgagcgcaaccgcgcctatgagttccatagctccgagccgtcgacgctaggcggcagtgccctcgtctggacctgcccgcgcccaggcggagccgccgccgacccgagatctgcctaggtcgcccgcctgctctggatgaccaaggtcacctccgcggacgctgagcagctgagctcctcccgcgaaggcgtgaacccgcccccagccgaggcactgagctccgccctgccccgctcgggcgtgcccctgcacaggcccagccgcctcgctcctgtttgccgccacggttccagtaacgacgaggctgagcgacaactccagtgtcccgatgttgaataagtgaagtggatgagtcagatggtggaggagacagtgtgtaggagcagcctgtttatgtggccgtagtggatctcgcatgttccgaagagttcctggaactcatcaagagtgcacttcttacagccctagaagcctgtttgtgagcttggtattcctcctgaaaacatcactgcaaaccaattgttatttggcacattgagggagtacgccggatttgatcccacagagcccacttcacgcagtgggggtaaagcaaaagcagtgcagcaaataaaataggaccatggctacaagacaattgttacaattggtgatggcgcaactgatctggaggctcggcaacctggcggagcagactgtgtgccgccagagctagtggagggaggcgggtcattcgattcgccatgcttaggattggagaatcaatagagtaatagtatatacatggtggggagtgaaaccaacagaggaagaatccgttcttgatcaaaattagtcgactgcttggttcgtcgtctgcgtgttcgatcggaggttggcgacgccttggcgtgggcgctttccgcaagaaagcaaggaaattgtgctgaccgccgctaatgcgctggatatttctgggagtggaaacgaaagtgtactctgaatttcaagttcctgtcaaaagtaagatcctctgacgaaggtgtgtactctgaatttcaagtgccaacaatctatgttttccagtcaaaaagtattacatggtgcccggctgttagcttctccttttcagttgttgcccttgccggcctggcatttgttcaacctttcctctctctctctctctctctctctctctctctctttctgctacagccattttactgatgataacagtgctaattggtcaatttcacatatatttaaatatatatatatatatggagctaatactggtgaagtagtaggtgtggttgtgatcatgcataaactaactgttgctgccacatggattggagagggagatcgatccacagaaaatggtatcatttgtcaagtgcatgttaggacttgatgctgttgtttgggacattattgggtcgtcattgttggagaaagttgtgtatctacttacagaattggatgttaatataacatgggaagatattcttcaagatgaacacaacaaaggtatatttgacatggagcttgaggatttggctgaggatgaacataaccttggccgcacaagtgtagagacttgaattcatatatacttagttaggctcaatgttagcataaacagttgatgagcaagttttcccattagtattttagtttgaatttagagtacaattatgtatgagttatttgataatgcttatttatgagatattgaatggtgtttatctatattgtattaattatagtgttattaaatatatgtgtttgtatttttctcttttaaattattataatgcggtaattgaagaatgtattgacatgtaagtcatttcgtttaaatcttaataagacagctatcgaaacgtctaatatgag

SEQ ID NO: 211075 - DNA, 2301 bp, Zea Mays
cttctctctactctagatctcactgctgcgccgtagcgctagtgccgccgcccgctcaccctcatcccctaggcctccacttctctgattggggcgacttcatggcgagcgggcacaaatccgacatgggcgcctctgctccgacgaccgctctctcctctgcgcctccactgcccctctccctgttaggcggcgacagcaaggaggaggaggaggaagggttggctgggccaccgtcggcaccacgcgaggcacgagcgcaaccgcgcctatgagttccatagctccgagccgtcgacgctaggcggcagtgccctcgtctggacctgcccgcgcccaggcggagccgccgccgacccgagatctgcctaggtcgcccgcctgctctggatgaccaaggtcacctccgcggacgctgagcagctgagctcctcccgcgaaggcgtgaacccgcccccagccgaggcactgagctccgccctgccccgctcgggcgtgcccctgcacaggcccagccgcctcgctcctgtttgccgccacggttccagtaacgacgaggctgagcgacaactccagtgtcccgatgtgtgacccgagttcaactcctctttcgtcgacctcgagatcccaggtactatgatacacagctaccttctcgcaacgtgatgtgggatgaattttgacctgtaggttgaataagtgaagtggatgagtcagatggtggaggagacagtgtgtaggagcagcctgtttatgtggccgtagtggatctcgcatgttccgaagagttcctggaactcatcaagagtgcacttcttacagccctagaagcctgtttgtgagcttggtattcctcctgaaaacatcactgcaaaccaattgttatttggcacattgagggagtacgccggatttgatcccacagagcccacttcacgcagtgggggtaaagcaaaagcagtgcagcaaataaaataggaccatggctacaagacaattgttacaattggtgatggcgcaactgatctggaggctcggcaacctggcggagcagactgtgtgccgccagagctagtggagggaggcgggtcattcgattcgccatgcttaggattggagaatcaatagagtaatagtatatacatggtggggagtgaaaccaacagaggaagaatccgttcttgatcaaaattagtcgactgcttggttcgtcgtctgcgtgttcgatcggaggttggcgacgccttggcgtgggcgctttccgcaagaaagcaaggaaattggtcggcttctacgctaccagtccggtccacttcgttcacctttccctttcggtgccaccaacatctaactgtacatgcatgcttgcttagtgctgaccgccgctaatgcgctggatatttctgggagtggaaacgaaagtgtactctgaatttcaagttcctgtcaaaagtaagatcctctgacgaaggtgtgtactctgaatttcaagtgccaacaatctatgttttccagtcaaaaagtattacatggtgcccggctgttagcttctccttttcagttgttgcccttgccggcctggcatttgttcaacctttcctctctctctctctctctctctctctctctctctttctgctacagccattttactgatgataacagtgctaattggtcaatttcacatatatttaaatatatatatatatatggagctaatactggtgaagtagtaggtgtggttgtgatcatgcataaactaactgttgctgccacatggattggagagggagatcgatccacagaaaatggtatcatttgtcaagtgcatgttaggacttgatgctgttgtttgggacattattgggtcgtcattgttggagaaagttaatataacatgggaagatattcttcaagatgaacacaacaaaggtatatttgacatggagcttgaggatttggctgaggatgaacataaccttggccgcacaagtgtagagacttgaattcatatatacttagttaggctcaatgttagcataaacagttgatgagcaagttttcccattagtattttagtttgaatttagagtacaattatgtatgagttatttgataatgcttatttatgagatattgaatggtgtttatctatattgtattaattatagtgttattaaatatatgtgtttgtatttttctcttttaaattattataatgcggtaattgaagaatgtattgacatgtaagtcatttcgtttaaatcttaataagacagctatcgaaacgtctaatatgag

SEQ ID NO: 211076 - DNA, 2902 bp, Zea Mays
gaagccttcacggtctaggctcgagacgagacggagtgacccactagcagtctcgtacaacgaactatcctgttagccagccctaaacccttctgtcccgatggcgtcgtcgtcgtcgccgccgccgccgaagctgccgattcccggccgccgcaacatactcatcactagcgcacttccgtacgtcaataatgtcccgcacctagggaacatcatcggctgtgtgctcagcgcagacgtgttcgcgcggtactgccggctccggggttacaacgctatctacatatgcgggacggacgagtatggcaccgccaccgaaacgaaggccatggaggagaagtgcacgcccaaggagatctgcgataagtaccatgctatccacaatgaagtttacaagtggtttaacataaaatttgacaagtttggacggacctcttctcctgagcagacagaagtctgccatgcaattttccataaattgatggaaaacaattggctcacagaaaatactatgcagcaggcttgttgaaggaacatgcccgaacaaagtctgcaacgcatcagcaagaggagatcagtgtgaaacatgcagcaccttgttgaatccaactgaacttattgacccaaagtgcaaggtttgtaagaacactccacgtattcgtgacacggatcacttatttttggagcttcctctattgagagacaagctggtaaactacatcaatgaaacttcagttgctggtttgtggagtcaaaatgctattcaagcaacaaatgcatggctgaaggaagggctaaagccacgctgcatcaccagagatcttaaatggggtgttcctgtcccccatgagaagtataaagacaaggtgttctatgtttggtttgatgcacctatcggctacgtgtctattacggcatcctatacacctgagtgggagaagtggtggaagaatcctgataatgtagaattgtttcagtttatgggcaaagataatgtgccgtttcacacgatcatgttcccttcaacgctactcggaactggggaaaagtggacaatgatgaaaacgataagtgttactgaatatttgaattatgaagcaggcaaattttccaagagtaaaggtattggagtctttggtaatgatgcaaaggatacaaatattcctcctgaagtatggcgatactatttgcttatgaatcgccctgaggcatcagatacactctttacttgggctgatttgcaagccaaattgaacagcgagttgctgaacaacttgggaaacttcattaatcgtgtgctaagttttgttgcaaaaccagctggagctggatatggttctgttgtacccgatgcacctaatgcgggcgcgcacacattgacaaaaacacttgcagaaaaaaccagtaaatgggttgaacaatatctcgacgcaatggaaaaggttaaactgaaacaaggactcaagagtgcaatgggcatttctagtgatggaaatgcatatttgcaagagagccagttttggaaactttacaaggaagatcctgcagcatgtgcaatcgtgatgaaaacttcagttggccttgtttacctgcttgcctgtctgctggagcctttcatgccctctttttctgatgaagtgttacgtcaactaaatttatctccagaagaaaatctgtcattaagtgaagaaaagggagaaattgcgaaggcaaaaactccttggaattttgtaccagcaggtcacagaatagggaaacccgcacctctgttcaaggaattgaaagatgaagacgtagctctccatagagaaaaatatgcagggagtcaagctgagagaagctcaaaagcagcagctgatgctgaagccaacaaagttgctaaccagctcaagggcacaaaattatctgatggaggaacaaaaaaggaaccgaagaaacaatctggtggctcaaaatcgaagacagctgaggctgacattacagttgcaaagttggatattagagtggggcttatcagaaaagcagagaagcatccagatgctgattccctttacgtggaggagattgatgttggagaggacgcgccgagaacagtagtcagtggccttgttaaattcatacctcttgaagaaatgcagagccggaaagtctgcgtgctctgcaatctgaaaccggtggcaatgcgtggcataaaatcacatgcaatggttctggctgcatcgaatgaggaccacacgaaggttgagttggtggaacctccagagtctgctgctgtgggggagcgtgttacctttgctgggtacgcgggtgagcccgaggcttccctcagtggcaagagcaagacgtgggagaagctggccgccgagttgcacagcaacggtgagctggtggcgtgctacagagatgtgcccttcactacctcggctggagtctgcagggtgaagacaatagcgaacggagagattcgctagtaccaccacatcaccgaactgcagccagcggagccagtctgtgtctggtttcgctgaaagcgattgttcctgattttcatcttcgaaaattttggtatttccatttgttcaaataccgcaaagcaaccatgatttagaaaaatacagagagtgccctttccgcatcctcttttttatcagttagtacttggctcctgttgtctcactcggaggctccatgcttcttgctctatctgtatttccttagaagtgattctttacctgctcttatttatagttccatatgaaaggaacgaagtgtatcagaacatcactttatatataggagggcctgtctgtcactgccccctgtcaatgcatggaaaggagcaagcaaggaagcttgaaggaactgtaaacagagcttggccaatgggcagcgcccgctagat

SEQ ID NO: 211077 - DNA, 2860 bp, Zea Mays
cttcacggtctaggctcgagacgagacggagtgacccactagcagtctcgtacaacgaactatcctgttagccagccctaaacccttctgtcccgatggcgtcgtcgtcgtcgccgccgccgccgaagctgccgattcccggccgccgcaacatactcatcactagcgcacttccgtacgtcaataatgtcccgcacctagggaacatcatcggctgtgtgctcagcgcagacgtgttcgcgcggtactgccggctccggggttacaacgctatctacatatgcgggacggacgagtatggcaccgccaccgaaacgaaggccatggaggagaagtgcacgcccaaggagatctgcgataagtaccatgctatccacaatgaagtttacaagtggtttaacataaaatttgacaagtttggacggacctcttctcctgagcagacagaagtctgccatgcaattttccataaattgatggaaaacaattggctcacagaaaatactatgcagcagctttactgcgatacatgccaaaaatttttagctgataggcttgttgaaggaacatgcccgaacaaagtctgcaacgcatcagcaagaggagatcagtgtgaaacatgcagcaccttgttgaatccaactgaacttattgacccaaagtgcaaggtttgtaagaacactccacgtattcgtgacacggatcacttatttttggagcttcctctattgagagacaagctggtaaactacatcaatgaaacttcagttgctggtttgtggagtcaaaatgctattcaagcaacaaatgcatggctgaaggaagggctaaagccacgctgcatcaccagagatcttaaatggggtgttcctgtcccccatgagaagtataaagacaagtggtggaagaatcctgataatgtagaattgtttcagtttatgggcaaagataatgtgccgtttcacacgatcatgttcccttcaacgctactcggaactggggaaaagtggacaatgatgaaaacgataagtgttactgaatatttgaattatgaagcaggcaaattttccaagagtaaaggtattggagtctttggtaatgatgcaaaggatacaaatattcctcctgaagtatggcgatactatttgcttatgaatcgccctgaggcatcagatacactctttacttgggctgatttgcaagccaaattgaacagcgagttgctgaacaacttgggaaacttcattaatcgtgtgctaagttttgttgcaaaaccagctggagctggatatggttctgttgtacccgatgcacctaatgcgggcgcgcacacattgacaaaaacacttgcagaaaaaaccagtaaatgggttgaacaatatctcgacgcaatggaaaaggttaaactgaaacaaggactcaagagtgcaatgggcatttctagtgatggaaatgcatatttgcaagagagccagttttggaaactttacaaggaagatcctgcagcatgtgcaatcgtgatgaaaacttcagttggccttgtttacctgcttgcctgtctgctggagcctttcatgccctctttttctgatgaagtgttacgtcaactaaatttatctccagaagaaaatctgtcattaagtgaagaaaagggagaaattgcgaaggcaaaaactccttggaattttgtaccagcaggtcacagaatagggaaacccgcacctctgttcaaggaattgaaagatgaagacgtagctctccatagagaaaaatatgcagggagtcaagctgagagaagctcaaaagcagcagctgatgctgaagccaacaaagttgctaaccagctcaagggcacaaaattatctgatggaggaacaaaaaaggaaccgaagaaacaatctggtggctcaaaatcgaagacagctgaggctgacattacagttgcaaagttggatattagagtggggcttatcagaaaagcagagaagcatccagatgctgattccctttacgtggaggagattgatgttggagaggacgcgccgagaacagtagtcagtggccttgttaaattcatacctcttgaagaaatgcagagccggaaagtctgcgtgctctgcaatctgaaaccggtggcaatgcgtggcataaaatcacatgcaatggttctggctgcatcgaatgaggaccacacgaaggttgagttggtggaacctccagagtctgctgctgtgggggagcgtgttacctttgctgggtacgcgggtgagcccgaggcttccctcagtggcaagagcaagacgtgggagaagctggccgccgagttgcacagcaacggtgagctggtggcgtgctacagagatgtgcccttcactacctcggctggagtctgcagggtgaagacaatagcgaacggagagattcgctagtaccaccacatcaccgaactgcagccagcggagccagtctgtgtctggtttcgctgaaagcgattgttcctgattttcatcttcgaaaattttggtatttccatttgttcaaataccgcaaagcaaccatgatttagaaaaatacagagagtgccctttccgcatcctcttttttatcagttagtacttggctcctgttgtctcactcggaggctccatgcttcttgctctatctgtatttccttagaagtgattctttacctgctcttatttatagttccatatgaaaggaacgaagtgtatcagaacatcactttatatataggagggcctgtctgtcactgccccctgtcaatgcatggaaaggagcaagcaaggaagcttgaaggaactgtaaacagagcttggccaatgggcagcgcccgctagat

SEQ ID NO: 211078 - DNA, 2883 bp, Zea Mays
cacggtctaggctcgagacgagacggagtgacccactagcagtctcgtacaacgaactatcctgttagccagccctaaacccttctgtcccgatggcgtcgtcgtcgtcgccgccgccgccgaagctgccgattcccggccgccgcaacatactcatcactagcgcacttccgtacgtcaataatgtcccgcacctagggaacatcatcggctgtgtgctcagcgcagacgtgttcgcgcggtactgccggctccggggttacaacgctatctacatatgcgggacggacgagtatggcaccgccaccgaaacgaaggccatggaggagaagtgcacgcccaaggagatctgcgataagtaccatgctatccacaatgaagtttacaagtggtttaacataaaatttgacaagtttggacggacctcttctcctgagcagacagaagtctgccatgcaattttccataaattgatggaaaacaattggctcacagaaaatactatgcagcaggaacatgcccgaacaaagtctgcaacgcatcagcaagaggagatcagtgtgaaacatgcagcaccttgttgaatccaactgaacttattgacccaaagtgcaaggtttgtaagaacactccacgtattcgtgacacggatcacttatttttggagcttcctctattgagagacaagctggtaaactacatcaatgaaacttcagttgctggtttgtggagtcaaaatgctattcaagcaacaaatgcatggctgaaggaagggctaaagccacgctgcatcaccagagatcttaaatggggtgttcctgtcccccatgagaagtataaagacaaggtgttctatgtttggtttgatgcacctatcggctacgtgtctattacggcatcctatacacctgagtgggagaagtggtggaagaatcctgataatgtagaattgtttcagtttatgggcaaagataatgtgccgtttcacacgatcatgttcccttcaacgctactcggaactggggaaaagtggacaatgatgaaaacgataagtgttactgaatatttgaattatgaagcaggcaaattttccaagagtaaaggtattggagtctttggtaatgatgcaaaggatacaaatattcctcctgaagtatggcgatactatttgcttatgaatcgccctgaggcatcagatacactctttacttgggctgatttgcaagccaaattgaacagcgagttgctgaacaacttgggaaacttcattaatcgtgtgctaagttttgttgcaaaaccagctggagctggatatggttctgttgtacccgatgcacctaatgcgggcgcgcacacattgacaaaaacacttgcagaaaaaaccagtaaatgggttgaacaatatctcgacgcaatggaaaaggttaaactgaaacaaggactcaagagtgcaatgggcatttctagtgatggaaatgcatatttgcaagagagccagttttggaaactttacaaggaagatcctgcagcatgtgcaatcgtgatgaaaacttcagttggccttgtttacctgcttgcctgtctgctggagcctttcatgccctctttttctgatgaagtgttacgtcaactaaatttatctccagaagaaaatctgtcattaagtgaagaaaagggagaaattgcgaaggcaaaaactccttggaattttgtaccagcaggtcacagaatagggaaacccgcacctctgttcaaggaattgaaagatgaagacgtagctctccatagagaaaaatatgcagggagtcaagctgagagaagctcaaaagcagcagctgatgctgaagccaacaaagttgctaaccagctcaagggcacaaaattatctgatggaggaacaaaaaaggaaccgaagaaacaatctggtggctcaaaatcgaagacagctgaggctgacattacagttgcaaagttggatattagagtggggcttatcagaaaagcagagaagcatccagatgctgattccctttacgtggaggagattgatgttggagaggacgcgccgagaacagtagtcagtggccttgttaaattcatacctcttgaagaaatgcagagccggaaagtctgcgtgctctgcaatctgaaaccggtggcaatgcgtggcataaaatcacatgcaatggttctggctgcatcgaatgaggaccacacgaaggttgagttggtggaacctccagagtctgctgctgtgggggagcgtgttacctttgctgggtacgcgggtgagcccgaggcttccctcagtggcaagagcaagacgtgggagaagctggccgccgagttgcacagcaacggtgagctggtggcgtgctacagagatgtgcccttcactacctcggctggagtctgcagggtgaagacaatagcgaacggagagattcgctagtaccaccacatcaccgaactgcagccagcggagccagtctgtgtctggtttcgctgaaagcgattgttcctgattttcatcttcgaaaattttggtatttccatttgttcaaataccgcaaagcaaccatgatttagaaaaatacagagagtgccctttccgcatcctcttttttatcagttagtacttggctcctgttgtctcactcggaggctccatgcttcttgctctatctgtatttccttagaagtgattctttacctgctcttatttatagttccatatgaaaggaacgaagtgtatcagaacatcactttatatataggagggcctgtctgtcactgccccctgtcaatgcatggaaaggagcaagcaaggaagcttgaaggaactgtaaacagagcttggccaatgggcagcgcccgctagat

SEQ ID NO: 211079 - DNA, 2693 bp, Zea Mays
acaacgaactatcctgttagccagccctaaacccttctgtcccgatggcgtcgtcgtcgtcgccgccgccgccgaagctgccgattcccggccgccgcaacatactcatcactagcgcacttccgtacgtcaataatgtcccgcacctagggaacatcatcggctgtgtgctcagcgcagacgtgttcgcgcggtactgccggctccggggttacaacgctatctacatatgcgggacggacgagtatggcaccgccaccgaaacgaaggccatggaggagaagtgcacgcccaaggagatctgcgataagtaccatgctatccacaatgaagtttacaagtggtttaacataaaatttgacaagtttggacggacctcttctcctgagcagacagaagtctgccatgcaattttccataaattgatggaaaacaattggctcacagaaaatactatgcagcagctgataggcttgttgaaggaacatgcccgaacaaagtctgcaacgcatcagcaagaggagatcagtgtgaaacatgcagcaccttgttgaatccaactgaacttattgacccaaagtgcaaggtttgtaagaacactccacgtattcgtgacacggatcacttatttttggagcttcctctattgagagacaagctggtaaactacatcaatgaaacttcagttgctggtttgtggagtcaaaatgctattcaagcaacaaatgcatggctgaaggaagggctaaagccacgctgcatcaccagagatcttaaatggggtgttcctgtcccccatgagaagtataaagacaaggtgttctatgtttggtttgatgcacctatcggctacgtgtctattacggcatcctatacacctgagtgggagaagtggtggaagaatcctgataatgtagaattgtttcagtttatgggcaaagataatgtgccgtttcacacggcaaattttccaagagtaaaggtattggagtctttggtaatgatgcaaaggatacaaatattcctcctgaagtatggcgatactatttgcttatgaatcgccctgaggcatcagatacactctttacttgggctgatttgcaagccaaattgaacagcgagttgctgaacaacttgggaaacttcattaatcgtgtgctaagttttgttgcaaaaccagctggagctggatatggttctgttgtacccgatgcacctaatgcgggcgcgcacacattgacaaaaacacttgcagaaaaaaccagtaaatgggttgaacaatatctcgacgcaatggaaaaggttaaactgaaacaaggactcaagagtgcaatgggcatttctagtgatggaaatgcatatttgcaagagagccagttttggaaactttacaaggaagatcctgcagcatgtgcaatcgtgatgaaaacttcagttggccttgtttacctgcttgcctgtctgctggagcctttcatgccctctttttctgatgaaaagaaaatctgtcattaagtgaagaaaagggagaaattgcgaaggcaaaaactccttggaattttgtaccagcagaaagatgaagacgtagctctccatagagaaaaatatgcagggagtcaagctgagagaagctcaaaagcagcagctgatgctgaagccaacaaagttgctaaccagctcaagggcacaaaattatctgatggaggaacaaaaaaggaaccgaagaaacaatctggtggctcaaaatcgaagacagctgaggctgacattacagttgcaaagttggatattagagtggggcttatcagaaaagcagagaagcatccagatgctgattccctttacgtggaggagattgatgttggagaggacgcgccgagaacagtagtcagtggccttgttaaattcatacctcttgaagaaatgcagagccggaaagtctgcgtgctctgcaatctgaaaccggtggcaatgcgtggcataaaatcacatgcaatggttctggctgcatcgaatgaggaccacacgaaggttgagttggtggaacctccagagtctgctgctgtgggggagcgtgttacctttgctgggtacgcgggtgagcccgaggcttccctcagtggcaagagcaagacgtgggagaagctggccgccgagttgcacagcaacggtgagctggtggcgtgctacagagatgtgcccttcactacctcggctggagtctgcagggtgaagacaatagcgaacggagagattcgctagtaccaccacatcaccgaactgcagccagcggagccagtctgtgtctggtttcgctgaaagcgattgttcctgattttcatcttcgaaaattttggtatttccatttgttcaaataccgcaaagcaaccatgatttagaaaaatacagagagtgccctttccgcatcctcttttttatcagttagtacttggctcctgttgtctcactcggaggctccatgcttcttgctctatctgtatttccttagaagtgattctttacctgctcttatttatagttccatatgaaaggaacgaagtgtatcagaacatcactttatatataggagggcctgtctgtcactgccccctgtcaatgcatggaaaggagcaagcaaggaagcttgaaggaactgtaaacagagcttggccaatgggcagcgcccgctagat

SEQ ID NO: 211080 - DNA, 2762 bp, Zea Mays
acaacgaactatcctgttagccagccctaaacccttctgtcccgatggcgtcgtcgtcgtcgccgccgccgccgaagctgccgattcccggccgccgcaacatactcatcactagcgcacttccgtacgtcaataatgtcccgcacctagggaacatcatcggctgtgtgctcagcgcagacgtgttcgcgcggtactgccggctccggggttacaacgctatctacatatgcgggacggacgagtatggcaccgccaccgaaacgaaggccatggaggagaagtgcacgcccaaggagatctgcgataagtaccatgctatccacaatgaagtttacaagtggtttaacataaaatttgacaagtttggacggacctcttctcctgagcagacagaagtctgccatgcaattttccataaattgatggaaaacaattggctcacagaaaatactatgcagcagctgataggcttgttgaaggaacatgcccgaacaaagtctgcaacgcatcagcaagaggagatcagtgtgaaacatgcagcaccttgttgaatccaactgaacttattgacccaaagtgcaaggtttgtaagaacactccacgtattcgtgacacggatcacttatttttggagcttcctctattgagagacaagctggtaaactacatcaatgaaacttcagttgctggtttgtggagtcaaaatgctattcaagcaacaaatgcatggctgaaggaagggctaaagccacgctgcatcaccagagatcttaaatggggtgttcctgtcccccatgagaagtataaagacaaggtgttctatgtttggtttgatgcacctatcggctacgtgtctattacggcatcctatacacctgagtgggagaagtggtggaagaatcctgataatgtagaattgtttcagtttatgggcaaagataatgtgccgtttcacacggcaaattttccaagagtaaaggtattggagtctttggtaatgatgcaaaggatacaaatattcctcctgaagtatggcgatactatttgcttatgaatcgccctgaggcatcagatacactctttacttgggctgatttgcaagccaaattgaacagcgagttgctgaacaacttgggaaacttcattaatcgtgtgctaagttttgttgcaaaaccagctggagctggatatggttctgttgtacccgatgcacctaatgcgggcgcgcacacattgacaaaaacacttgcagaaaaaaccagtaaatgggttgaacaatatctcgacgcaatggaaaaggttaaactgaaacaaggactcaagagtgcaatgggcatttctagtgatggaaatgcatatttgcaagagagccagttttggaaactttacaaggaagatcctgcagcatgtgcaatcgtgatgaaaacttcagttggccttgtttacctgcttgcctgtctgctggagcctttcatgccctctttttctgatgaagtgttacgtcaactaaatttatctccagaagaaaatctgtcattaagtgaagaaaagggagaaattgcgaaggcaaaaactccttggaattttgtaccagcaggtcacagaatagggaaacccgcacctctgttcaaggaattgaaagatgaagacgtagctctccatagagaaaaatatgcagggagtcaagctgagagaagctcaaaagcagcagctgatgctgaagccaacaaagttgctaaccagctcaagggcacaaaattatctgatggaggaacaaaaaaggaaccgaagaaacaatctggtggctcaaaatcgaagacagctgaggctgacattacagttgcaaagttggatattagagtggggcttatcagaaaagcagagaagcatccagatgctgattccctttacgtggaggagattgatgttggagaggacgcgccgagaacagtagtcagtggccttgttaaattcatacctcttgaagaaatgcagagccggaaagtctgcgtgctctgcaatctgaaaccggtggcaatgcgtggcataaaatcacatgcaatggttctggctgcatcgaatgaggaccacacgaaggttgagttggtggaacctccagagtctgctgctgtgggggagcgtgttacctttgctgggtacgcgggtgagcccgaggcttccctcagtggcaagagcaagacgtgggagaagctggccgccgagttgcacagcaacggtgagctggtggcgtgctacagagatgtgcccttcactacctcggctggagtctgcagggtgaagacaatagcgaacggagagattcgctagtaccaccacatcaccgaactgcagccagcggagccagtctgtgtctggtttcgctgaaagcgattgttcctgattttcatcttcgaaaattttggtatttccatttgttcaaataccgcaaagcaaccatgatttagaaaaatacagagagtgccctttccgcatcctcttttttatcagttagtacttggctcctgttgtctcactcggaggctccatgcttcttgctctatctgtatttccttagaagtgattctttacctgctcttatttatagttccatatgaaaggaacgaagtgtatcagaacatcactttatatataggagggcctgtctgtcactgccccctgtcaatgcatggaaaggagcaagcaaggaagcttgaaggaactgtaaacagagcttggccaatgggcagcgcccgctagat

SEQ ID NO: 211081 - DNA, 2781 bp, Zea Mays
acaacgaactatcctgttagccagccctaaacccttctgtcccgatggcgtcgtcgtcgtcgccgccgccgccgaagctgccgattcccggccgccgcaacatactcatcactagcgcacttccgtacgtcaataatgtcccgcacctagggaacatcatcggctgtgtgctcagcgcagacgtgttcgcgcggtactgccggctccggggttacaacgctatctacatatgcgggacggacgagtatggcaccgccaccgaaacgaaggccatggaggagaagtgcacgcccaaggagatctgcgataagtaccatgctatccacaatgaagtttacaagtggtttaacataaaatttgacaagtttggacggacctcttctcctgagcagacagaagtctgccatgcaattttccataaattgatggaaaacaattggctcacagaaaatactatgcagcagctgataggcttgttgaaggaacatgcccgaacaaagtctgcaacgcatcagcaagaggagatcagtgtgaaacatgcagcaccttgttgaatccaactgaacttattgacccaaagtgcaagctggtaaactacatcaatgaaacttcagttgctggtttgtggagtcaaaatgctattcaagcaacaaatgcatggctgaaggaagggctaaagccacgctgcatcaccagagatcttaaatggggtgttcctgtcccccatgagaagtataaagacaaggtgttctatgtttggtttgatgcacctatcggctacgtgtctattacggcatcctatacacctgagtgggagaagtggtggaagaatcctgataatgtagaattgtttcagtttatgggcaaagataatgtgccgtttcacacgatcatgttcccttcaacgctactcggaactggggaaaagtggacaatgatgaaaacgataagtgttactgaatatttgaattatgaagcaggcaaattttccaagagtaaaggtattggagtctttggtaatgatgcaaaggatacaaatattcctcctgaagtatggcgatactatttgcttatgaatcgccctgaggcatcagatacactctttacttgggctgatttgcaagccaaattgaacagcgagttgctgaacaacttgggaaacttcattaatcgtgtgctaagttttgttgcaaaaccagctggagctggatatggttctgttgtacccgatgcacctaatgcgggcgcgcacacattgacaaaaacacttgcagaaaaaaccagtaaatgggttgaacaatatctcgacgcaatggaaaaggttaaactgaaacaaggactcaagagtgcaatgggcatttctagtgatggaaatgcatatttgcaagagagccagttttggaaactttacaaggaagatcctgcagcatgtgcaatcgtgatgaaaacttcagttggccttgtttacctgcttgcctgtctgctggagcctttcatgccctctttttctgatgaagtgttacgtcaactaaatttatctccagaagaaaatctgtcattaagtgaagaaaagggagaaattgcgaaggcaaaaactccttggaattttgtaccagcaggtcacagaatagggaaacccgcacctctgttcaaggaattgaaagatgaagacgtagctctccatagagaaaaatatgcagggagtcaagctgagagaagctcaaaagcagcagctgatgctgaagccaacaaagttgctaaccagctcaagggcacaaaattatctgatggaggaacaaaaaaggaaccgaagaaacaatctggtggctcaaaatcgaagacagctgaggctgacattacagttgcaaagttggatattagagtggggcttatcagaaaagcagagaagcatccagatgctgattccctttacgtggaggagattgatgttggagaggacgcgccgagaacagtagtcagtggccttgttaaattcatacctcttgaagaaatgcagagccggaaagtctgcgtgctctgcaatctgaaaccggtggcaatgcgtggcataaaatcacatgcaatggttctggctgcatcgaatgaggaccacacgaaggttgagttggtggaacctccagagtctgctgctgtgggggagcgtgttacctttgctgggtacgcgggtgagcccgaggcttccctcagtggcaagagcaagacgtgggagaagctggccgccgagttgcacagcaacggtgagctggtggcgtgctacagagatgtgcccttcactacctcggctggagtctgcagggtgaagacaatagcgaacggagagattcgctagtaccaccacatcaccgaactgcagccagcggagccagtctgtgtctggtttcgctgaaagcgattgttcctgattttcatcttcgaaaattttggtatttccatttgttcaaataccgcaaagcaaccatgatttagaaaaatacagagagtgccctttccgcatcctcttttttatcagttagtacttggctcctgttgtctcactcggaggctccatgcttcttgctctatctgtatttccttagaagtgattctttacctgctcttatttatagttccatatgaaaggaacgaagtgtatcagaacatcactttatatataggagggcctgtctgtcactgccccctgtcaatgcatggaaaggagcaagcaaggaagcttgaaggaactgtaaacagagcttggccaatgggcagcgcccgctagat

SEQ ID NO: 211082 - DNA, 2956 bp, Zea Mays
acaacgaactatcctgttagccagccctaaacccttctgtcccgatggcgtcgtcgtcgtcgccgccgccgccgaagctgccgattcccggccgccgcaacatactcatcactagcgcacttccgtacgtcaataatgtcccgcacctagggaacatcatcggctgtgtgctcagcgcagacgtgttcgcgcggtactgccggctccggggttacaacgctatctacatatgcgggacggacgagtatggcaccgccaccgaaacgaaggccatggaggagaagtgcacgcccaaggagatctgcgataagtaccatgctatccacaatgaagtttacaagtggtttaacataaaatttgacaagtttggacggacctcttctcctgagcagacagaagtctgccatgcaattttccataaattgatggaaaacaattggctcacagaaaatactatgcagcagctgataggcttgttgaaggaacatgcccgaacaaagtctgcaacgcatcagcaagaggagatcagtgtgaaacatgcagcaccttgttgaatccaactgaacttattgacccaaagtgcaaggtttgtaagaacactccacgtattcgtgacacggatcacttatttttggagcttcctctattgagagacaagctggtaaactacatcaatgaaacttcagttgctggtttgtggagtcaaaatgctattcaagcaacaaatgcatggctgaaggaagggctaaagccacgctgcatcaccagagatcttaaatggggtgttcctgtcccccatgagaagtataaagacaaggtgttctatgtttggtttgatgcacctatcggctacgtgtctattacggcatcctatacacctgagtgggagaagtggtggaagaatcctgataatgtagaattgtttcagtttatgggcaaagataatgtgccgtttcacacgatcatgttcccttcaacgctactcggaactggggaaaagtggacaatgatgaaaacgataagtgttactgaatatttgaattatgaagcaggcaaattttccaagagtaaaggtattggagtctttggtaatgatgcaaaggatacaaatattcctcctgaagtatggcgatactatttgcttatgaatcgccctgaggcatcagatacactctttacttgggctgatttgcaagccaaattgaacagcgagttgctgaacaacttgggaaacttcattaatcgtgtgctaagttttgttgcaaaaccagctggagctggatatggttctgttgtacccgatgcacctaatgcgggcgcgcacacattgacaaaaacacttgcagaaaaaaccagtaaatgggttgaacaatatctcgacgcaatggaaaaggttaaactgaaacaaggactcaagagtgcaatgggcatttctagtgatggaaatgcatatttgcaagagagccagttttggaaactttacaaggaagatcctgcagcatgtgcaatcgtgatgaaaacttcagttggccttgtttacctgcttgcctgtctgctggagcctttcatgccctctttttctgatgaagtgttacgtcaactaaatttatctccagaagaaaatctgtcattaagtgaagaaaagggagaaattgcgaaggcaaaaactccttggaattttgtaccagcaggtcacagaatagggaaacccgcacctctgttcaaggaattgaaagatgaagacgtagctctccatagagaaaaatatgcagggagtcaagctgagagaagctcaaaagcagcagctgatgctgaagccaacaaagttgctaaccagctcaagggcacaaaattatctgggctgctcaactctgaagctcatgaagctgagctggttttgtgaagctgtgctgtgcgcctgtgccaaacacctccttagttttcctctcgtgtctctttcagatggaggaacaaaaaaggaaccgaagaaacaatctggtggctcaaaatcgaagacagctgaggctgacattacagttgcaaagttggatattagagtggggcttatcagaaaagcagagaagcatccagatgctgattccctttacgtggaggagattgatgttggagaggacgcgccgagaacagtagtcagtggccttgttaaattcatacctcttgaagaaatgcagagccggaaagtctgcgtgctctgcaatctgaaaccggtggcaatgcgtggcataaaatcacatgcaatggttctggctgcatcgaatgaggaccacacgaaggttgagttggtggaacctccagagtctgctgctgtgggggagcgtgttacctttgctgggtacgcgggtgagcccgaggcttccctcagtggcaagagcaagacgtgggagaagctggccgccgagttgcacagcaacggtgagctggtggcgtgctacagagatgtgcccttcactacctcggctggagtctgcagggtgaagacaatagcgaacggagagattcgctagtaccaccacatcaccgaactgcagccagcggagccagtctgtgtctggtttcgctgaaagcgattgttcctgattttcatcttcgaaaattttggtatttccatttgttcaaataccgcaaagcaaccatgatttagaaaaatacagagagtgccctttccgcatcctcttttttatcagttagtacttggctcctgttgtctcactcggaggctccatgcttcttgctctatctgtatttccttagaagtgattctttacctgctcttatttatagttccatatgaaaggaacgaagtgtatcagaacatcactttatatataggagggcctgtctgtcactgccccctgtcaatgcatggaaaggagcaagcaaggaagcttgaaggaactgtaaacagagcttggccaatgggcagcgcccgctagat

SEQ ID NO: 211083 - DNA, 1889 bp, Zea Mays
cacgtgggcatctgcctctctcgtttcggtgctattcgccccccaaactccggacgagccttccgcgcgacgctgcacggctccgccagccacccgtaaaaccctagacggctagccggcgcacggaagcgggcagcggagcggaggtgagcctctcctgcatcggattgtccccgcccccgctaggcgccatgaagctgacggtgaagaccctcaagggaacgcacttcgagatccgggtgcagcccaacgacacgggtaaaacatctggttcaactggaacttcatcttcccagcactcaaacactcctgcaacaaggcaggcacctcctctagaggccccacaacaagctcctcaacccccggtggcaccaattacaacttctcagcctgaaggacttcctgcacaggcacctaacacacatgacaatgcggcatcaaatcttctgtctggaaggaatgttgacacaataattaaccagctaatggagatgggtgggggcagttgggacaaagataaagtccaaagggctctccgtgccgcttacaacaaccccgaacgtgctgttgaatacctctactctggtattccagtaacagctgaaattgctgttccaattggtggtcaaggggcaaacacaactgatcgagctcctactggggaagctggtctctctgggattccaaacaccgctccactagatcttttcccgcagcagggggcttccaatgctggaggtggtgctggtggtggaccacttgattttcttagaaacaatccacagtttcaagcagttagggaaatggtccatacaaatccacaaattttgcagcctatgctcgttgagttgagcaagcagaatcctcaaattctaaggttgattgaggagaatcatgatgagtttcttcagttactaaatgagccctttgaaggcggagagggggatttcttagaccaacctgaggaggatgaaatgcctcatgccattagtgttacaccagaggagcaggaggccattggacggcttgagtccatggggttcgacagagcacgcgttattgaagcattcttagcctgcgataggaacgaggagctagcagcaaactatctccttgagcatgctggtgaggaagattaagcgggagtagttttcatacggtgagaactctgctatcctctggttggttaccctccttaacatatatggcaagtggctcactgtggggtgatttcctttttttcttcttttgaaccttgcctctcgtcgacatctgaccgacattgatcaagattttttttagtaccgagtgacgaagagttgatatggagctgacgatcatttgaattgatttcgttgtgcaagacttgtattacataaacatttaaatacatgtagctgaacatttcagtagaaatgctacggttgtggtctcccatcgttgactttcattagcgtggtggtaaacatcggttctgctcctgtcctgtattaacacaagcttggcttgggaggaagcacaaggagctattgccacctagcaaaaggataaaagggaggatgacgaattggcgatgtgtttgcgacacgctgccctcaagtgtggatgatgagtgcagataggttgatgactgtgccaaggctgtcaagtgtgtaaacgaacgctgccttcgtagttctgacaactgcgacagttctgtagctagacctatttgctatcttcatgataaaattatctaaatgggacggtccttgaccgattaattgcacgatctaaggtgagaaaaagtacataatcgcttggattgcgtcaggtatgaaaacgctttgcatcccatttcacagggtgcagcttagtagcttttcctcaaccgatgccaggcaaatgca

SEQ ID NO: 211084 - DNA, 1660 bp, Zea Mays
ccgagccagactctacagccctgcatccgtgcggccgtgcgtgcgtcaacgccagtcagtacgtcgctgcctttcctctcccgactcccgttcaccacactactttccctcgtgcggccgccgccctacaacaggtgccccaggtcttcgctgcgccattcgccagcgacgagcacccaacagcatggtcaaccgcaatgacctcatgtactggattgtcgcggcactctgatgtggttgccgccgcggggcaccagaagttgatggggtctttgaacaacaacgagggactcatgtttggggtggttgtggcacggttcaacgaggtcgtgacaaatttgttactacagggtgccctggaaactttcgagcgatactctgttaaagcagaaaatataacagttgttagtgttcctggaagctttgaagttcctataacggcacaaaagcttgggaaatctggaaaatttgatgcaattctgtgcattggagctgtgattagaggtgacacaacccactatgatgccgttgcaaactcagctgcatcaggtgtactcaatgctggattatctgctggtatgttgttttctgttcttccctatcatgtgtcatgcagtactgggtaattctaggtacgttcattttcttctatttttaagtgttaaaaaggtggtctagcaagttgaaatattgaactcttaaacatattcccacaggtattgaaacttgttttatatgtttcattgttgtttctcagcgaatatgcatatataagtacaatggcaaaaaaaagtcacaagcatgttggggtagactaaaattttgccagtacagcttacagaaatctacaatagttaatgcgagcaactagtgtgggactggaaggttttggttatatgagagaattgtatagttggtgctataaaagtacttcacaacattaagtgaaactttgcagtgtgctcatcttgttttttctttatgatggttaattcagttaataataaaaattcagattattttggcttttaatggtgatacaggtgttccttgtgtatttggtgttctaacctgtgaagacatggatcaggtacttcatggtttgattatgtacatctttaatccagaatggccacattagcgaagctgaggtttcacacaagtattcccttgtgacgagaaagtttcatgtcaataatgtgacctctttttttgttggttatctggctacttttcaagacctgatcactgttttgctccttatcgaaatcctgctgagaatgctaaatcgcatactgcaggcactgaaccgtgctggtggcaaggctggaaacaaaggagctgaagctgctcttactgccattgagatggcctcgctgttccggcatcacttaggctgacaccttgtgtattctgattttctatacacgaggcggcagcatttcctcctatcaagagttttggctaatagagagcttttccgccgcggctagtataatttatttccaagtttgttggtccggtgcggattggttgctttccttctgagacctgaaaagctcacaagacatgtctgtaaacctgacatcgtgaataattgtctccacgaacgaaatatggtcatgaataaagctgcacaagtgttttgttacgtatgatt

SEQ ID NO: 211085 - DNA, 1205 bp, Zea Mays
agccagactctacagccctgcatccgtgcggccgtgcgtgcgtcaacgccagtcagtacgtcgctgcctttcctctcccgactcccgttcaccacactactttccctcgtgcggccgccgccctacaacaggtgccccaggtcttcgctgcgccattcgccagcgacgagcacccaacaggggtgtacatgtcgatgttgcctctttattcggcgctaagaagctcagaaacatcgctgacatccacatgcaccacagtagttcagtagagtagctgttggaacccacacaccggcgatggcaactgctcctgtgacatcctccatggctacgaactccacctgtgtgcggctgcctagcatgcccctgaggcgtgcacccgccatcgtctcctttgcctctcgtccatggtcaaccgcaatgacctcatgtactggattgtcgcggcactctgatgtggttgccgccgcggggcaccagaagttgatggggtctttgaacaacaacgagggactcatgtttggggtggttgtggcacggttcaacgaggtcgtgacaaatttgttactacagggtgccctggaaactttcgagcgatactctgttaaagcagaaaatataacagttgttagtgttcctggaagctttgaagttcctataacggcacaaaagcttgggaaatctggaaaatttgatgcaattctgtgcattggagctgtgattagaggtgacacaacccactatgatgccgttgcaaactcagctgcatcaggtgtactcaatgctggattatctgctggtgttccttgtgtatttggtgttctaacctgtgaagacatggatcaggcactgaaccgtgctggtggcaaggctggaaacaaaggagctgaagctgctcttactgccattgagatggcctcgctgttccggcatcacttaggctgacaccttgtgtattctgattttctatacacgaggcggcagcatttcctcctatcaagagttttggctaatagagagcttttccgccgcggctagtataatttatttccaagtttgttggtccggtgcggattggttgctttccttctgagacctgaaaagctcacaagacatgtctgtaaacctgacatcgtgaataattgtctccacgaacgaaatatggtcatgaataaagctgcacaagtgttttgttacgtatgatt

SEQ ID NO: 211086 - DNA, 860 bp, Zea Mays
gtgtccaaaccttctccacgcgttccttccttccctccctccctccctcccctcccaagaaacacaagagccaggcagcgcttgcgaggctcaagcgccgcagcaatgtctctggccccgtccatcccttccatcaaggtgaaggtggggcccgtctcggtggcgcccccgcaccgcgcatgccgatccttcgcggtggtcaggagctccaaggcggagggccccatccggagacccgcggcgcccccgctgtcgccaccgccaaagacgccggctttgtccactcctcccaccctgtcgcagcctcccaagcccgctgctccacccacgtcgtcggagtcgacaccaccgtctcctcagccgaaggcggctgtggccacagcccccgcggcagcgctgcagaggccgctggctggggctgtgacgctggagtaccagaggaaggtggccaaggacctgcaagactacttcaagaagaagaagctggacgaggccgaccagggcccattctttgggttcgtgcccaagaatgagatttccaacggaagattacatgtgttgttgtgttatacatatggtgtgcggaaacaaatcctggagacccaggcattttcgattcaacgaagaatttgaagtaagataagaatgaaaagcactcctatgtgaattcggatcaggggattaatcatggagaaggccattaagtgagacttttggtactgctgataacagtgagaagctgagcagcatgcttgagaggtaggaagctacactgtccctatgaagttattcatgatgacagtgtcaaatgatttggcgagtgttatttttcgggtaaaaaattatttgtactgtcaaaa

SEQ ID NO: 211087 - DNA, 1707 bp, Zea Mays
ctctatatgactagagtgtaggcgtccacacctctatggtgaagcctgcccttgcccccgccccgtatctctcgctgtctacgcccaccaacggatccgctctcccatggaaggaaactctccaccgcgtccatggaagccgcccggatctgcgtgcgcaccatctctctcgcccccgacccgtctctctcgctgcccagccacgttcgctctccaccgcgcagatcctcgcttcgcaatcaacgctcccttgacttaccagttaccacaccaacccaaccccgactctccatggaaggcgcgacgaccgagacccagctctccatggaaggcgtcaacatgccctcgtccccgctcgcccacgcatgcgcgcgcccacgtggctgggcagctcccgcaccctagcctgtgccttcgccacgccctcgcccacgccaacccctgcctctctcccgccgcgtccgcgttccggatctgtcgcctcccgccgcgccctgcctccctctcccaaccttgccagcaggaccaccgtcggcgatgcctccctcctgtcgcaccttacctcctcatcccgacctctccaccacgcccatgtccccattgtcgctcgtgctgggcccgtgccagactcatccacgccgctgatgtagagcgtgcgctaggcgagggggtgagtgcgtgaccgagatagaggctgcgacaacctccccggccaccttgccatctccatcgtcctcggggccaatgctggtagaggcactttggttcctggatgacctacaaggaatgggagatggtgggtaagcgtggggtgtagatccttccaggctcagatcgatttcttcgttcgctgctcgacaaacagatctgagtgtcagctcgacaaactcatgcttgttgtcggcacctaaaaaatagtgaagcgggtgaaagtgaaggttgtttgcccctcataatgttccatgaaaccgaacaacagtcaaactgttagttgagcattccttaatgcatttggatcaattgttctcaatgcgcctgttggaatcaagagttattacctcagcttattcttagagttgtcacatattgccatgcccttcataagagttgagtgtcctacttccgggtgcccatgattggaaggtctcttgggttgattttctcagggactacacaatcactaggctggaaattagcttatacttgcatgagctcaccttgtcatttgtggaagcattcactgtctcctgataagggtgagcttcacatctttagaacagacacgttgaaggaaatgagtatccgagtaccaagaacgaaagaagagcttttggatataaatggcctctacaagtaatgcagctactctgccttttttgaatgaattatgtatgctgccatccttttgttttcaaaaagggcttggtcccggtttgttcctttctttgttttttctcgaacgtttcttgtcgcggtctcatggtggttgctataactcaatctccagttcacagtagggttgaacaaagtataaggggcaggttgactcttctcacttgaaacgaaaattgcaggggctatgttgtgtaatggtaatatagtgtcacatcaaaccattgtccctgactcagttcatgctattcatgtgtgacatgtgtccagactttagagatcagatactatatgtggcttgtgtttttggctggt

SEQ ID NO: 211088 - DNA, 2014 bp, Zea Mays
cctgcccttgcccccgccccgtatctctcgctgtctacgcccaccaacggatccgctctcccatggaaggaaactctccaccgcgtccatggaagccgcccggatctgcgtgcgcaccatctctctcgcccccgacccgtctctctcgctgcccagccacgttcgctctccaccgcgcagatcctcgcttcgcaatcaacgctcccttgacttaccagttaccacaccaacccaaccccgactctccatggaaggcgcgacgaccgagacccagctctccatggaaggcgtcaacatgccctcgtccccgctcgcccacgcatgcgcgcgcccacgtggctgggcagctcccgcaccctagcctgtgccttcgccacgccctcgcccacgccaacccctgcctctctcccgccgcgtccgcgttccggatctgtcgcctcccgccgcgccctgcctccctctcccaaccttgccagcaggaccaccgtcggcgatgcctccctcctgtcgcaccttacctcctcatcccgacctctccaccacgcccatgtccccattgtcgctcgtgctgggcccgtgccagactcatccacgccgctgatgtagagcgtgcgctaggcgagggggtgagtgcgtgaccgagatagaggctgcgacaacctccccggccaccttgccatctccatcgtcctcggggccaatgctggtagaggcactttggttcctggatgacctacaaggaatgggagatggtgggtaagcgtggggtgtagatccttccaggctcagatcgatttcttcgttcgctggagcattccttaatgcatttggatcaattgttctcaatgcgcctgttggaatcaagtaagttacattcagaaagaatttgaccttccattgttagtttgcatatgatgtagcagcggtaaaactagatctcgatgaaagtcattgacatgtgcaactaactgttagaaaagtgtactgattcgaagtatgtttagctatagtttttatctttgtacctcctcttttagatagagttagattgcatcagatatcttctctcttgtattcccaattgcaaagtaatattggttccatctctgttgggtaatggaaagaatagatgttgatcggtttgtgccatatcctaagaaaacaaaatatacgcgagttgtggtggatgctctgtagtcaatgtagtaatgccccagatcagtgttgttcctttaaagtttaaactatattttgcttgtgattaaatttgcagatcacttccactgagatgattaattttgccatttgtatcatacctaaattaagaaaaataatattgtgttgattaactgcaggagttattacctcagcttattcttagagttgtcacatattgccatgcccttcataagagttgagtgtcctacttccgggtgcccatgattggaaggtctcttgggttgattttctcagggactacacaatcactaggctggaaattagcttatacttgcatgagctcaccttgtcatttgtggaagcattcactgtctcctgataagggtgagcttcacatctttagaacagacacgttgaaggaaatgagtatccgagtaccaagaacgaaagaagagcttttggatataaatggcctctacaagtaatgcagctactctgccttttttgaatgaattatgtatgctgccatccttttgttttcaaaaagggcttggtcccggtttgttcctttctttgttttttctcgaacgtttcttgtcgcggtctcatggtggttgctataactcaatctccagttcacagtagggttgaacaaagtataaggggcaggttgactcttctcacttgaaacgaaaattgcaggggctatgttgtgtaatggtaatatagtgtcacatcaaaccattgtccctgactcagttcatgctattcatgtgtgacatgtgtccagactttagagatcagatactatatgtggcttgtgtttttggctggt

SEQ ID NO: 211089 - DNA, 1572 bp, Zea Mays
ctctcgctgtctacgcccaccaacggatccgctctcccatggaaggaaactctccaccgcgtccatggaagccgcccggatctgcgtgcgcaccatctctctcgcccccgacccgtctctctcgctgcccagccacgttcgctctccaccgcgcagatcctcgcttcgcaatcaacgctcccttgacttaccagttaccacaccaacccaaccccgactctccatggaaggcgcgacgaccgagacccagctctccatggaaggcgtcaacatgccctcgtccccgctcgcccacgcatgcgcgcgcccacgtggctgggcagctcccgcaccctagcctgtgccttcgccacgccctcgcccacgccaacccctgcctctctcccgccgcgtccgcgttccggatctgtcgcctcccgccgcgccctgcctccctctcccaaccttgccagcaggaccaccgtcggcgatgcctccctcctgtcgcaccttacctcctcatcccgacctctccaccacgcccatgtccccattgtcgctcgtgctgggcccgtgccagactcatccacgccgctgatgtagagcgtgcgctaggcgagggggtgagtgcgtgaccgagatagaggctgcgacaacctccccggccaccttgccatctccatcgtcctcggggccaatgctggtagaggcactttggttcctggatgacctacaaggaatgggagatggtgggtaagcgtggggtgtagatccttccaggctcagatcgatttcttcgttcgctgctcgacaaacagatctgagtgtcagctcgacaaactcatgcttgttgtcggcacctaaaaaatagtgaagcgggagcattccttaatgcatttggatcaattgttctcaatgcgcctgttggaatcaagagttattacctcagcttattcttagagttgtcacatattgccatgcccttcataagagttgagtgtcctacttccgggtgcccatgattggaaggtctcttgggttgattttctcagggactacacaatcactaggctggaaattagcttatacttgcatgagctcaccttgtcatttgtggaagcattcactgtctcctgataagggtgagcttcacatctttagaacagacacgttgaaggaaatgagtatccgagtaccaagaacgaaagaagagcttttggatataaatggcctctacaagtaatgcagctactctgccttttttgaatgaattatgtatgctgccatccttttgttttcaaaaagggcttggtcccggtttgttcctttctttgttttttctcgaacgtttcttgtcgcggtctcatggtggttgctataactcaatctccagttcacagtagggttgaacaaagtataaggggcaggttgactcttctcacttgaaacgaaaattgcaggggctatgttgtgtaatggtaatatagtgtcacatcaaaccattgtccctgactcagttcatgctattcatgtgtgacatgtgtccagactttagagatcagatactatatgtggcttgtgtttttggctggt

SEQ ID NO: 211090 - DNA, 732 bp, Zea Mays
ataatttactatgctaaatggctaggagataaaaagagagtgtttggcatgacactgctacccctttcaagcaagtgctgcaagagtttgaggactggcttggaaatcacaacctgtggaaaaaggagcaagtggaaactgggatttgaagacaaaggtccctgagcagtgcaaggtttcaaaaataaatttacctacctattttatggaatggattaacttgaaggatatctacctcaacttctataacagaagggcaactggaatgatgacaatgatgagagaacttcaactgccaattgttggaaaccaccatctcgggatagacgattcaaaaaatatcgcaagagtggttcagcgcatgcttgctgatggtgctgtgattcaaatcactgctaagagacagtcagctactggcgatgtgagatttcttttcaaggaccgaattaggtgattgaaaagtgacacccccaattcatagtggtgctgatattagttgcctgaaaggcatttcaggattttggagcaaagatagagcgactgaacgctcaatcaacatacaaatatgtctagaaattgtgatgctttaaccaaacaagatcaaattactgtccccaagctcatcttagagtttcaactaaatcacaaattaaaggaaccgtgatatgtgaattagttaacgtaaaatctaccaaggtctctaatttttttttaccatattttgaaatctac

SEQ ID NO: 211091 - DNA, 620 bp, Zea Mays
tgccagaaggtcttgaaactattcagcggcgccggggtcaacaaaccgagaaaccgatcctacttacgggaccaggaaaggttggacaagctctgggcctatccactgactggtcgaaccatcctctctacgcgcctggtgggttggaggtactggacgggccagagccggagagcattttggttggtccccgcgttggcatcgagtacgcgtctcccgagcatgtcgcggcgccgtggaggttcgcgattgccggcacgccgtggatcagcgcccccaaaaacacgctacggccacgctactgaccggtgtctgaacaggaaccgttcgagtcccgttccaacccgaattgccatgtgtttgtatttgcttgacacttcggaatgctgcctataactggctcttgtaaatgtatcacagtgtgttcgacaaaaaggcctacgaactctacgagggcgggtgcccgggccgaacattctcaaatgttaaaagcgtggagtgtgtttgaagggctgagaaagatgactagagagaagtaaataagagtcaattaactatttttttcctgaaatagccgttgtcctagaaaactcaaatcaaaacatcgaactgtgtcactc

SEQ ID NO: 211092 - DNA, 1473 bp, Zea Mays
gctatcgtccttagtcgttgacatttctattgccgtttctatgaaagcagccgcagtatattgaattcggaattagcccaatccgtgctgctgccgtctgtctttccctatcctcctcccaagaaagcctcgccgcaatagtttggcatccatgggattcttccattgcatctccaccgtcaactccacgcatcccttaacgagcactgaagcccggcaagccccggatcgccgatgaccacttccggcgcgcccaagcgcccaagcttcaagcgctcctcgcccgggaagaagtcgcggctcagaacccgtcgcgtcgccgccggtggccgagagggcgaggccgaggccgaggcggcggggacctcggcgctggcgagggcattgcttcccgcatcggtggggctagacgcggtgccgcctgttgggcgcgcattgccgcgagacttcttcgaggtggatgccctcgacctggccccccgcctcctcggcaagctccttcggcgcgatgaggttgtcctccgcatcaccgaggtggaggcttataggccaaatgactccgcatgccatggccggttcggcatcacagcgaggacagctccagtgtttggaccgggaggccatgcatatgtgtatctgtgctatggacttcacatgatgctcaatgtggttgccgatatagagggggttggtgctgccgttttgatccggtcatgttctccagttagcgaagaggaaaatggaaatctgtagcactagataattatgtgatcaggaggaatataggaggcgttgatcatctttgcccacaaatatccacaacaatgcattctccatgtcgctttcaactcaaggcagaaaagtcttgaaactattcagcggcgccggggtcaacaaaccgagaaaccgatcctacttacgggaccaggaaaggttggacaagctctgggcctatccactgactggtcgaaccatcctctctacgcgcctggtgggttggaggtactggacgggccagagccggagagcattttggttggtccccgcgttggcatcgagtacgcgtctcccgagcatgtcgcggcgccgtggaggttcgcgattgccggcacgccgtggatcagcgcccccaaaaacacgctacggccacgctactgaccggtgtctgaacaggaaccgttcgagtcccgttccaacccgaattgccatgtgtttgtatttgcttgacacttcggaatgctgcctataactggctcttgtaaatgtatcacagtgtgttcgacaaaaaggcctacgaactctacgagggcgggtgcccgggccgaacattctcaaatgttaaaagcgtggagtgtgtttgaagggctgagaaagatgactagagagaagtaaataagagtcaattaactatttttttcctgaaatagccgttgtcctagaaaactcaaatcaaaacatcgaactgtgtcactc

SEQ ID NO: 211093 - DNA, 3392 bp, Zea Mays
gcacggctgcacgtcaagacctccacgaccacgactggaccgccgccgagcggcgacggcccctccctcctccattcccccgcgtccctctgccggatcctcccgtccccgccgctctccgcccgggcgcggacgttcgaaagattccttccgtgcaccttggcccactcatgtgggagcaggcagcactagttaactaaacaatgaggcagcagactggtaagcgtccctcccaacacagggaatatgaaagagaagaaaggaaggaccaacacaagaggccgtttccccgtgctcaggaaagctctaataatgatgggctggttctttaccgtatactctgtccagacagtttgattggtagtgtcataggaaagcatggcaatgtgataaatgctatcaggcatcagacaagtgccaaagtcaaggttgttgacccgtaccccggtgcagacaaaagggttatcttggtatattgctacgtcaagcatagagaccttgatgctgagggtgatgacaatgagcctgtttgtgcagctcaagatgcattacttagggtgcataatgcaattgttgatgcactgcagacattacataagaatcataaagactctgataagaagagcacagaggaagctaacattcttgtgccagctagtcaggcatcaaatgttataggaaaatctggtgctgtcatcaagcatcttcggtcaacatcaagagcattcattaaagtgagcccaaaagatccaagtgaccctacacattcatgtgctatgagttttgataattttgttcagataactggtggtgctgaagctgttaaaaaagcactgtttggagtatcaaccatcatttacaagcacccatcaaaagagaacattcctcttgaaacttcaattcctgatcctactccaagcattataatcccttcagaacttcctgtctatcctgctagtaacttttactcggccccagatgctgctataccttctgtacatccaagcatgtctgtcttagggtcaacacgtcatgttcccgaacttgctgtacctgccgatgatcatggtcggctgcctatttatcaatctattcttccagttattcctacttatagtgccccaaaatgttcaggagaacttgagtttcgtgttttatgccctggtggaaaaattggcttggttattggaagaggtggggctaccataaagaatataaggcaagagagtggtgcaaggatagatgttgatgatgcaaagaatgacaaggaggaaagtatcattaccattatatccactgagtccaccgatgatgttaagtctgccgctgtggaagctgttttgctgcttcaagccaagatcaatgattctgaggatgatagaatgaatcttcgccttcttgtgccaaataaggttataggctgtcttattggcaggggtggttcaatagtcaatgacatgaggaagaagactaaggcaaacatcctcatttcgaagggcgataagccccggagagcatcttccagtgatgaacttgttgaggtatctggagaagcagacaagctgcgtgatgctcttgttcagataattttaagacttagggaagccgttctgaaagagagtgttgaaagccaaaattctgacagggatggccaactaactgttgctgcctctgattccttatatggaagcagtcttcctttgcctgcattattacctcacaaccaacaaattgcccccttgggctatgatagaagaggtgaacctgagcgagctctggaagtattccctcgtaccagttcgtatgggtatagttccatgcaggtcacggatgatggctatggaggacttccatcctatgcatcaaaggcatatgaagaacatgtaccacgtttggaaatgactgtacctgctagtggcatctcaaaagtaatgggaaaacatggcacaaacttggacaacattagaaagatttctggagctcacattgaaattattgaaccaaaatcctctcgtcatgagcatattgcttacatatctggaacctctgaacagaggcattcggctgagaatttgatcaaagctttcataatgtctacctaagattccttctgtggtctgagaacaccatttcatcaatttgatctcttttgacttctgctatccatagtttccctgggtttgtgaacatcaaacgtagtgttttctcccacctgtccgagttcccaatgaatactgggcatatctgagcaaggtgtactccagtggtagacaaggcactctatgttccttagatcttcaactgttacctatttatgttggcatacttatcataattcgcgtgtcttactctaaattatctcaatgactggaccagttgctgcttactgatatctctttctattgtcctgccaatactgagttgattattccttcacaactacagtagaggggcctgtttctcaacctcaacgtctgattcactttctgcttagtgtagctcttataatttcatcccatcagactgctatctgattcattaggttagtagtaccaatgccctatttggaatttggaatgcgagaatgaacctttcacgaaaggcttgtccaaaactccttgagattcctgtgtttcaaacactctttggaattcccagtgaatgctgttggctgattcatttggtgcttattgagtttttgtatctctactctgcctatgctgctagctgtgaccttagagaggatcttgttccttgtcaatctgactagttcacccattgcttgcttcggtagttcggttcttatatctttgtcatgtcattaccttactctttcatcatcggttccaaagagttgcttgtttttctgctaactctgctgaggaaccataagttctttgtaaacttgcctgaaaaccctagaggcctagacttttaggagcaaccatgtacataagcttagtcacgttcttggatcacaatatgcagatcaattttttagcattctgcaagtgttttgtgatcatgattggtgggcgtctagaaaactattctaacgtttcagttgtctgaaaaactatcttatctttgttgtagccctgcctatgctactaccagcttggatggggcttcttcctgctcagtctgtgactggttcacccattgtgctttgtcctgtcagtaatcgtctaattctttggttattgggttccaaagagtttcatgtttttctgcagtaattaattctactgtggaaccatatattaataagttctttcggaacctggattatagccatacattattcagaagcatccatattccataatcttattcaagcccccctccgtaaaaatctcttaagccctctatcaaactaaatccactccatc

SEQ ID NO: 211094 - DNA, 821 bp, Zea Mays
gaaaatttgataaaaacattggtcaagagcccgatgcattagatttgttcaaggagtgtcattacagcaggaaaaagaaatgttacacatctaccgtgcaacaagctataactcaaatggataacaagcggtctgcaactacagaaggtgaaaaatcaatgtctgcaactgaagttgttgctaatgtgcttgctgaaaatacaaagaagaatttgttccttcaaaatgtggggatacaaaatgttggtcctaggtctagtctgagaaatattgaagcacagttggaagtggagaagagggcaaacagtgaccttaaatctattgttgatgctcaacatgaacaattggatgcattgttaaagcaaatgcaagaaactgaagaaaataggatcagggagcaagaggaagtgaagaagaagcaagctgagatggaaacaaagatgcaacttgtgttgagtcagattcattcaagattgagatagtatttatgtcatgttgacaactttttttgttgttgcaacaactttctttcttttttatggaaccaactataatgttttggatatgatgtggtgttctggttggatagtctttattgtttgggattgtccatgtgaagttctagttggatatttgaatttaaatattgatattttgtcattataattgttatgttatgtgctgattgtgcttttgatgtgagaatgaaattattgaaaattattatgggctgtagttataaatggtcgataaaatttctagattttagccttggcaaaaataattaaactgaataaaataaatgcacaaattaaaatcaa

SEQ ID NO: 211095 - DNA, 1986 bp, Zea Mays
ccttcattggcctcatctctccctccctccttgacccatctgcgacttcccctgcattaaggatgacctcttctctctaggtcttacaaccctagacgtggaatcaggatcagtgtgcacggggaaccagcaacggcagcacgtacgtggaaccggcaccgacgaattgcacggggcagcagacaatcgtcgcctccttgactccatccgcgaccttcctccatccgtggtgccagcaaactgcacgagaagacctaggtcaggtgactcggtgctagccacactattacaagatgcctcctagtcgtttgcaggttggaacaaaaacaacagaaggacataaccaagcaggaaacacattacatccatatgaagtgcagcgccttagacaagttatgagaaacaatgcaaggctgcaacaactgggaattcctggtttatgcgacacactgccaaaggcatattcctttcatcacaacaaaaataagccaaattttacaaataatgaagattcagaatctgattataatccttcatcaaatgacactggtgaagaagatttacttgatgatgacaatgttcagggctcgaaggattataatatgaggactacaaacatgtctaatggtgtaatcaagctacgcactaaaagacttcttgcagagaaagaatctattagaattacaaggtcaaaaaaaactgctgcccagcctaatggtactgaagtgtttgacaacaacgatggccatacccaggctacagttcaagctagtgaccctgctctatttgacgagtacacccacatggctaatggaggtcattccattgctcgccctgatgggcacaacctgatgggaaacaaaggcaaagtttgatatcaacacaaatgatgcaccagtccaaaaggcttgttcccaaatgatgaaaaatgctataaggcaacaacggtacagactaaagaaaaaattctttgatccttttccactacatttggtgacaaaaacatcaccaatcagatcgatgagtaatgaagagtggaatgatcttgtggaatattggaagagcccaaaaaggatggagacatcacaaaagaacaaagataaccgatccaaagttaaatttcatcaaacaacgggatctcgtagctatatggttcatgtagaaaatttgggagataaaaacattggtcaagagcccgatgcattagatttgttcaaggagtgtcattacagcaggaaaaagaaatgttacacatctaccgtgcaacaagctataactcaaatggataacaagcggtctgcaactacagaaggtgaaaaatcaatgtctgcaactgaagttgttgctaatgtgcttgctgaaaatacaaagaagaatttgttccttcaaaatgtggggatacaaaatgttggtcctaggtctagtctgagaaatattgaagcacagttggaagtggagaagagggcaaacagtgaccttaaatctattgttgatgctcaacatgaacaattggatgcattgttaaagcaaatgcaagaaactgaagaaaataggatcagggagcaagaggaagtgaagaagaagcaagctgagatggaaacaaagatgcaacttgtgttgagtcagattcattcaagattgagatagtatttatgtcatgttgacaactttttttgttgttgcaacaactttctttcttttttatggaaccaactataatgttttggatatgatgtggtgttctggttggatagtctttattgtttgggattgtccatgtgaagttctagttggatatttgaatttaaatattgatattttgtcattataattgttatgttatgtgctgattgtgcttttgatgtgagaatgaaattattgaaaattattatgggctgtagttataaatggtcgataaaatttctagattttagccttggcaaaaataattaaactgaataaaataaatgcacaaattaaaatcaa

SEQ ID NO: 211096 - DNA, 2843 bp, Zea Mays
caccttggcgtggaatggtgttgggtggatccctataagaccgcgcggatgctagacacgaatctgcgttggggtgggggtttggtggaaatcgaccgtgccataatggaagagagcgggaactgctgcatatatgctcatggactacctctcaaacatcggagacaggagatgttgcagatcaaacaagagaaagaagagatggatcgaagttacaagggacaactgtattcaaatgatactacgataaaggaaaaagattcgctcatcaagcagttggagggttcacttgatgataataaatcccgcttgatatatcttgactcccgcttgcaatgcatggagcaagaactgaagctaaaagatgatgtttgtatcagcctgaaaggaaacctagctagcagtgaaagtgaaaagaacagtttggagcttatgaataagggacacattctggaaattaaaaaactatgccaggacaacaaggatcttaatgaattgtttagcagcttcatggttaaagtaactgagctagataaagaacatgcctctatgtcaagtcatgtgtctaggctgatttcttcatttgaaagattctatgaaatggcccaagaggagaaaatgctaatggcaagatcttctaaggataaatttgaacatcttcaaagccagtatgtagatttgacatcagaaaacaatgctctcaaaactgaaattgaagaactgaagtccagactcatagagttgcagagaactcaagaaattgttatggttcaacatgttgaagaatgccaagtggctgaagataagatcagaagattagagtctgaagctgaagtttctgcctccaacataaatcagttagaaaaattagcttcagaactacaagggagaattcagaagttactagaagattctacctttgctgaaaatcacaagcaagagttgcttcaaaagattttgaagctagaatcagataatcaggaactcctaggacaaatgcagtccattatggaagagaaatcaaataatgctgaatctctgcatggagagataactaagcgtgaccagcaggttgatacacttgagaatcagatcaaccagcttcgtagtgttctggatgagaaggagcaactctatctttgttctgtacaaaaagagaagactttggaggaacagaaattacaggtcgaagcattgctttctgcaacagagtgcaaacttagtgatgcaaaaaaacagtatgatttgatgcttgaaggcgaaaagatagagctatccaagcatttgaaagagctatctctcaaaaatgaccaggcgatcaatgaaatccgtaagaaatatgaacttgaaaagattgaaattactaatgctgaaaaagaaaaggtaagttaaattctattttagaaattatttgtgcaagatgtctataatgctcaagttattctaatgccataatttttatgaatgtttgggaattcaggcagaaaagctcataagggaaattgaaaacaaatgcaacgaaaagatatcacagaacaagcatgattctcagaggtatttgatttgccttaaggaggaacatggcacaacggtggcgagaattcagcaggataatgagcataaagagtcaactctccgggcttatcacaaagaagaactgcagcgcattcaatctcaggctgagaatgaaatgagggagaggttgtcattgctcagaaaagagcatgaagttcaaataaaatcactaaggatgcatcatgaggaagaatgccagaggatgcaggaggaactggagcttcagaagtccaaggaggagaagcaaagagcattgttacaattacagtggaaagtaatgggagaaagtcaacgagttgatcaagaagtgaactctaagaagatttttcaggaatactctgtttcgtcgattaggaggagcgacccatatggaagaaaagaacaagaggtccagttggtaagtccggagaccaatcggaaggacgtaaacttacctgggattttacaatcaccaatttcgaacatgttgagaaaggtagagaaagtgtctcaggatattcctaaacatagaaaggtaacccaccatgaatacgaagttgagacagcaaatggaagaatcacaaagcgcaggaaaactaggagcactgtcatgtttggtgaaccgaactctcagaaaccattgcataatactactgacaaagatgttaaaaaactaaaaaaggttcctacaagatcccgtgcacatcctgcaaacattggtgaattattctctgagggttccttgaatccgtatgctgacgacccttatgcttttgactagaagctcacgcctggaagtatcatttttgcaagcacgatgacgaattctggaacacacaattaccaccaccgtgttgggtcaatcctacggcttttccctggtcatccgtccatcataatgtacatgactgccgttgactcatgtatctctgaagtattgctactgcaacaaccatcacgattgtcggatatgtaggtgtagatttgtgaatgaactgtacatgccataactacggagtaactgaatatcctcagataaaacgctttgtacgcgtcgtgcgatgctgttggattggaatcgtgtttgccctttcctccagatgccaaggcccggtggagtagatgggctccggtctggaagtggggcacagcatgtggatacaggattaatgccactgggtgtttgcatctatggaacgacggaaacaattcggatcgatatttgcttaacaaccatcaggcactgattggttggccagacgacgaattggagagggtagacttttttc

SEQ ID NO: 211097 - DNA, 3290 bp, Zea Mays
cctcatttcaacttcaccccgcgtacgcgcgcttgctctctctctccgcattcccattcactacccgcgtgctcgcgcgctcgcgctctctccgcgacgactgggtgtgggctaccgccgccctacgccaggtgccgaggcttcgtcgatctcttcgccggcgacgagcacccaccaggatgcaaaagcactcggggcttcggagcctcgaggggttccgatccctcgttggatccacctcgacagccatgaaggtcgcgaaccccaggccctccccggatactgggggtatttcgtatgggagcttcgccaaccttaagatcacagcagagaaattagtcaaggagcaggcttcagtgaagactgatctagaaatggccatgtcaaattgagaagagcaacagaacagataaacattatagagggaaaacttcaacaagctttgaatgaaaatgcaaagcttaaggtgaagcagactgaagattcgaagctctggcagggattagattcgaaactctcctcaacaaagaccttgtgtgatcaactgactgaaactcttcagcagctagctagtcagacagaacaagctgaggaagacaagaagttttttgaggagatgcttgggaagaattccaaagctctagatgaattcaactgcttgttgcgtgatttatcaacaaaactggagtatgcggaacaaaagataatttcagggagacaggagatgttgcagatcaaacaagagaaagaagagatggatcgaagttacaagggacaactgtattcaaatgatactacgataaaggaaaaagattcgctcatcaagcagttggagggttcacttgatgataataaatcccgcttgatatatcttgactcccgcttgcaatgcatggagcaagaactgaagctaaaagatgatgtttgtatcagcctgaaaggaaacctagctagcagtgaaagtgaaaagaacagtttggagcttatgaataagggacacattctggaaattaaaaaactatgccaggacaacaaggatcttaatgaattgtttagcagcttcatggttaaagtaactgagctagataaagaacatgcctctatgtcaagtcatgtgtctaggctgatttcttcatttgaaagattctatgaaatggcccaagaggagaaaatgctaatggcaagatcttctaaggataaatttgaacatcttcaaagccagtatgtagatttgacatcagaaaacaatgctctcaaaactgaaattgaagaactgaagtccagactcatagagttgcagagaactcaagaaattgttatggttcaacatgttgaagaatgccaagtggctgaagataagatcagaagattagagtctgaagctgaagtttctgcctccaacataaatcagttagaaaaattagcttcagaactacaagggagaattcagaagttactagaagattctacctttgctgaaaatcacaagcaagagttgcttcaaaagattttgaagctagaatcagataatcaggaactcctaggacaaatgcagtccattatggaagagaaatcaaataatgctgaatctctgcatggagagataactaagcgtgaccagcaggttgatacacttgagaatcagatcaaccagcttcgtagtgttctggatgagaaggagcaactctatctttgttctgtacaaaaagagaagactttggaggaacagaaattacaggtcgaagcattgctttctgcaacagagtgcaaacttagtgatgcaaaaaaacagtatgatttgatgcttgaaggcgaaaagatagagctatccaagcatttgaaagagctatctctcaaaaatgaccaggcgatcaatgaaatccgtaagaaatatgaacttgaaaagattgaaattactaatgctgaaaaagaaaaggcagaaaagctcataagggaaattgaaaacaaatgcaacgaaaagatatcacagaacaagcatgattctcagaggtatttgatttgccttaaggaggaacatggcacaacggtggcgagaattcagcaggataatgagcataaagagtcaactctccgggcttatcacaaagaagaactgcagcgcattcaatctcaggctgagaatgaaatgagggagaggttgtcattgctcagaaaagagcatgaagttcaaataaaatcactaaggatgcatcatgaggaagaatgccagaggatgcaggaggaactggagcttcagaagtccaaggaggagaagcaaagagcattgttacaattacagtggaaagtaatgggagaaagtcaacgagttgatcaagaagtgaactctaagaaggaatactctgtttcgtcgattaggaggagcgacccatatggaagaaaagaacaagaggtccagttggtaagtccggagaccaatcggaaggacgtaaacttacctgggattttacaatcaccaatttcgaacatgttgagaaaggtagagaaagtgtctcaggatattcctaaacatagaaaggtaacccaccatgaatacgaagttgagacagcaaatggaagaatcacaaagcgcaggaaaactaggagcactgtcatgtttggtgaaccgaactctcagaaaccattgcataatactactgacaaagatgttaaaaaactaaaaaaggttcctacaagatcccgtgcacatcctgcaaacattggtgaattattctctgagggttccttgaatccgtatgctgacgacccttatgcttttgactagaagctcacgcctggaagtatcatttttgcaagcacgatgacgaattctggaacacacaattaccaccaccgtgttgggtcaatcctacggcttttccctggtcatccgtccatcataatgtacatgactgccgttgactcatgtatctctgaagtattgctactgcaacaaccatcacgattgtcggatatgtaggtgtagatttgtgaatgaactgtacatgccataactacggagtaactgaatatcctcagataaaacgctttgtacgcgtcgtgcgatgctgttggattggaatcgtgtttgccctttcctccagatgccaaggcccggtggagtagatgggctccggtctggaagtggggcacagcatgtggatacaggattaatgccactgggtgtttgcatctatggaacgacggaaacaattcggatcgatatttgcttaacaaccatcaggcactgattggttggccagacgacgaattggagagggtagacttttttc

SEQ ID NO: 211098 - DNA, 3360 bp, Zea Mays
gcgcgctggtgctggtgcgctttcactgtgccgactgggccgaacaaccccagactcggctgccgcgcgcctcatttcaacttcaccccgcgtacgcgcgcttgctctctctctccgcattcccattcactacccgcgtgctcgcgcgctcgcgctctctccgcgacgactgggtgtgggctaccgccgccctacgccaggtgccgaggcttcgtcgatctcttcgccggcgacgagcacccaccaggatgcaaaagcactcggggcttcggagcctcgaggggttccgatccctcgttggatccacctcgacagccatgaaggtcgcgaaccccaggccctccccggatactgggggtatttcgtatgggagcttcgccaaccttaagatcacagcagagaaattagtcaaggagcaggcttcagtgaagactgatctagaaatggcgcatgtcaaattgagaagagcaacagaacagataaacattatagagggaaaacttcaacaagctttgaatgaaaatgcaaagcttaaggtgaagcagactgaagattcgaagctctggcagggattagattcgaaactctcctcaacaaagaccttgtgtgatcaactgactgaaactcttcagcagctagctagtcagacagaacaagctgaggaagacaagaagttttttgaggagatgcttgggaagaattccaaagctctagatgaattcaactgcttgttgcgtgatttatcaacaaaactggagtatgcggaacaaaagataatttcagggagacaggagatgttgcagatcaaacaagagaaagaagagatggatcgaagttacaagggacaactgtattcaaatgatactacgataaaggaaaaagattcgctcatcaagcagttggagggttcacttgatgataataaatcccgcttgatatatcttgactcccgcttgcaatgcatggagcaagaactgaagctaaaagatgatgtttgtatcagcctgaaaggaaacctagctagcagtgaaagtgaaaagaacagtttggagcttatgaataagggacacattctggaaattaaaaaactatgccaggacaacaaggatcttaatgaattgtttagcagcttcatggttaaagtaactgagctagataaagaacatgcctctatgtcaagtcatgtgtctaggctgatttcttcatttgaaagattctatgaaatggcccaagaggagaaaatgctaatggcaagatcttctaaggataaatttgaacatcttcaaagccagtatgtagatttgacatcagaaaacaatgctctcaaaactgaaattgaagaactgaagtccagactcatagagttgcagagaactcaagaaattgttatggttcaacatgttgaagaatgccaagtggctgaagataagatcagaagattagagtctgaagctgaagtttctgcctccaacataaatcagttagaaaaattagcttcagaactacaagggagaattcagaagttactagaagattctacctttgctgaaaatcacaagcaagagttgcttcaaaagattttgaagctagaatcagataatcaggaactcctaggacaaatgcagtccattatggaagagaaatcaaataatgctgaatctctgcatggagagataactaagcgtgaccagcaggttgatacacttgagaatcagatcaaccagcttcgtagtgttctggatgagaaggagcaactctatctttgttctgtacaaaaagagaagactttggaggaacagaaattacaggtcgaagcattgctttctgcaacagagtgcaaacttagtgatgcaaaaaaacagtatgatttgatgcttgaaggcgaaaagatagagctatccaagcatttgaaagagctatctctcaaaaatgaccaggcgatcaatgaaatccgtaagaaatatgaacttgaaaagattgaaattactaatgctgaaaaagaaaaggcagaaaagctcataagggaaattgaaaacaaatgcaacgaaaagatatcacagaacaagcatgattctcagaggtatttgatttgccttaaggaggaacatggcacaacggtggcgagaattcagcaggataatgagcataaagagtcaactctccgggcttatcacaaagaagaactgcagcgcattcaatctcaggctgagaatgaaatgagggagaggttgtcattgctcagaaaagagcatgaagttcaaataaaatcactaaggatgcatcatgaggaagaatgccagaggatgcaggaggaactggagcttcagaagtccaaggaggagaagcaaagagcattgttacaattacagtggaaagtaatgggagaaagtcaacgagttgatcaagaagtgaactctaagaaggaatactctgtttcgtcgattaggaggagcgacccatatggaagaaaagaacaagaggtccagttggtaagtccggagaccaatcggaaggacgtaaacttacctgggattttacaatcaccaatttcgaacatgttgagaaaggtagagaaagtgtctcaggatattcctaaacatagaaaggtaacccaccatgaatacgaagttgagacagcaaatggaagaatcacaaagcgcaggaaaactaggagcactgtcatgtttggtgaaccgaactctcagaaaccattgcataatactactgacaaagatgttaaaaaactaaaaaaggttcctacaagatcccgtgcacatcctgcaaacattggtgaattattctctgagggttccttgaatccgtatgctgacgacccttatgcttttgactagaagctcacgcctggaagtatcatttttgcaagcacgatgacgaattctggaacacacaattaccaccaccgtgttgggtcaatcctacggcttttccctggtcatccgtccatcataatgtacatgactgccgttgactcatgtatctctgaagtattgctactgcaacaaccatcacgattgtcggatatgtaggtgtagatttgtgaatgaactgtacatgccataactacggagtaactgaatatcctcagataaaacgctttgtacgcgtcgtgcgatgctgttggattggaatcgtgtttgccctttcctccagatgccaaggcccggtggagtagatgggctccggtctggaagtggggcacagcatgtggatacaggattaatgccactgggtgtttgcatctatggaacgacggaaacaattcggatcgatatttgcttaacaaccatcaggcactgattggttggccagacgacgaattggagagggtagacttttttc

SEQ ID NO: 211099 - DNA, 3034 bp, Zea Mays
cccccccccccccccggggtgccggcggccgaaatgtgatgatgagttcttgtggcgtccgcccatcatcatagttccctgtcgtccttggcccatttgttcctgtcctcgggggagcgaggcgtcggggctcgcgcgcttcacgtgttgattcctcgctcccgcacactgcctcctcgtcggatttcgtggaagggacggtgtgaatgaaaggcgctcaggataaaaggcacagaaagaagcaggacctccaggttctcgggcccttcccgggatgcctggggaggatgatcaacatgttagacctcagcaatggcgtggttgctaccaagatgctcactgagaaggcgcatagagatgtttctccggccggaaaagaccggagtaatactttcaagatggcaattaatcccccagctcagactgaagataaacaaagggatagtcagacaagaaggaatttccctactaaaaggtcaaactcgcctactaaaaggactggtgcgatgcctgttaaaatgctgatggagcaggacatgtggaaagaaagacggcctgatgaggagccactgaatgttgttgcaagattaatgggcctacatgagcctccaggtcagcaatccaatttccctttaggaagacaattggataagaaatatcagtgtggtggttttgaagagaactactggaatctcaagtcaaagaaggaaagcaaatgccaccaaaaccaaaaggcagggccacgccatcagcacacttggaatggttctggtgaccaaccatcaagaatcagtagcagccagagcatgcaccaagaaaatgagacttgtgagaagaggatgtcaattgttcgcgagaagtttgctgaagcaaagcgactagccacagatgagaaacttcttcattcgaaggagttccaagatgcactgcagtttttaagctcaaatagagacctattcttggagttccttgacgagccaaatcctctattatcaagcaaccgttatgagttccaacctgttgcaccaccttctgaagtaaagcaaataaccatactgaagccatcagaaccagcaaagagaaaagacagcatctttgtggggagacaactgttttcagatggagatggaggtgaaagtgaacgaaacagatacaggcgccatcagagttcggatgtttccccagcaaattcaaatttgtctgagccaacaaaaattgtagtactaaaaccaggattccccagttctcatgactccaggattgcgaggtcttcattatcatcagcagaagacagtgaagatgaaagtatgatggcggttgatgaaaccatgtgctcaagaaggttggcaaaggagatcacttggcagatgaggatgcggctaaaagacaggcaagacgaagagagtatgctctcatgtgaataccctgacttttatatcggagatgactccttcagtaaatcagaagttgagattccaaaagagatgtgtggtgaaacaagtggggaattggagtttggcactccgacttctggccgctcttgggattttctgagtagaagtggaagtcctttctctgcgtcatgctctagtcaggcatcccatagaagggagccgtcagtagttagggaaggcaagaagaagattttagagagattgtctatggtatcatcaacagtcaatattgaggaagaaatggaaggtcgcagaagtacaggcacacttggtgacatgctcacaatatcgaaagtcaaggaccaggaagaaattggggctgaaacactggggagcccagcacctgagctggaacctgaggagcctttctcatgtttgccaagatctcgatcccttccactttctttgtcctatggagtcgctgagtcaaatggaataacctctggcactcatgaagctgaaaaggaaagaatcaggaagtcgtcatcgtttagggaaaaagtttctagcctgttctctaaaaataagaaatcaaccagggagaaggtagatccatctgtgagcaatagactcaaacatggaggggctgtgactactggtgatgtgaaggaaatctgcaaccatcttgccctagacaatcttcagaaacaacatacttgtctaaacacagatgagaagaacactgtgcaaggactcgtgactagttcttgtgagaccaatagtgcagctgatatccctgccaaggatatttcctccatttcaagtcttggtgtcccaggaatctttggtggccttcaggatgaacctagtcctgtatctgtactagatggaccgtttatatgtgataacaataggaggctactgtactcatctgaaaatttcatcacttcatccccacaagctttgtcaaggtctcccctgatcggatcattttcacggtcactgtcatgggaggatcccccgctggaagtcatgtcgccgaattcgttgagactctcaaggcttttctcgaaggctgatgaagatctagattcactgacgtttatccagaagctggtccactctcgaggcacgggtcgagaaagttgcatattagctgaccctttggacccgagtttgctcgagaagatttcggattacgaagaagatggaattaagtttgggaaaaggcggcccaaacagaggctccttttcgacgccgtaaacgaagcgctcatcgagcttgcttcgatggcggaactggctgcgtacccctggggtagatcatgctcttcggagcacggggattgcaagaacggttccagcagtaattctgcggctgaggaaatctggcgggtcattaggaactggtcgatacttgagaagtaccctcccggtgaagctattgaaagaaatctcttgctggagatgatactaaagagggaggtggcggaggcagccagcgctgacacgactcggttagagacgtttgatctcaacaccacggtctgcgccatggtcttggatggcctggttgaagagacagttgtagatctgactaactactgctagtgagggttcctgtgggcttggctgccatt

SEQ ID NO: 211100 - DNA, 986 bp, Zea Mays
tggaggttgagatgaacgtctctcgccaaaactccatctaaaatagcagcgacgagacgagcgagaatatctgccaattcaaaaccaaaaaggagaggaggggagccccggacggagaagagaacagaagaaaccccgcggccaccccttcctgcctatatttctctctctgtcttgcgcgacagggagagaccagcgccaacacctccggtttcttgattgggtggtgatcggtgaaggaaggagaaattaagatgagcctcttcgggcttgggagcaagaatcagaagacgttcaggcctaagaagaatgcaccgtctggcaacaagggtgtgcagctgaagaaacacatcgatgcaaccttaggaagcgggaatttgagggatgctgtccgattgccaccaggggaggatctcaatgaatggctagctgttaacagtgaacatcctgtatggtactctaatggagttctgcacaccagctacatgcccaacaatgtcagctggaccaaagtttgagtatagatgggccgatggggtgcagatcaagaaaccaattgaggtttcagcaccaaagtatgttgagtacttgatggattggatcgaagctcagcttgatgacgaatccatcttccctcagaaactcggaaccccttttccacaaaatttcaaggaagttgtgaagacaatctttaagcgacttttccgtgtttatgctcatatttaccactcacattttcaaaagattgtcagccttaaggaggaagcacatcttaacacttgcttcaagcattttacattgttcacttgggaattcacgttgattgacaaggctgagcttgcaccacttattgatctaattgaatccattgtttcagtttgttgacatgacatcaatgattatttggatcattttcttatttttggagagcaaggagttacaactaagtgtccagtatgagggttgtgataggtttggcaagccaa

SEQ ID NO: 211101 - DNA, 1399 bp, Zea Mays
tggaggttgagatgaacgtctctcgccaaaactccatctaaaatagcagcgacgagacgagcgagaatatctgccaattcaaaaccaaaaaggagaggaggggagccccggacggagaagagaacagaagaaaccccgcggccaccccttcctgcctatatttctctctctgtcttgcgcgacagggagagaccagcgccaacacctccggtttcttgattgggtggtgatcggtgaaggaaggagaaattaagatgagcctcttcgggcttgggagcaagaatcagaagacgttcaggcctaagaagaatgcaccgtctggcaacaagggtgtgcagctgaagaaacacatcgatgcaaccttaggaagcgggaatttgagggatgctgtccgattgccaccaggggaggatctcaatgaatggctagctgttaacactgttgatttcttcaaccaggtgaacatcctgtatggtactctaatggagttctgcacaccagctacatgcccaacaatgtcagctggaccaaagtttgagtatagatgggccgatggggtgcagatcaagaaaccaattgaggtttcagcaccaaagtatgttgagtacttgatggattggatcgaagctcagcttgatgacgaatccatcttccctcagaaactcggaaccccttttccacaaaatttcaaggaagttgtgaagacaatctttaagcgacttttccgtgtttatgctcatatttaccactcacattttcaaaagattgtcagccttaaggaggaagcacatcttaacacttgcttcaagcattttacattgttcacttgggaattcacgttgattgacaaggctgagcttgcaccacttattgatctaattgaatccattgtttcagtttgttgacatgacatcaatgattatttggatcattttcttatttttggagagcaaggagttacaactaagtgtccagtatgagggtgtgtttccatagggataaacaaaacaagattgcgagaacaaagtggtggaaactgaaaggagatacatcaaaagtctcaagaaaagggccatcaaagaagacacttggaaggaagaagatgacataaacaacatgtggaagaagatggcaccctatatttgcgaggtgtgtggagcaactaaagggagtggatgcgaagctaaaggtacttggtagtggaagtacatggatgatttgatacttgtcaatacagtgtattagcgcaacagtgtttttcagcctctcgcaatagggtacagtgcgggggtatttataggtaaccaggggacgatttcaccctctcaaatacagttatgcccctggttacctacgttatccctgaaatattcccctctcaagggttattacaagtcat

SEQ ID NO: 211102 - DNA, 1136 bp, Zea Mays
tcgctgttagttctcttcagattttcttctgcctgcggaatcagaagacgttcaggcctaagaagaatgcaccgtctggcaacaagggtgtgcagctgaagaaacacatcgatgcaaccttaggaagcgggaatttgagggatgctgtccgattgccaccaggggaggatctcaatgaatggctagctgttaacagtgaacatcctgtatggtactctaatggagttctgcacaccagctacatgcccaacaatgtcagctggaccaaagtttgagtatagatgggccgatggggtgcagatcaagaaaccaattgaggtttcagcaccaaagtatgttgagtacttgatggattggatcgaagctcagcttgatgacgaatccatcttccctcagaaactcggaaccccttttccacaaaatttcaaggaagttgtgaagacaatctttaagcgacttttccgtgtttatgctcatatttaccactcacattttcaaaagattgtcagccttaaggaggaagcacatcttaacacttgcttcaagcattttacattgttcacttgggaattcacgttgattgacaaggctgagcttgcaccacttattgatctaattgaatccattgtttcagtttgttgacatgacatcaatgattatttggatcattttcttatttttggagagcaaggagttacaactaagtgtccagtatgagggtgtgtttccatagggataaacaaaacaagattgcgagaacaaagtggtggaaactgaaaggagatacatcaaaagtctcaagaaaagggccatcaaagaagacacttggaaggaagaagatgacataaacaacatgtggaagaagatggcaccctatatttgcgaggtgtgtggagcaactaaagggagtggatgcgaagctaaaggtacttggtagtggaagtacatggatgatttgatacttgtcaatacagtgtattagcgcaacagtgtttttcagcctctcgcaatagggtacagtgcgggggtatttataggtaaccaggggacgatttcaccctctcaaatacagttatgcccctggttacctacgttatccctgaaatattcccctctcaagggttattacaagtcat

SEQ ID NO: 211103 - DNA, 1261 bp, Zea Mays
gcttagctaaaagttgatttaagtgagcaggatgactatgaagttgtcaggaaggtcgggagaggaaaatacagtgaagtatttgaaggtattaatgttaacaataatgagaaatgcatcatcaagatcctcaagcctgtgaagaaaaagaagatcaaaagagaaattaaaattcttcagaatctttgtggaggccctaacattgtgaagctgctcgatattgttagagatcagcattcgaaaacgcccagcttgatctttgaatatgttaacaacacagatttcaaagtgctgtacccaacattaacagattatgacattcggtattacatctacgagttactcaaggcattagattactgccattcacaaggtattatgcaccgagatgtgaagccccacaatgttatgatagatcatgagcttcggaaactccggctgatagactggggtcttgctgaattctatcatcctggcaaggaatataatgtccgtgttgcatccaggtacttcaaggggcctgagcttcttgttgacttgcaagattatgattactctttggacatgtggagtctgggctgcatgtttgctgggatgatttttcgtaaggaaccatttttctacgggcatgacaaccatgatcaacttgttaagatagccaaggtacttgggacagatgggctgaatgtttatttgaacaagtacagaattgagcttgaccctcagcttgaagccctcgttggaaggcatagcaggaaaccctggttaaagtttatgaacgcagataaccagcacctagtgtctcctgaggccatagatttccttgacaagcttttgcgttatgatcatcaggagaggcttactgcacttgaagctatgacgcacccgtacttccaacaagtgagagccgctgagaacagcaggacgcgagcgtgacaggcaaagagcgaagaccatctgctcttttatcagtcagtcaggttgtatgagatgagtagccgttgggtcacttggcagaaaataaacaatagcggtagagcctgtactgtacgtaacgtaacctcctcgaggagttgtgaggtttgggacgtgattgcgaacatggtatattaatgattgttcatgtaaggtgctgtttggttcaagaaatgtaacacaaatggtaatggtaatggtttacgctcgattactggcggtaacaaatttgaataggctgatatcaatttttagtgtgttatttgattacggttggactaaaaca

SEQ ID NO: 211104 - DNA, 1970 bp, Zea Mays
  misc_feature (1969)..(1970): n is a, c, g, or t
gtgattttttttttggaaaacaaatcggtcacgcggcacatagaaacccaaaagaaacgccattgaaaacgcgactggggcacgcaactctatcgatctccgcccacctcgtccctcacttgccctctccctgccaggcttgccggaaccctagcctcatcgcccctcccctcccggcccgatctccctatcgccggattcgtgctgcgggatggactccgacgtggagatgaacgccgccagcgacgaggaggtgatggacgatgaggattactacgactactgctacagcgacgtgggtgacgacggcgacggcgggagcgaggaggagctggtgcccgtggactacgacgagggccttgaggccgagggtaccgacgaggtggtgtccagacgcgagcagacatttgtggttctaaatgaagaagttatatctgagcgtcaagaggaagatgtaagcaaggtatcagccgtgttactgattacaagggaagaggcatgtgccctcctgcatcactataaatggaacatcagcaagttgagtgatgaatggtttgcagatgaagaaaaagtccgccatactgttggcttacttttgaatggaaatcatgagcccggctctaggaagggtattcttctgatacgatgagctctgctggttgtgctcatttttattgccatgaatgttgggaaggctacattagcgctgcaataggtggtggtccaggatgtttgtctttgcgatgtcctgatccatcatgcagtgctatggttcttcaagggatggttaatgaattagctaaagatgaggacaaagcaaagtacgcacgatttctcttacgtgcatacgttgaaggtagcaagaagactaaatggtgtccagctcctgactgtacatgtgctgtggagtttcttggtgatgaaaactatgatgtctcatgcaattgcaagttcagcttttgctggaattgcactgaggaagctcatcgaccagtgaactgcgagactgtttctaagtggatattaaagaatagtgcagaatctgaaaatatgaactggtttgtcgcaggctcaggactagcgtttgatatgtggtcttcaagtttctgtttttgttgataccatctttagttaagacatggcatataaataaggagttccttgattttattttggatgattcaacctattcaactttataccttctgattttgattattttttgtaatgtttcgtttatcagttcagactaagcacaatgataactaattcttgtgtggttggatcttcatatcctatttcaccgaccttttagcggtttattgaacaatgtaaatgtcacaatcctggaactattcgccttgactgctgacaataagtgagatggtgaaacaaatctgcctaaagctagttgtttagggcctttaggctcacaggcttttgataccatttctctaaggcatttaagctgaattggaaatgggtggggaagccacggcaaatatttatgtgaggttgaatcataggtgttgtgactgttgtcaactatgaaaaatatcctagtaatttaattattttaacataattttaagatagcatttttgtttactgcaagttgcttgggatcaataggcattgtcgttactgctgctatagattgacgatagctaccttttctctgaacatgtaggagagctgcatatcattatattaagaaggtgatgagtatagctagtttgactttatgtggcttgtaaatgtttgggattgatttaattttcatttatttgtcttgttgtttcttaaaaaaatccctcactaggcagtaggcacaagcaactaaggcactgttcaacttaaacttcgcattacctgcattatataaacatgttattgaggtaatgtgccaatgattgtttttattagctggtaatcatgattttttattctattccttgtggcactccann

SEQ ID NO: 211105 - DNA, 1206 bp, Zea Mays
  misc_feature (1205)..(1206): n is a, c, g, or t
aaatcggtcacgcggcacatagaaacccaaaagaaacgccattgaaaacgcgactggggcacgcaactctatcgatctccgcccacctcgtccctcacttgccctctccctgccaggcttgccggaaccctagcctcatcgcccctcccctcccggcccgatctccctatcgccggattcgtgctgcgggatggactccgacgtggagatgaacgccgccagcgacgaggaggtgatggacgatgaggattactacgactactgctacagcgacgtgggtgacgacggcgacggcgggagcgaggaggagctggtgcccgtggactacgacgagggccttgaggccgagggtaccgacgaggtggtgtccagacgcgagcagacatttgtggttctaaatgaagaagttatatctgagcgtcaagaggaagatgtaagcaaggtatcagccgtgttactgattacaagggaagaggcatgtgccctcctgcatcactataaatggaacatcagcaagttgagtgatgaatggtttgcagatgaagaaaaagtccgccatactgttggcttacttttgaatggaaatcatgagcccggctctaggaagctaacctgtggaatatgttttgaagggtattcttctgatacgatgagctctgctggttgtgctcatttttattgccatgaatgttgggaaggctacattagcgctgcaataggtggtggtccaggatgtttgtctttgcgatgtcctgatccatcatgcagtgctatggttcttcaagggatggttaatgaattagctaaagatgaggacaaagcaaagtacgcacgatttctcttacgtgcatacgttgaaggtagcaagaagactaaatggtgtccagctcctgactgtacatgtgctgtggagtttcttggtgatgaaaactatgatgtctcatgcaattgcaagttcagcttttgctggaattgcactgaggaagctcatcgaccagtgaactgcgagactgtttctaagtggatattaaagaatagtgcagaatctgaaaatatgaactgtaggcacaagcaactaaggcactgttcaacttaaacttcgcattacctgcattatataaacatgttattgaggtaatgtgccaatgattgtttttattagctggtaatcatgattttttattctattccttgtggcactccann

SEQ ID NO: 211106 - DNA, 1179 bp, Zea Mays
  misc_feature (1178)..(1179): n is a, c, g, or t
gtcacgcggcacatagaaacccaaaagaaacgccattgaaaacgcgactggggcacgcaactctatcgatctccgcccacctcgtccctcacttgccctctccctgccaggcttgccggaaccctagcctcatcgcccctcccctcccggcccgatctccctatcgccggattcgtgctgcgggatggactccgacgtggagatgaacgccgccagcgacgaggaggtgatggacgatgaggattactacgactactgctacagcgacgtgggtgacgacggcgacggcgggagcgaggaggagctggtgcccgtggactacgacgagggccttgaggccgagggtaccgacgaggtggtgtccagacgcgagcagacatttgtggttctaaatgaagaagttatatctgagcgtcaagaggaagatgtaagcaaggtatcagccgtgttactgattacaagggaagaggcatgtgccctcctgcatcactataaatggaacatcagcaagttgagtgatgaatggtttgcagatgaagaaaaagtccgccatactgttggcttacttttgaatggaaatcatgagcccggctctaggaagggtattcttctgatacgatgagctctgctggttgtgctcatttttattgccatgaatgttgggaaggctacattagcgctgcaataggtggtggtccaggatgtttgtctttgcgatgtcctgatccatcatgcagtgctatggttcttcaagggatggttaatgaattagctaaagatgaggacaaagcaaagtacgcacgatttctcttacgtgcatacgttgaaggtagcaagaagactaaatggtgtccagctcctgactgtacatgtgctgtggagtttcttggtgatgaaaactatgatgtctcatgcaattgcaagttcagcttttgctggaattgcactgaggaagctcatcgaccagtgaactgcgagactgtttctaagtggatattaaagaatagtgcagaatctgaaaatatgaactggcagtaggcacaagcaactaaggcactgttcaacttaaacttcgcattacctgcattatataaacatgttattgaggtaatgtgccaatgattgtttttattagctggtaatcatgattttttattctattccttgtggcactccann

SEQ ID NO: 211107 - DNA, 1189 bp, Zea Mays
  misc_feature (1188)..(1189): n is a, c, g, or t
gaaacccaaaagaaacgccattgaaaacgcgactggggcacgcaactctatcgatctccgcccacctcgtccctcacttgccctctccctgccaggcttgccggaaccctagcctcatcgcccctcccctcccggcccgatctccctatcgccggattcgtgctgcgggatggactccgacgtggagatgaacgccgccagcgacgaggaggtgatggacgatgaggattactacgactactgctacagcgacgtgggtgacgacggcgacggcgggagcgaggaggagctggtgcccgtggactacgacgagggccttgaggccgagggtaccgacgaggtggtgtccagacgcgagcagacatttgtggttctaaatgaagaagttatatctgagcgtcaagaggaagatgtaagcaaggtatcagccgtgttactgattacaagggaagaggcatgtgccctcctgcatcactataaatggaacatcagcaagttgagtgatgaatggtttgcagatgaagaaaaagtccgccatactgttggcttacttttgaatggaaatcatgagcccggctctaggaagctaacctgtggaatatgttttgaagggtattcttctgatacgatgagctctgctggttgtgctcatttttattgccatgaatgttgggaaggctacattagcgctgcaataggtggtggtccaggatgtttgtctttgcgatgtcctgatccatcatgcagtgctatggttcttcaagggatggttaatgaattagctaaagatgaggacaaagcaaagtacgcacgatttctcttacgtgcatacgttgaaggtagcaagaagactaaatggtgtccagctcctgactgtacatgtgctgtggagtttcttggtgatgaaaactatgatgtctcatgcaattgcaagttcagcttttgctggaattgcactgaggaagctcatcgaccagtgaactgcgagactgtttctaagtggatattaaagaatagtgcagaatctgaaaatatgaactggcagtaggcacaagcaactaaggcactgttcaacttaaacttcgcattacctgcattatataaacatgttattgaggtaatgtgccaatgattgtttttattagctggtaatcatgattttttattctattccttgtggcactccann

SEQ ID NO: 211108 - DNA, 1879 bp, Zea Mays
  misc_feature (1878)..(1879): n is a, c, g, or t
aaacgccattgaaaacgcgactggggcacgcaactctatcgatctccgcccacctcgtccctcacttgccctctccctgccaggcttgccggaaccctagcctcatcgcccctcccctcccggcccgatctccctatcgccggattcgtgctgcgggatggactccgacgtggagatgaacgccgccagcgacgaggaggtgatggacgatgaggattactacgactactgctacagcgacgtgggtgacgacggcgacggcgggagcgaggaggagctggtgcccgtggactacgacgagggccttgaggccgagggtaccgacgaggtggtgtccagacgcgagcagacatttgtggttctaaatgaagaagttatatctgagcgtcaagaggaagatgtaagcaaggaacatcagcaagttgagtgatgaatggtttgcagatgaagaaaaagtccgccatactgttggcttacttttgaatggaaatcatgagcccggctctaggaagctaacctgtggaatatgttttgaagggtattcttctgatacgatgagctctgctggttgtgctcatttttattgccatgaatgttgggaaggctacattagcgctgcaataggtggtggtccaggatgtttgtctttgcgatgtcctgatccatcatgcagtgctatggttcttcaagggatggttaatgaattagctaaagatgaggacaaagcaaagtacgcacgatttctcttacgtgcatacgttgaaggtagcaagaagactaaatggtgtccagctcctgactgtacatgtgctgtggagtttcttggtgatgaaaactatgatgtctcatgcaattgcaagttcagcttttgctggaattgcactgaggaagctcatcgaccagtgaactgcgagactgtttctaagtggatattaaagaatagtgcagaatctgaaaatatgaactggtttgtcgcaggctcaggactagcgtttgatatgtggtcttcaagtttctgtttttgttgataccatctttagttaagacatggcatataaataaggagttccttgattttattttggatgattcaacctattcaactttataccttctgattttgattattttttgtaatgtttcgtttatcagttcagactaagcacaatgataactaattcttgtgtggttggatcttcatatcctatttcaccgaccttttagcggtttattgaacaatgtaaatgtcacaatcctggaactattcgccttgactgctgacaataagtgagatggtgaaacaaatctgcctaaagctagttgtttagggcctttaggctcacaggcttttgataccatttctctaaggcatttaagctgaattggaaatgggtggggaagccacggcaaatatttatgtgaggttgaatcataggtgttgtgactgttgtcaactatgaaaaatatcctagtaatttaattattttaacataattttaagatagcatttttgtttactgcaagttgcttgggatcaataggcattgtcgttactgctgctatagattgacgatagctaccttttctctgaacatgtaggagagctgcatatcattatattaagaaggtgatgagtatagctagtttgactttatgtggcttgtaaatgtttgggattgatttaattttcatttatttgtcttgttgtttcttaaaaaaatccctcactaggcagtaggcacaagcaactaaggcactgttcaacttaaacttcgcattacctgcattatataaacatgttattgaggtaatgtgccaatgattgtttttattagctggtaatcatgattttttattctattccttgtggcactccann

SEQ ID NO: 211109 - DNA, 1405 bp, Zea Mays
  misc_feature (1404)..(1405): n is a, c, g, or t
caagatttacatttcacatttctatgcttttcttatcaaagcagaagcagcatgtgtaatctgggtattcttctgatacgatgagctctgctggttgtgctcatttttattgccatgaatgttgggaaggctacattagcgctgcaataggtggtggtccaggatgtttgtctttgcgatgtcctgatccatcatgcagtgctatggttcttcaagggatggttaatgaattagctaaagatgaggacaaagcaaagtacgcacgatttctcttacgtgcatacgttgaaggtagcaagaagactaaatggtgtccagctcctgactgtacatgtgctgtggagtttcttggtgatgaaaactatgatgtctcatgcaattgcaagttcagcttttgctggaattgcactgaggaagctcatcgaccagtgaactgcgagactgtttctaagtggatattaaagaatagtgcagaatctgaaaatatgaactggtttgtcgcaggctcaggactagcgtttgatatgtggtcttcaagtttctgtttttgttgataccatctttagttaagacatggcatataaataaggagttccttgattttattttggatgattcaacctattcaactttataccttctgattttgattattttttgtaatgtttcgtttatcagttcagactaagcacaatgataactaattcttgtgtggttggatcttcatatcctatttcaccgaccttttagcggtttattgaacaatgtaaatgtcacaatcctggaactattcgccttgactgctgacaataagtgagatggtgaaacaaatctgcctaaagctagttgtttagggcctttaggctcacaggcttttgataccatttctctaaggcatttaagctgaattggaaatgggtggggaagccacggcaaatatttatgtgaggttgaatcataggtgttgtgactgttgtcaactatgaaaaatatcctagtaatttaattattttaacataattttaagatagcatttttgtttactgcaagttgcttgggatcaataggcattgtcgttactgctgctatagattgacgatagctaccttttctctgaacatgtaggagagctgcatatcattatattaagaaggtgatgagtatagctagtttgactttatgtggcttgtaaatgtttgggattgatttaattttcatttatttgtcttgttgtttcttaaaaaaatccctcactaggcagtaggcacaagcaactaaggcactgttcaacttaaacttcgcattacctgcattatataaacatgttattgaggtaatgtgccaatgattgtttttattagctggtaatcatgattttttattctattccttgtggcactccann

SEQ ID NO: 211110 - DNA, 3924 bp, Zea Mays
atctccccactcctaccggcctgcagctgtttgcgaggcaagcgtgtcttctgcgcgcgcgacggacggcgcgagggcaagcagcgcctccgtgttccgcccgtgcgaagggaggggaacgagagctccggcggcggcccccgcctcgccccatgtctgtgcctctcgtcgggttggctgatacccctatcccaacatcttcttccctcccattcccatggagctcctcccggctccctttccctctttcctccctagaccccaccaactgcctctttccagaccctgccatggccgcctccaagagcccatcacggctgctttcgcgcaggctcctcccctcgcgctccccttccaagaagcaactagaagaagcagcagctcccataccccacgcccaagtacccgtccgtgcccccccgcccagagaccaacaacaactcacccgctgccgccgccgctgccgcctggcccttccccttcctccggcagcactggcagtgagcgcctgattgtttccgagacgaagctcatcacggtgcactcctgcgctgggcgcctaggggacgctcgcaaggtgttcgaaggaatggcgtgcagggacctgctcgcctggtcggccatgatcggtgcctacgccatcaggggcctgtacgaggaggtcgtcgcgctcgcggtggccatggtcagggaaggggtcatcccggacaggttcctgatcacccggattctacaggcctgtgcgtacacagaggacctggagctcgggacggcgatgcattccctggcgatccggagaggtttcatggcggagggagcgagggacgtgcccgtggggaactcggtgctggccatgtacgtcaagtgcggagagttgggccgtgcgcgcgccgcgttcgacatgatggggcagcgggacctgtgcacgtggaactcgatgatcttcgggtgctgccgctccaacgaatgggaagaggcacggaggctgctcgacgatatgaggcgccaaggtacagagcctgggcttgtcacatggaacacgctggtttcgagctacgcgaggtctggggaacttgatgtggccatggagatgctggagcagatggaggagtccggtgttgctccggacgtcgtcacctggactagccttgtgtctggttttgtccacggtgataggggtggcgaagcactttggtgtttcgcgcgcatgcgccttgctggagtcgaaccaaacggcatgacaattgcgagtgccatctcagcttgtgctagtttgcggttgctgagtcagggcatggagctccattgccacgcaattaaggttgggagtgtgaacaatgtgctctcggggaactccttggttgacatgtatgcaaaatgtggagaaatcattgcagctaagagagtatttgatgaaatacccgagaaggatatcttctcctggaactcgatggttgcagggtatgcacaggcgggctattgcggcaaagcatatgagcttttctgtgagatggagagccttggtgttcggcgcaatgtgatcacgtggaatataatgatctcgggatacataagaaatggggatgatgagagagcttttgaactatttcagatgatggaaagctgtggagtaaaaagggacacagcttcatggaatgcactcattgctggttcggtgcataatggtcattctgatagagccctgagaatattctggcagatgcaatcactcttggtgagaccagacttcattacaatattaagtatcattccagcttttgcgaacctagctggattttggaaagtacgggagatccacgcctgcatttatcacaacaatttagaaatggatggcaaaatagcaaatgcactcatcaatgcctattcaaaatctggtgaccttgctggtgcttgtgctgtttttgataggcactcatcaaggaacattatttcttggaattgtataattcttgcacacttgctgcatggttctccaagtgaagcactggatcgcttttgtgagatgaaacaagaaggcgtgcggccagatcatacaactttgactgccgtaatcaaggcctatggcctccagggaaaggtatctgaggcgaaacgaatatttcacaatatgacccacgattacaacattattccagatttagatcattacacagctatagttgatctccttggccgctcagggagtctacaagaagcgtacgagtttattggtaatatgccactcatacccaatttagcagtctgggaggcattgcttactgctgcaactattcatggaaatgcaaggctcgcaaacctgacagcaagagagttgtcatcgcttgatccgagtgaccctagaatccaaagactggtttttaattactggggtctaactggaaagtctgttgatgtgccactcatgacggtatacaacggaggaagagagttggaagatgttgatagttgttcggttgaaatcaagaacaatgtctatttgttctcaaccggtgataatttagcattagagagtacagttgctgaattgaagctgattatgattcagatccgaatgtcattgctgaacatctctaatgagactaacgctgaagaagagaaagaagaattatcaggaatacattgtgagaagctagcaattgcttttgcaatttcaaattcccctcctttcagaagcatacggataataaagaccttaaggatgtgtagccattgtcacatctttgccaagctagtttcagaaaaatacgagcggcagatactaatcaaggattcaaattgtttgcacaagtttgaggatggaaagtgctcttgtgaaggttattggtgaatacaactaatataagtgcaccaatggtttctgttcatttatgcgtcgtccatactggctttttcatgtatgtgagtgtagtgttatcagttcatagttgtattggtacgaaaaattactgtagccagttttgctcataaaaaaacctaatgttgtcttattgctatattttagttggaagtagtagatatctttatcttctttggctgaggcttactatactttagttaagttctcgcaagcttgaatttactggtgttcaaatgctatctgctacggacagaggaagagctccccctacggtttctagcaactctaataagggaatgacaacgttcagcggtttatggaatctagatcaaccattagacaagtatgttgcaacaatataagggaatgacaacgttcagcggtttatggaatctagatcaaccattagacagcaagcacaaggtcagctgttgatgacatccacatcccggactttacccaatcagctgagcaacttggcaaaacagtcggaagtgacttggcaaagggaaacctgacggctccagtcatctttgctttgcaagatgaaccagagctaagagagatcatcgactccgagtttagtgagactgattcgtttgctgctgcgatagatcttgttcacaagagctgtggaataagaagggcacgcgagcttgcgagagagaagggtgacttggctatccaaaacctgcagtgccttccgagaagtgatttcagaagtaccgttgagagtatggtaaaatataatcttgaaaggattgagtagatagattcagttgattcctctaccagtccactagatacaggcctccagtatgggatccatgtagctccaaaacccatctttcagcctcttcgtggaagttggcaaaagaaattgcaatggttgaagtattttaccatttatagttgtttttcgtgcattggtaatttacacttatttgtttgggcttacaaaaagtgaagaacacttttttgctgaagatgttggtgtggaatcttccgtgacaacaggaccaaataaacaaacaattgaagatgac

SEQ ID NO: 211111 - DNA, 1631 bp, Zea Mays
ctcagtgtcgccactctcctctccacacacacacatacacacacgtaacctagcttctacacggatcgggatcccctgcagtactgcatgggccactgccgcgtgggctccgcgtgcgacagggcccacgcgcagtgacccaacggcacggtgcagtacgtcagaggatccgtgtcccttctacaccaccttgcgcaagaattttagctttcagctgcattagcatggaaggagacaaaggcaaccgatatgggaaacagtgagcgccaaatctcttcggcagagtactgcagtagcactataaacaatgtctaatgcataagaacagacaagaatgctatgtccagaatttaaataagcagaattacctgagccatggttttatctttctcgagtgtcgcatgtaatttttttacaggaaatttgtgattttgatgccatcttcttctttgttacggccagggtcgccgtggtcacaggaggcaacagggggatcgggctagaaatatgcaggcaactggcttccagtggagtcaccgtagtgttgacagcaagggacgcggagcggggcgcgggagcagccagcacgcttgggcaacaacccaacgtcgtcttccatcagctggatgtcggcgatccgtccagcgccgcacgcttagctggttttatcgaggagaagtttggcaggctggatatattaattgatcaacaatgcaggaattactggaacggcaagtaacgtcgacgatccagaagcttttcgtctggagctcgcgggcatggatctcatgcagaggatcgaagcaatcaacaggcacagcacggaaccgtacgagcaagcagagaagtgcctcaacaccaactaccacgggatcaaggctgtcacaaaagcgctgctcccgcttctacagtcctcgtcccatggaaggatcgttaacctgtcgtcctactatggactactcaggtttttcagcggagacgaactgaaagaggagctcagcagcatcgacggcctgtccaaacagaggctggacgagctgtcagagctgtttctcaaggacttcaaggatgggcagctggaggctcaagggtggccgaatgaaggagggttcgccgcgtacaaggcgtccaaggcgctcgcgaacgcctattcccggatccttgcgaaggagcacccgtcgctgcgcatcaactgtgtgcatcccggctatgtccagacggacatgaacttcgggtctgggcatctgacggtcgaggagggcgcgcgggccgggagctctcatgctggccatggagcccaagggaggcgtcactggcgcgtttttcgaccacaccgtggttgcgtccttcgtgtaatatgctcgcccttgcactcgcaccgttagctatcgcagtaataaaattccacagaaccaaaggaggatacactattaggtcctgaatcagatctgttctatcccctcccctgggaaaatatcctctcgctgtcgctgggtagatggccgtccaatttcattttggttgccgatgagtgttctcattcgcagcgaattagtctatcttgtatgattcatctgttatgaatataaaagaaataagaatcctcgtatcaaaaaacaattaggtctttt

SEQ ID NO: 211112 - DNA, 1992 bp, Zea Mays
tctcggtccaaccgtccacacctcgggaccatttccttcgttcggtcgtttccctactatcctcctcgcgttcatctcgcccgtacgccgacgctgccgcctggctcgcaccgcccgccggcagtgcctcagtccagatcaagcccctcttcccagatcgggtcctagttgggctaccgcagccctacgccaggtgccgagtccctcgccgatttcttcggcggcgaagagtgcccaccagatccgcccctgatggacaacgtcgagtctgcccctgactcgccggcgcaggcgccgccgtcatccgcctcttctctccccaaggagcaatcgcaggtggaattggagctgaggctgcttcaggctcttgagttctaccctccatcaaaactcaaaggtttcgccatagtgttaagttatttgtttgttggcccttggggtttggcataaattgtcgtcacttaatgtaaacacctatgctaataacactaattcactaacgggaaaatatgtaaacaatgaatgagctacctgattaccgttagcattttttcatataacaaaggttggcatttaatgccaaaaagtttgtgtgcttgcactttgggagtaacaatgtattcgtcctcgttgttgaatgaatgaatggtatatttgcaaaatattttgatgtgaaaaggcgatgtaatttgtgttgttaaggttcagctaaagcttgtttagtggtgtataaggtgggattatagtattgtggaattgaaggtgggtttgtgcccctacagcgacaagttacagggctccagtgccaccttgctgcgctgtcattttgagaaaccagaaaccatgaaatttcctatttggttcttctttcaaagaacatgactgaaaccatcctggctttcaatgcttcagctattcatatgaatttgtcgtccatcacttccgtgatggagtatgcctgtataaataatttgcatggcattttcaaagagcatctaagtctatctgttgagaaaaatagcatgtgccgcattggcagtgatagtctgattacctgttttactaagttgtttcgcacatgttgtaattctggtgtacttgttttaggcgttcaccggcattttgttctctatggcctcatggaatatttgcgaaaaagccttgaccgacagttctcttctgacgaagttctacaactcttggaccgcttctttaacctagaaatgctgaaaccagaggatgatgagaaggataacttccgtcagggcgaagaattttcgttgccagagagttttctcaacaaggaagaataatatctagtaacctcgtactttgggtgtcctctggaagagaaatcagaaggctggttcttagtgattccctatttcttgtagcattgtcatctggaacatcggctgcggggagacactgaacactgaagtaaagaaacacatttcctaagctgtggttgtctttactgactgtacagctagcttttgtagactagtgtaatcgaaaataggttgaactgtgtggttgcctggagcgtgaacaaaaagcaaggaggggcaattacaaaagctgctgctgttttacctatcaaacttctctgatcatgactataggtgcagtcctataaagcatccatgattccatgaggattatagccaataggctatcaaagttactgctgccctagattaacacatgccctatattgccctagtggtcgctgaaaatcaccccttaatacttcacttattgtgtcacgagcatttgtaatgcaaactttaatagctagttgactagggtcacacagaagaggtcacgatctaaaaggctgcaacagccactctagcatctgtctgtcgattgctccgactgcgagtcggtggatcgatcgcttgggaagcgtgtggggatgggaggagccgccggcccggctgatgctgtttatgggccatttggccacggctgattgggccatatggg

SEQ ID NO: 211113 - DNA, 989 bp, Zea Mays
ccacgctcacgtctcccgggcacgtctgcggcagcaccactccacacccacactccgcccatcggctgccatggcgaccagggcggcggcggcagccacgctcacggcggctacgtcctctcttcttaggcgctctacctcgctgcggccgcagggtctccgggtcccccaccgcgtgcctccccaaaggtttgtgcgccatattgcttcatcatcaaacgaggaagctgctgccagagcagccgccgccactgctgacgctggaggaccaaccatatcattgcgaaggaaatcccttcgagcatcgtatatgaagatgaaaatgtgctggcatttagagatattaatccacaagcccctgtgcacgttctagtcatcccaaaagcgagagatgggctaaccggattagacaaggctgagccaaggcatacagaaatcctgggccggctcctttacgcagcgaaagtagtggcagaaaaggaaggtgtagcgagtgggtaccgtgttgtcatcaacaatggtgctgaaggatgccaatctgtctatcatctgcacctgcatgtacttggtggaaggcagatgaagtggccccctggttaaattacgaagggtgacatgtttgatttcctgtacccctctgtgagttgagtttgctgcttgtatgactgttgttgcaaagggagaaagagtggttggtgtactagtatctgcccctgtgatgatggcccctttgagcactcatctctggaagtactgagcttatgcagcattttgctaagggaaaaaaaaacttgtgcagtagattctctgagatattaaacaggttttagaattatcatggcaaacaattagccgtgcacatatttcaggtggctcttatgtttttttttaccgtgctagaagactgataaagcgagagaaaccgtgcagtatacatgatgggaaatgcaacaactctgaatcctgcaagaacaatgattggttgccgc

SEQ ID NO: 211114 - DNA, 738 bp, Zea Mays
ctcagccacgctcacgtctcccgggcacgtctgcggcagcaccactccacacccacactccgcccatcggctgccatggcgaccagggcggcggcggcagccacgctcacggcggctacgtcctctcttcttaggcgctctacctcgctgcggccgcagggtctccgggtcccccaccgcgtgcctccccaaaggtttgtgcgccatattgcttcatcatcaaacgaggaagctgctgccagagcagccgccgccactgctgacgctggaggaccaaccatgccaatctgtctatcatctgcacctgcatgtacttggtggaaggcagatgaagtggccccctggttaaattacgaagggtgacatgtttgatttcctgtacccctctgtgagttgagtttgctgcttgtatgactgttgttgcaaagggagaaagagtggttggtgtactagtatctgcccctgtgatgatggcccctttgagcactcatctctggaagtactgagcttatgcagcattttgctaagggaaaaaaaaacttgtgcagtagattctctgagatattaaacaggttttagaattatcatggcaaacaattagccgtgcacatatttcaggtggctcttatgtttttttttaccgtgctagaagactgataaagcgagagaaaccgtgcagtatacatgatgggaaatgcaacaactctgaatcctgcaagaacaatgattggttgccgc

SEQ ID NO: 211115 - DNA, 1833 bp, Zea Mays
cgtcttcatctccccgccgacggaagcctgctcccagcaagccccagccgcgtctcgtctccctctcccttgtctccctcacacacgtttctctctccctcctcttcttccttgctgcgctccacctcgccccaggtgctcggccgctcatctccctgctgccgcgtccctgcgcccggccttcgtccccgtcgcgccgatccgcgctcgcccagccggccgaggtccttcccatggcgcccctccctgctcccgtgcacgtgcccccctggtggtcggagctcgccaacgccagttgttcctccacacacacctcctgctcccctcgccatggcatggatgaccgctgtatctgctcctgtcgtgctcaagtcgtcacaggttggtgggttgtgcgcgcctagcggtaagttatctgctcctgtcggtaattttgcatcattaattattctgttaaggatctgaatttaggctagagtatcaggttcattttgtgggcatgtgatcaaatgcctactgtgctgacatatgctagtctggccccataattaatataccattacttttttgaatgctaattaggaccgcagcaggtctaatctggccccataattaatataccattactcaggaaatattttggagtaaatgcagagctaacttgaaatggttgttataacttaaaaattatataaatggtgaattgaacattattatgtgttctacagtagtctaatctgctgatgtgtcaatcaagcttattgtattaagttgtatatttactatctagctcattattctgctgttgttacatattgatatattgtttgttacatgcggagtttgaaggagtttaaaacacaagcaaccacattggcatcgcttcagcatcccaatttatgtaaactgatcggctattatgcaaaagaagattctaatgaaaggatgttggtctatgaacggctttatcatggaagcttagataagctactctttggaagatcagatggtcatttcatggactggtctaaacgtttgaaggttgccctgggtgctgccagaggtctagctttcttgcatgatgaaggaccctttcaggccatgtacaacgagttctcaactttgaacatccaaatagataaaggtttcactgctaagctttcaggatatggttgtgttggcttcaataccgaggagatatctaatgcacctgtgcaaaccattcggtggagaccttggagaagggtttactcactcagtttgtctattgctgcaacaagtcggggctggaccgttccaaagtaaatgtaaatggaggcacgattgcccttggacaccctttgggtgcaacaggtgcccggtgcgtggctactcttctaaatgaaatgaagtgccggggcagagactgcagatttggtgttgtcaccatgtgtatcggatctggaatgggggcagcagctgtgttcgagctatgttcggcccggctggaggtatcgaccatcactcgtcactgtaacccgatggtgatcgacgaccgtgagcttccatgttattgcgttctgatacttgagacttttattataactatgtatgagatattgtctcttattagtactggatgatgagatgtgtcttattatgactatggatgagacttttgtgatgtaattgatgagactatggatgagacttttgtgatgtaattgatgagactatgaatttaaatattgttatgtgattgtgtgtgagatgtgttatgtgaaaatatgttgtgttatatagctgttgatatatttgttatgttgtggaatgtggtgtaaaataaaaataaaa

SEQ ID NO: 211116 - DNA, 1890 bp, Zea Mays
cggaagcctgctcccagcaagccccagccgcgtctcgtctccctctcccttgtctccctcacacacgtttctctctccctcctcttcttccttgctgcgctccacctcgccccaggtgctcggccgctcatctccctgctgccgcgtccctgcgcccggccttcgtccccgtcgcgccgatccgcgctcgcccaggtcgcccgccgtcgcccagctcggtgccttccctgctcctccaagccggcgtcctctgccctcatcttcttcctcagccggccgaggtccttcccatggcgcccctccctgctcccgtgcacgtgcccccctggtggtcggagctcgccaacgccagttgttcctccacacacacctcctgctcccctcgccatggcatggatgaccgctgtatctgctcctgtcgtgctcaagtcgtcacaggttggtgggttgtgcgcgcctagcggtaagttatctgctcctgtcggtaattttgcatcattaattattctgttaaggatctgaatttaggctagagtatcaggttcattttgtgggcatgtgatcaaatgcctactgtgctgacatatgctagtctggccccataattaatataccattacttttttgaatgctaattaggaccgcagcaggtctaatctggccccataattaatataccattactcaggaaatattttggagtaaatgcagagctaacttgaaatggttgttataacttaaaaattatataaatggtgaattgaacattattatgtgttctacagtagtctaatctgctgatgtgtcaatcaagcttattgtattaagttgtatatttactatctagctcattattctgctgttgttacatattgatatattgtttgttacatgcggagtttgaaggagtttaaaacacaagcaaccacattggcatcgcttcagcatcccaatttatgtaaactgatcggctattatgcaaaagaagattctaatgaaaggatgttggtctatgaacggctttatcatggaagcttagataagctactctttggaagatcagatggtcatttcatggactggtctaaacgtttgaaggttgccctgggtgctgccagaggtctagctttcttgcatgatgaaggaccctttcaggccatgtacaacgagttctcaactttgaacatccaaatagataaaggtttcactgctaagctttcaggatatggttgtgttggcttcaataccgaggagatatctaatgcacctgtgcaaaccattcggtggagaccttggagaagggtttactcactcagtttgtctattgctgcaacaagtcggggctggaccgttccaaagtaaatgtaaatggaggcacgattgcccttggacaccctttgggtgcaacaggtgcccggtgcgtggctactcttctaaatgaaatgaagtgccggggcagagactgcagatttggtgttgtcaccatgtgtatcggatctggaatgggggcagcagctgtgttcgagctatgttcggcccggctggaggtatcgaccatcactcgtcactgtaacccgatggtgatcgacgaccgtgagcttccatgttattgcgttctgatacttgagacttttattataactatgtatgagatattgtctcttattagtactggatgatgagatgtgtcttattatgactatggatgagacttttgtgatgtaattgatgagactatggatgagacttttgtgatgtaattgatgagactatgaatttaaatattgttatgtgattgtgtgtgagatgtgttatgtgaaaatatgttgtgttatatagctgttgatatatttgttatgttgtggaatgtggtgtaaaataaaaataaaa

SEQ ID NO: 211117 - DNA, 1979 bp, Zea Mays
cggaagcctgctcccagcaagccccagccgcgtctcgtctccctctcccttgtctccctcacacacgtttctctctccctcctcttcttccttgctgcgctccacctcgccccaggtgctcggccgctcatctccctgctgccgcgtccctgcgcccggccttcgtccccgtcgcgccgatccgcgctcgcccaggtcgcccgccgtcgcccagctcggtgccttccctgctcctccaagccggcgtcctctgccctcatcttcttcctcaggtccgaccggtgccctcattcccctggctggcgctcggcttcctcctcctgaagtccctccacgcgccgaatttcgagctccattcatgccggccgaggtccttcccatggcgcccctccctgctcccgtgcacgtgcccccctggtggtcggagctcgccaacgccagttgttcctccacacacacctcctgctcccctcgccatggcatggatgaccgctgtatctgctcctgtcgtgctcaagtcgtcacaggttggtgggttgtgcgcgcctagcggtaagttatctgctcctgtcggtaattttgcatcattaattattctgttaaggatctgaatttaggctagagtatcaggttcattttgtgggcatgtgatcaaatgcctactgtgctgacatatgctagtctggccccataattaatataccattacttttttgaatgctaattaggaccgcagcaggtctaatctggccccataattaatataccattactcaggaaatattttggagtaaatgcagagctaacttgaaatggttgttataacttaaaaattatataaatggtgaattgaacattattatgtgttctacagtagtctaatctgctgatgtgtcaatcaagcttattgtattaagttgtatatttactatctagctcattattctgctgttgttacatattgatatattgtttgttacatgcggagtttgaaggagtttaaaacacaagcaaccacattggcatcgcttcagcatcccaatttatgtaaactgatcggctattatgcaaaagaagattctaatgaaaggatgttggtctatgaacggctttatcatggaagcttagataagctactctttggaagatcagatggtcatttcatggactggtctaaacgtttgaaggttgccctgggtgctgccagaggtctagctttcttgcatgatgaaggaccctttcaggccatgtacaacgagttctcaactttgaacatccaaatagataaaggtttcactgctaagctttcaggatatggttgtgttggcttcaataccgaggagatatctaatgcacctgtgcaaaccattcggtggagaccttggagaagggtttactcactcagtttgtctattgctgcaacaagtcggggctggaccgttccaaagtaaatgtaaatggaggcacgattgcccttggacaccctttgggtgcaacaggtgcccggtgcgtggctactcttctaaatgaaatgaagtgccggggcagagactgcagatttggtgttgtcaccatgtgtatcggatctggaatgggggcagcagctgtgttcgagctatgttcggcccggctggaggtatcgaccatcactcgtcactgtaacccgatggtgatcgacgaccgtgagcttccatgttattgcgttctgatacttgagacttttattataactatgtatgagatattgtctcttattagtactggatgatgagatgtgtcttattatgactatggatgagacttttgtgatgtaattgatgagactatggatgagacttttgtgatgtaattgatgagactatgaatttaaatattgttatgtgattgtgtgtgagatgtgttatgtgaaaatatgttgtgttatatagctgttgatatatttgttatgttgtggaatgtggtgtaaaataaaaataaaa

SEQ ID NO: 211118 - DNA, 2197 bp, Zea Mays
cggaagcctgctcccagcaagccccagccgcgtctcgtctccctctcccttgtctccctcacacacgtttctctctccctcctcttcttccttgctgcgctccacctcgccccaggtgctcggccgctcatctccctgctgccgcgtccctgcgcccggccttcgtccccgtcgcgccgatccgcgctcgcccaggtcgcccgccgtcgcccagctcggtgccttccctgctcctccaagccggcgtcctctgccctcatcttcttcctcaggtccgaccggtgccctcattcccctggctggcgctcggcttcctcctcctgaagtccctccacgcgccgaatttcgagctccattcatggcacgctccgttccttctcctcgacctccctctgccctcttccatggtcggcgcccccttcagctccagctcggcctccagctcccgtgccacgcgccgtggagctccctgcgcgcgccctggcccctgctcggatttagccgtgccgagtcccatcttccaattcaataccataaagaagctccgttctactgcacttgcagtttactgtgttttagccggccgaggtccttcccatggcgcccctccctgctcccgtgcacgtgcccccctggtggtcggagctcgccaacgccagttgttcctccacacacacctcctgctcccctcgccatggcatggatgaccgctgtatctgctcctgtcgtgctcaagtcgtcacaggttggtgggttgtgcgcgcctagcggtaagttatctgctcctgtcggtaattttgcatcattaattattctgttaaggatctgaatttaggctagagtatcaggttcattttgtgggcatgtgatcaaatgcctactgtgctgacatatgctagtctggccccataattaatataccattacttttttgaatgctaattaggaccgcagcaggtctaatctggccccataattaatataccattactcaggaaatattttggagtaaatgcagagctaacttgaaatggttgttataacttaaaaattatataaatggtgaattgaacattattatgtgttctacagtagtctaatctgctgatgtgtcaatcaagcttattgtattaagttgtatatttactatctagctcattattctgctgttgttacatattgatatattgtttgttacatgcggagtttgaaggagtttaaaacacaagcaaccacattggcatcgcttcagcatcccaatttatgtaaactgatcggctattatgcaaaagaagattctaatgaaaggatgttggtctatgaacggctttatcatggaagcttagataagctactctttggaagatcagatggtcatttcatggactggtctaaacgtttgaaggttgccctgggtgctgccagaggtctagctttcttgcatgatgaaggaccctttcaggccatgtacaacgagttctcaactttgaacatccaaatagataaaggtttcactgctaagctttcaggatatggttgtgttggcttcaataccgaggagatatctaatgcacctgtgcaaaccattcggtggagaccttggagaagggtttactcactcagtttgtctattgctgcaacaagtcggggctggaccgttccaaagtaaatgtaaatggaggcacgattgcccttggacaccctttgggtgcaacaggtgcccggtgcgtggctactcttctaaatgaaatgaagtgccggggcagagactgcagatttggtgttgtcaccatgtgtatcggatctggaatgggggcagcagctgtgttcgagctatgttcggcccggctggaggtatcgaccatcactcgtcactgtaacccgatggtgatcgacgaccgtgagcttccatgttattgcgttctgatacttgagacttttattataactatgtatgagatattgtctcttattagtactggatgatgagatgtgtcttattatgactatggatgagacttttgtgatgtaattgatgagactatggatgagacttttgtgatgtaattgatgagactatgaatttaaatattgttatgtgattgtgtgtgagatgtgttatgtgaaaatatgttgtgttatatagctgttgatatatttgttatgttgtggaatgtggtgtaaaataaaaataaaa

SEQ ID NO: 211119 - DNA, 1862 bp, Zea Mays
ctccttctattccatcacccccagcgtgcgcgctgcactccctccctgcccctgttctctctctcgtggcgacggcgacggcgacgactgggcggccgttgctgccgccctactcgccaggcgcccaggtattcttcggccccttcgccggcgacgagtgtcaccaggttcctcgtctccggaacgcagtgcaaagcagatcgatctcggcccagcaggggcctcacgacttgactcccaagggctcccaaccttgcaggctgactcgatctctttggtttcgtggaccgtgatcagactccagggctggatcgtgtttcttccagtgtgcaagcttggatctcgtaggtctggtttagaaaggaccgtgcttgctctttgctgccgcaatcatgcagagtgggggcgacatgaggcctgtgcacaacagtgtcgatacagttaacgctgctgctgttgccatcgtcaccgcggagagccgcacacagcctcctgctgaacagagaaggaaatgggctgaccggttgagcgtgtacttctgctttggatcacagaagaatggccggcgcatgcgtgtcaaccatgccgcacttgtcccagaacctgcacctcaaaggacagatgcgcctgcagcagaaattccaaaccacccaccgcctcctgtgttcccctttgtggcaccgccatcctctcctgcttctttccttcaatcagaacccacatcaatcgtacaatcaccaagggctggagctccagctttttcgcccctctcaccaaattcccaatccccgacggggccaccatccatctttgctattgggccgtatgcacatgagacacaactcgtctcgcctccagtgttctcggccttcacaactgaaccatcaactgcccctttcactcctcctccggagtctgtccatctgacaaccccttcctctccagaggtcccatatgcaaagcttctgacatcgatcaacaatagcaagaatggtgaagcagggggtgatctccagtcgtatccaaactacccagacagcccaattgggcgcctgatatctccaagctcgggctgttctggcacatcctccccattccctgaccctgagatgcaggcttcttcacgcagcgctttacgcttgttcccagttcgtgagccccctaagatattggatggcgagggcgttgcgacacagaagttgatacctcgccatatgcgcaacggtgggtccctcttggatggccagatctcagcagctgtaccagttgtggacttctctgcccgacttcaacccaacgagcacgcaatggatcaccgggtgtcattcgagttgaccgtcgaagatgtcgcgcgctgccttgagaagaagactgcaatctccggggattctggcacggcatcattccaccttgcaccgaccggcagcggcgaccaccacagagaatccaacgaggcaagggcagggctctacgtcgacgaatcataccatgacttgcccgagaaagcgaggcggtccctgtccctgcgcctggccaaagagttcaatttcaacaacgtcgacgtcggtagcgtggagccgagcgtgggatccgactggtgggcgaacgagaaagtcgccgggatgacaactgagccaaaaaagaactggtctttccacccggtggtgcagcctggggtcagctaacctttgcactgaccataatgatcttatacagggatgaaggaattagcttcttctgcttctgcttctgcttcagtggtcgattccttagggatgacttgccagcttgttctaaacatgcagctagtgggtcccgcggtggctggagctcgattcaagaattgacagcgagatggtgtg

SEQ ID NO: 211120 - DNA, 1845 bp, Zea Mays
ctccttctattccatcacccccagcgtgcgcgctgcactccctccctgcccctgttctctctctcgtggcgacggcgacggcgacgactgggcggccgttgctgccgccctactcgccaggcgcccaggtattcttcggccccttcgccggcgacgagtgtcaccaggttcctcgtctccggaacgcagtgcaaagcagatcgatctcggcccagcaggggcctcacgacttgactcccaaggctgactcgatctctttggtttcgtggaccgtgatcagactccagggctggatcgtgtttcttccagtgtgcaagcttggatctcgtaggtctggtttagaaaggaccgtgcttgctctttgctgccgcaatcatgcagagtgggggcgacatgaggcctgtgcacaacagtgtcgatacagttaacgctgctgctgttgccatcgtcaccgcggagagccgcacacagcctcctgctgaacagagaaggaaatgggctgaccggttgagcgtgtacttctgctttggatcacagaagaatggccggcgcatgcgtgtcaaccatgccgcacttgtcccagaacctgcacctcaaaggacagatgcgcctgcagcagaaattccaaaccacccaccgcctcctgtgttcccctttgtggcaccgccatcctctcctgcttctttccttcaatcagaacccacatcaatcgtacaatcaccaagggctggagctccagctttttcgcccctctcaccaaattcccaatccccgacggggccaccatccatctttgctattgggccgtatgcacatgagacacaactcgtctcgcctccagtgttctcggccttcacaactgaaccatcaactgcccctttcactcctcctccggagtctgtccatctgacaaccccttcctctccagaggtcccatatgcaaagcttctgacatcgatcaacaatagcaagaatggtgaagcagggggtgatctccagtcgtatccaaactacccagacagcccaattgggcgcctgatatctccaagctcgggctgttctggcacatcctccccattccctgaccctgagatgcaggcttcttcacgcagcgctttacgcttgttcccagttcgtgagccccctaagatattggatggcgagggcgttgcgacacagaagttgatacctcgccatatgcgcaacggtgggtccctcttggatggccagatctcagcagctgtaccagttgtggacttctctgcccgacttcaacccaacgagcacgcaatggatcaccgggtgtcattcgagttgaccgtcgaagatgtcgcgcgctgccttgagaagaagactgcaatctccggggattctggcacggcatcattccaccttgcaccgaccggcagcggcgaccaccacagagaatccaacgaggcaagggcagggctctacgtcgacgaatcataccatgacttgcccgagaaagcgaggcggtccctgtccctgcgcctggccaaagagttcaatttcaacaacgtcgacgtcggtagcgtggagccgagcgtgggatccgactggtgggcgaacgagaaagtcgccgggatgacaactgagccaaaaaagaactggtctttccacccggtggtgcagcctggggtcagctaacctttgcactgaccataatgatcttatacagggatgaaggaattagcttcttctgcttctgcttctgcttcagtggtcgattccttagggatgacttgccagcttgttctaaacatgcagctagtgggtcccgcggtggctggagctcgattcaagaattgacagcgagatggtgtg

SEQ ID NO: 211121 - DNA, 860 bp, Zea Mays
caaccatctcaatattaaaaaggttggcaaccttgcggctccagtagaagaatggactgttggtggaacagcattgacatcactgatggatgttgagaggaggcacggcaagttcaagccagtgatcaagaaggctatggtggaactcgatgctgcacctttcaagaaatatgcatcgttgagggatgagtgggccatcaagaacagatacatcagccctggccccatccagttcagcggccctggaagcgatgactcgaaccacaccttgatgctggaactcggtgctgagttatagagacgcgtccttcacttatttttgttcttacagttttgggagtggagacttggacactgggtctcctggagcagcctgcagtgcagtctccatattgtgaattgtctaataagaggttcgatgggagttttttgggtaccgactggatgtggtagaaaataagaactggttctagtttttttgggtatgatttatgcagcaactgacttgtcttgtagccctgattctgttcccatgtttgcaatctcgtgagaacgaacaaattgtacactgtcgattgcttgcttccgttagcagattattgtacacggtcgtttgtccagtgatgtgtcctacacttgaagatgcttcgctgttgtaggcattatagcaactctatttgttaggtgtaataccctgaatttggggcataaaatttcttcactaatgtctaccaaatttaggtgttacctcttgtctctctctagacctcctctctcttccttttaattagagttatgtcaattaggtgagagattaactatttattttatcaaaatctatgtgattcatgaaatggtgt

SEQ ID NO: 211122 - DNA, 733 bp, Zea Mays
catgaatgctggaagtatataactggacttcagatgacacactttaacatttttggctttttttgtaatcaaatttctaacaagcactcgctcttgcagttgtgaggcttatgggtcgtgctgcttctcacattacattggaatgcgctttgcaaacacaccccaatgctgcactcattggggaagaggttgctgcgaagaaagaaacccttaagaatgtcacaaactacattactgatatcatctgcaagcgtgcagatcttggttacaactatggtgttatccttataccagaaggcctgattgatttcatcccagaggttcaaaaactcatcgcggaattgaatgaaattttagcacatgatgttgttgatgaggcaggggcctggaaaagcaagcttcaggctgaatcaagggagctgtttgagtttttgcccaaaactattcaggagcaacttatgcttgaaagagatccccatggcaatgttcaggttgcaaaaattgaaactgagaaaatgcttattagcatggtggaaactgaactggagaagagaaaagctgaggggagatactctgcacatttcagaggacaagctcatttctttgggtacgaaggaagatgcggccttcctactaattttgattctaactattgctatgcattaggctatggtgctggtgcccttctccaaagtgggaagacaggacttatttcgtcgctatgtcctcctgt

SEQ ID NO: 211123 - DNA, 2056 bp, Zea Mays
gtgaattacgttttcactcgcgatatcgtacttttggttcgtcgtgtactcgtgtggaaggcggctgcctgctcccgcggtctcttccgtctcggaggtgggagagagcgatcagcggcgtcgccgggtggatccaaagcgcgcgagaaaatgcagggcggatccagcggcatcgtgtatggtggcctcaagtaccaggcgcggtgtatcgccgacatacgcgcggacgccggctcgaccaccttcctcgccggcaccctcagcctcaaggaggagaacgaggtgcacctgatccggttttcgccggcggagagcgagctggtgtgcgatggcctcttctaccaccccaacgagatttgggacctcaaatcatgccccttcgatcacagggttttctccacagtctacacgtctggtgagggctatggtgcatcagtttggaagatcccggagctcaatgggcaatcaaactcaccacaacttgagcagctctttgagcttagtgggcatacgggcaagattagacgtgtgatctggtggccacttggaaagcatgataaactaattagcattgatgaccgaaatatttttctttggaacatagacacgtcaaaaaaaatagctaaggtgatctcacagggatcaactgacatgcttccaaatttacgtggtggagcttgggatccacacaatcataatttagttgctgcaatatctgattcatcacttcagctgtgggatctacgttctatggaaaaatcaactgcaattgaacatgcacatatacgggatgtggattataaccccaagaagcaaaacattgttgcaacagcagaagaggaatttggaattcgcttgtgggatctcagaatgcttaagtatcctctaaaagatctccctgggcactcacattggacatgggctgttcggcacaatcctgcgtatgatgagctccttctgagtgctggaacagattcaactgtaaatttatggttggctaaagttagcagtgacgatcctgaatctgatagcccttctgctttatccaataggcaagaagtaccattactcaactcatatactgactatgaagacagcatctatggtattgcatggagctcccatgatccatcattattcgcttctttgtcatatgatggaagggttgtcttggaatcagtcaagccctacttgcagagaaaatgaaccttgtctagttttctaaattgtaagctgagtagctttgccttgccattctgtagcctcttaacaagcatttatgtgatgattcggtttactgttgtagcaatggcagaaaaatggataacaagattgttacagaaatcaatttttaggatgttgtatatttgaagtgtccatgaaaaggtcttgtgttatatgatgaggtagaattgagcaaatttggtaaaacaaacagattaacgagaataagttattttatgaactatcatgttatgtattcaatatttttcttatttgcacaatacttgcccatcttctttgcaaggtacatgtcctatagttggttcatgcccaaaaatgtgtttaatggctcaattagtcatcacatatgtgcattcgtcaaattagaaaaaaaaaggttgtgaacttttccaacgcccgtgtacagctaggcaatccaagttctttgaactaataagtgaaccataatctaatattctgctgtattaacttatatcatgtagttggctcacgtttcattgtcatacttaggcttttaagtagacttgcacaatggtaaaaccagactcaatgtagcagtagtaggtcagatttggttgtattaaacagtgtatgcctctttggaatgcaggatttttttgttttttgtgtttttcctgtaaaaatgaattgatctctcctgcatgattcctcttaaatttctgcattccaaaggggcgtacatttgcacaagttaatacgtacccaaaagaaattttctcaccctcacttaaaataagatcttaactaaaacatggaggttactgcattcaacaaaacgcaaacaactaag

SEQ ID NO: 211124 - DNA, 1106 bp, Zea Mays
gcacgctacgagttgagatatgggcacagaaatagagctacaagagtgtgcaggaggtggatattttggcatattacacgttgagtggtgaactcaagtatcagtttgggtctggaagcatgagcataacagactatctcttaaatctagaaaatcttttgtgtggttgtggaggtttctacctacaagactggtctttagcatggtatgacagcatgtttgtgtatccactctgtagaaaatatcttatgcttcatttctttagcatggcacttgtgtctcaaatcctttcaacaattggatccattttagtgaaaatccatggtggatccagtggaattggtacattcgctatacagattgccaagtacctcggaattaaggtttttgtcactgcaggaagtgaagaaaaactagtagcctgcaaagttttgggtgccgatgtatgcattaactacagaactgaagacttcgttgaacgtatcaaacaagaaaccaacggaaagggtgttgatgtgattctggataatattggaggatcatatctccagcgcaatctaaacagcttaggtgttgatggtagacttttcatcattggcttccaagggggcatagcagctgaagtgaacctgcaagctgtgcttgcatgccgtttgaccatacaagctgctggactgcgcaacagaagccttgccaataaggcagagattgttagtgaggtggaaaagaacgtgtggcctgctgtcgctgctggcaaagtgaagccggtgatttacaagacgtttccgttatgtgaagctgctgaggctcataggttgatggaagctagcacccacatcggcaagatactgctgctcccactgcacctgtggcgtttgtgctcttactctcggaggagtcagttcaagaacatatgcaacttctgtgacagcctgcatggatgttgtactggtgtagcatgtctttttttatatatcttgtagtactagattggatcttttaccccgagaaattatcttatcaattggatccttaaagtgctgatgacatttttctgtgagctatgatataataaatctggcagatagagccactacagcacgtca

SEQ ID NO: 211125 - DNA, 769 bp, Zea Mays
taaatttgttccttgccttttcttgtcgggcatctgattttggattgatgaaggccgacaggaatgggcacatcactgatttccttgaaaagcccaagggtgcagatttggaatcaatgcaagtggacatgggattgtttggattatccccagagtttgcaagtacgtacaaatacatggcttcaatgggaatatatgtattcaaggcagatgttctcagaaagcttctgagaggccattatcctacagctaatgattttggcttagaagtgattccaatggctgcaaaagattatgatgtgcaggcttatttgtttgatggttactgggaagatattggaacaataaagtctttctttgaagcaaaccttgctctcactgatcagtctcccaacttctatttttatgatcccgtgaagcctatttttacatctcctagatttttacccccaaccaaggtagaaaactgcaaggttttgaactctatagtttcacatggctgctttctaactgagtgcagtgttgagcactctgtcattggtatccgctcaaggttagaaccgggagtgcagctcaaggacaccatgatgatgggggcagattactaccagactgaagctgagagattatctgagctgtctgttggaaaagtcccagtcggtgttggagagaacactaaaataaggaactgtatcattgataaaaatgctcgaattggaaagaatgtagtcattatgaactctgaggctttgaagtccatacatttgat

SEQ ID NO: 211126 - DNA, 2528 bp, Zea Mays
aaccgcttcgctcctctcggtaaatcggcgatccatccagcggagccgcaaccaaaaagcagagcaacgcccaaattaaaaacagggcaggggaaaaaaaaagctcgcagaagtgagctccctcctcccccctctctctctatccgtctctccgctcggagctcgcaccaccgccgaaccctcctccgatccaaaccctcctcgcatcgtgccgcatgcctccacgcgccacgaggcggcggcgctgcagctgaccaccccacttgaccagccggggggcagaaagagagagagagacaaccggacgcggacggcaggcatgggcggcgtcacgtccaccatcgccgcgcgcttcgccttcttcccgccgacgccgccgtcctacaccgtcgtcgtcgccgacgccgccaccggtcgcctcgccatcccggagatctcccgggcaccctcgcgccgtcggaggcgggacggcgccggcgccgggggctcctcctcggcctcctccgtcgtcgcggccgccgaggaggaggacggcgcggaggtggtgcgcctccggacccgccgcgggaacgagatcgtgggggtctacgtgcgccacgcgcgggcctccgccaccgtgctctactcccacggcaacgccgccgacctcggccagatgtacgggctcttcgtcgagctcagccgccgcctccgcgtcaacctctttgggtatgattattctggttatgggagatctacagggaagcccactgagtgtaatacatatgcagacattgaagcagcatataactgcctcaaggaaaaatatggtgtagcagatgaggatataatcttatatggtcagtctgttggaagtggtccaaccattgatcttgcttcgcggttgccagacttgcgagctgtggttttgcatagtcctattttatctggactaagagtaatatatccagtcaagcggacgttttggtttgacatttacaagggtacatcagatgacgtggttgactgctcccacggaaaacagctatgggagcactgcaaagtaaaatattctccactgtggttaagtggtggtggccactgcaatctcgagctatatccagattacattaagcacttgaaaaagtttgtgtcaagcgttagcaaaaaagcatcatcgaaacctgacccaaaagaaacaacgacaaaggatgacactaccagtaaagaaacagaggaagcgtacccggagaaacctcaagaggccaagaagtgcccgcagatctcgcgaaagagcctggacagccgattcgggaaatccaaaacagtggatgttcctgataaaccacggatgagctcggacgacatcgacaagttccggaggagcagatgcttggtctggtgatgcctgtgttctgcacagattgtcgaacagtacctgagcgaggatactatagcatggaagtcaagcaactgtattacatcatgctgcgaggaacggcatcagcggttcctgcagcggagaggaaaggactgttaaataagaaaaaaaagaatcaggaagctaccgtcagcatccatcaaagacacagctacttgactgaaaactggtagttcctcagttaatttagcacttacaccgacaacatgttttgcagcatcggttagggtttccatattgtaaaagtgtaccgttattgtctgtaatcacgagggaccgatacaaacatttgcagagtctgaaagccttaacggaatcacgagcaccatagtctattctgggtgcaccagtattcgggctcacatgcgttgtggaaccatgtgagctttaccctgtatactgatctactcataccttattatagggaccatgctccacatatctatgggaaactgacgggtgaaacatgctgtacgtatcactaggaaacagactgacgcgtgaaacggcagcaagcttgtgcacattacagctgtgaaagatcaggaactaactacgaagcctgaaaacagatggcatgcctagcagtcacacagcagcaatacagacacgaattaaacctcggccggtctcagtcctcaagcactaactatcctagtccctgctggtgttgggcgtcgtggacctgctgtcccacggagcgtgaaccgtggtgggagagaagggcccgtccttgctcttgtccccatccttccccgacgtcagacactcgccctggatgttcctgagcacctcgagcacctccttgatcggcgggcgcatctcgccgttctgctgcaggcagcggaaggccagctccgcgaccatcgtcatcatcttcctggtggccgggtcggtgtcgtagcccaggccgaggtcgacgagctcctccagctggcacttctggatcttgctgatggccatgctggccaggttgatctcgctgcggtgccgggtgatgtcgacggccggcttggacgagatgagctccaccaggaccaccccgaagctgtacacgtcgctcttgtccgtcagctggtagcactggtggtactctggatcaacatac

SEQ ID NO: 211127 - DNA, 2606 bp, Zea Mays
aaccgcttcgctcctctcggtaaatcggcgatccatccagcggagccgcaaccaaaaagcagagcaacgcccaaattaaaaacagggcaggggaaaaaaaaagctcgcagaagtgagctccctcctcccccctctctctctatccgtctctccgctcggagctcgcaccaccgccgaaccctcctccgatccaaaccctcctcgcatcgtgccgcatgcctccacgcgccacgaggcggcggcgctgcagctgaccaccccacttgaccagccggggggcagaaagagagagagagacaaccggacgcggacggcaggcatgggcggcgtcacgtccaccatcgccgcgcgcttcgccttcttcccgccgacgccgccgtcctacaccgtcgtcgtcgccgacgccgccaccggtcgcctcgccatcccggagatctcccgggcaccctcgcgccgtcggaggcgggacggcgccggcgccgggggctcctcctcggcctcctccgtcgtcgcggccgccgaggaggaggacggcgcggaggtggtgcgcctccggacccgccgcgggaacgagatcgtgggggtctacgtgcgccacgcgcgggcctccgccaccgtgctctactcccacggcaacgccgccgacctcggccagatgtacgggctcttcgtcgagctcagccgccgcctccgcgtcaacctctttgggtatgattattctggttatgggagatctacagggaagcccactgagtgtaatacatatgcagacattgaagcagcatataactgcctcaaggaaaaatatggtgtagcagatgaggatataatcttatatggtcagtctgttggaagtggtccaaccattgatcttgcttcgcggttgccagacttgcgagctgtggttttgcatagtcctattttatctggactaagagtaatatatccagtcaagcggacgttttggtttgacatttacaagaacatcgataaaattggcttggtaaattgtccggtgcttgtcattcatggtacatcagatgacgtggttgactgctcccacggaaaacagctatgggagcactgcaaagtaaaatattctccactgtggttaagtggtggtggccactgcaatctcgagctatatccagattacattaagcacttgaaaaagtttgtgtcaagcgttagcaaaaaagcatcatcgaaacctgacccaaaagaaacaacgacaaaggatgacactaccagtaaagaaacagaggaagcgtacccggagaaacctcaagaggccaagaagtgcccgcagatctcgcgaaagagcctggacagccgattcgggaaatccaaaacagtggatgttcctgataaaccacggatgagctcggacgacatcgacaagttccggaggagcagatgcttggtctggtgatgcctgtgttctgcacagattgtcgaacagtacctgagcgaggatactatagcatggaagtcaagcaactgtattacatcatgctgcgaggaacggcatcagcggttcctgcagcggagaggaaaggactgttaaataagaaaaaaaagaatcaggaagctaccgtcagcatccatcaaagacacagctacttgactgaaaactggtagttcctcagttaatttagcacttacaccgacaacatgttttgcagcatcggttagggtttccatattgtaaaagtgtaccgttattgtctgtaatcacgagggaccgatacaaacatttgcagagtctgaaagccttaacggaatcacgagcaccatagtctattctgggtgcaccagtattcgggctcacatgcgttgtggaaccatgtgagctttaccctgtatactgatctactcataccttattatagggaccatgctccacatatctatgggaaactgacgggtgaaacatgctgtacgtatcactaggaaacagactgacgcgtgaaacggcagcaagcttgtgcacattacagctgtgaaagatcagcaccaacaaaacaaatatttacatcaccaggaactaactacgaagcctgaaaacagatggcatgcctagcagtcacacagcagcaatacagacacgaattaaacctcggccggtctcagtcctcaagcactaactatcctagtccctgctggtgttgggcgtcgtggacctgctgtcccacggagcgtgaaccgtggtgggagagaagggcccgtccttgctcttgtccccatccttccccgacgtcagacactcgccctggatgttcctgagcacctcgagcacctccttgatcggcgggcgcatctcgccgttctgctgcaggcagcggaaggccagctccgcgaccatcgtcatcatcttcctggtggccgggtcggtgtcgtagcccaggccgaggtcgacgagctcctccagctggcacttctggatcttgctgatggccatgctggccaggttgatctcgctgcggtgccgggtgatgtcgacggccggcttggacgagatgagctccaccaggaccaccccgaagctgtacacgtcgctcttgtccgtcagctggtagcactggtggtactctggatcaacatac

SEQ ID NO: 211128 - DNA, 2528 bp, Zea Mays
aaaaagcagagcaacgcccaaattaaaaacagggcaggggaaaaaaaaagctcgcagaagtgagctccctcctcccccctctctctctatccgtctctccgctcggagctcgcaccaccgccgaaccctcctccgatccaaaccctcctcgcatcgtgccgcatgcctccacgcgccacgaggcggcggcgctgcagctgaccaccccacttgaccagccggggggcagaaagagagagagagacaaccggacgcggacggcaggcatgggcggcgtcacgtccaccatcgccgcgcgcttcgccttcttcccgccgacgccgccgtcctacaccgtcgtcgtcgccgacgccgccaccggtcgcctcgccatcccggagatctcccgggcaccctcgcgccgtcggaggcgggacggcgccggcgccgggggctcctcctcggcctcctccgtcgtcgcggccgccgaggaggaggacggcgcggaggtggtgcgcctccggacccgccgcgggaacgagatcgtgggggtctacgtgcgccacgcgcgggcctccgccaccgtgctctactcccacggcaacgccgccgacctcggccagatgtacgggctcttcgtcgagctcagccgccgcctccgcgtcaacctctttgggtatgattattctggttatgggagatctacagggaagacattgaagcagcatataactgcctcaaggaaaaatatggtgtagcagatgaggatataatcttatatggtcagtctgttggaagtggtccaaccattgatcttgcttcgcggttgccagacttgcgagctgtggttttgcatagtcctattttatctggactaagagtaatatatccagtcaagcggacgttttggtttgacatttacaagaacatcgataaaattggcttggtaaattgtccggtgcttgtcattcatggtacatcagatgacgtggttgactgctcccacggaaaacagctatgggagcactgcaaagtaaaatattctccactgtggttaagtggtggtggccactgcaatctcgagctatatccagattacattaagcacttgaaaaagtttgtgtcaagcgttagcaaaaaagcatcatcgaaacctgacccaaaagaaacaacgacaaaggatgacactaccagtaaagaaacagaggaagcgtacccggagaaacctcaagaggccaagaagtgcccgcagatctcgcgaaagagcctggacagccgattcgggaaatccaaaacagtggatgttcctgataaaccacggatgagctcggacgacatcgacaagttccggaggagcagatgcttggtctggtgatgcctgtgttctgcacagattgtcgaacagtacctgagcgaggatactatagcatggaagtcaagcaactgtattacatcatgctgcgaggaacggcatcagcggttcctgcagcggagaggaaaggactgttaaataagaaaaaaaagaatcaggaagctaccgtcagcatccatcaaagacacagctacttgactgaaaactggtagttcctcagttaatttagcacttacaccgacaacatgttttgcagcatcggttagggtttccatattgtaaaagtgtaccgttattgtctgtaatcacgagggaccgatacaaacatttgcagagtctgaaagccttaacggaatcacgagcaccatagtctattctgggtgcaccagtattcgggctcacatgcgttgtggaaccatgtgagctttaccctgtatactgatctactcataccttattatagggaccatgctccacatatctatgggaaactgacgggtgaaacatgctgtacgtatcactaggaaacagactgacgcgtgaaacggcagcaagcttgtgcacattacagctgtgaaagatcagcaccaacaaaacaaatatttacatcaccaggaactaactacgaagcctgaaaacagatggcatgcctagcagtcacacagcagcaatacagacacgaattaaacctcggccggtctcagtcctcaagcactaactatcctagtccctgctggtgttgggcgtcgtggacctgctgtcccacggagcgtgaaccgtggtgggagagaagggcccgtccttgctcttgtccccatccttccccgacgtcagacactcgccctggatgttcctgagcacctcgagcacctccttgatcggcgggcgcatctcgccgttctgctgcaggcagcggaaggccagctccgcgaccatcgtcatcatcttcctggtggccgggtcggtgtcgtagcccaggccgaggtcgacgagctcctccagctggcacttctggatcttgctgatggccatgctggccaggttgatctcgctgcggtgccgggtgatgtcgacggccggcttggacgagatgagctccaccaggaccaccccgaagctgtacacgtcgctcttgtccgtcagctggtagcactggtggtactctggatcaacatac

SEQ ID NO: 211129 - DNA, 2475 bp, Zea Mays
gtaatcatgaaaagctttggtaactccaaagttttatgttattgtaactttattgatgaacagcataattaccatctgcatcatttacaaattctttctgcaaagcatatccagcattgcttgctcttccatcccaaggaaatatgattaacttcatatctgcatcatagcattttaagtgcctggtttctgtcctaagtttcattgggaacaatgtttaacctctttgctaaataaacatctcctgtagactgatgcttaatttatggccacagttagttccctacccaattgtggttgaagttaggaacaatctttttccctgaaagtgattttaacagacataaatgtggctgcaggtatgattattctggttatgggagatctacagggaaggtatattttgttcttttattttgatcgcttaactaataacttatgtagtaactataatcttctccctaaccatatcttaatagacagtttattcttccattgaacagcccactgagtgtaatacatatgcagacattgaagcagcatataactgcctcaaggaaaaatatggtgtagcagatgaggatataatcttatatggtcagtctgttggaagtggtccaaccattgatcttgcttcgcggttgccagacttgcgagctgtggttttgcatagtcctattttatctggactaagagtaatatatccagtcaagcggacgttttggtttgacatttacaagaacatcgataaaattggcttggtaaattgtccggtgcttgtcattcatggtacatcagatgacgtggttgactgctcccacggaaaacagctatgggagcactgcaaagtaaaatattctccactgtggttaagtggtggtggccactgcaatctcgagctatatccagattacattaagcacttgaaaaagtttgtgtcaagcgttagcaaaaaagcatcatcgaaacctgacccaaaagaaacaacgacaaaggatgacactaccagtaaagaaacagaggaagcgtacccggagaaacctcaagaggccaagaagtgcccgcagatctcgcgaaagagcctggacagccgattcgggaaatccaaaacagtggatgttcctgataaaccacggatgagctcggacgacatcgacaagttccggaggagcagatgcttggtctggtgatgcctgtgttctgcacagattgtcgaacagtacctgagcgaggatactatagcatggaagtcaagcaactgtattacatcatgctgcgaggaacggcatcagcggttcctgcagcggagaggaaaggactgttaaataagaaaaaaaagaatcaggaagctaccgtcagcatccatcaaagacacagctacttgactgaaaactggtagttcctcagttaatttagcacttacaccgacaacatgttttgcagcatcggttagggtttccatattgtaaaagtgtaccgttattgtctgtaatcacgagggaccgatacaaacatttgcagagtctgaaagccttaacggaatcacgagcaccatagtctattctgggtgcaccagtattcgggctcacatgcgttgtggaaccatgtgagctttaccctgtatactgatctactcataccttattatagggaccatgctccacatatctatgggaaactgacgggtgaaacatgctgtacgtatcactaggaaacagactgacgcgtgaaacggcagcaagcttgtgcacattacagctgtgaaagatcaggttagtcacaagcgacatctatctatttattcagtaagtacccgtgtatatatatgtataataccattcgccactcttacacatgtatgtgcattccctctgtcctgacagcaccaacaaaacaaatatttacatcaccaggaactaactacgaagcctgaaaacagatggcatgcctagcagtcacacagcagcaatacagacacgaattaaacctcggccggtctcagtcctcaagcactaactatcctagtccctgctggtgttgggcgtcgtggacctgctgtcccacggagcgtgaaccgtggtgggagagaagggcccgtccttgctcttgtccccatccttccccgacgtcagacactcgccctggatgttcctgagcacctcgagcacctccttgatcggcgggcgcatctcgccgttctgctgcaggcagcggaaggccagctccgcgaccatcgtcatcatcttcctggtggccgggtcggtgtcgtagcccaggccgaggtcgacgagctcctccagctggcacttctggatcttgctgatggccatgctggccaggttgatctcgctgcggtgccgggtgatgtcgacggccggcttggacgagatgagctccaccaggaccaccccgaagctgtacacgtcgctcttgtccgtcagctggtagcactggtggtactctggatcaacatac

SEQ ID NO: 211130 - DNA, 1856 bp, Zea Mays
tcagccgtcgatagcgtgattcaaacgcgagaagatgccttcctctgcagccgtacacgcgtccgatcgcccgacaaaaccgacggttcagatacgctcaacatatgcacctgaaggcgtccaaccgacatgcgggcccgttttccagcaagccccaagagtcagtgaaacacaccgtcttctctcgggttggaagcggtgggtgcacctgctgttagcggtataaaaagcggaaaccctagcattcgccgcgagcttatcacttatcatccccatccgcacctctctccatctccctgctcctccgcctccttcttgatccagccaagccagggatcgccatgtcggactcggaggagcaccacttcgaatcgaaggccgacgccggagcgtccaagacctacccgcagcaggctggcaccgtccgtaagaacggcttcatcgtcatcaagaaccgcccctgcaaggttgtggaggtttctacctcaaagactggtaagcatggccatgccaaatgccactttgttgccatagacatattcaacgggaaaaagctcgaagatattgttccttcgtcacacaactgtgatgtgagccttcttacttcagatggcaacactaaggatgatcttagactcccaactgatgagactcttgtggcccagatcaaggaagggtttgaaagcggcaaggatcttgttgtgactgtccagtctgctatgggggaggagcagatctgcgcgctgaaggatgttggccccaagtaacttccctgccttggaatactgtatctcaaaacctaaatcgaaaaaagaagtgtatcaaggattgctacagagacatccatctggcttgagctggcttttgctatggcaaacacaagtgcagggatcgctgggtgttgcaccgtgtctgcattatgtggttacattctggaccctgtattttctatgcttttatgcccctactgtttagtattaattatcaataaatttgtttgggacggttgaattgcatgcattgcatgaggtttcttgttcgttatttgttttctcttgccatgcttccagtattggtgatggcagtttactcgtaattttttttgtacttgtttcgaaaactggtgggcagtttacccgcgcttgtgctccatccattgttctagtgttatccattcctcttttttcccccttcaaaatataaactataaagaagaaaatattatgacttacataaagaatcgttttagagaagcggtaccaaacatgactcgacggaaaattgctccaaaccaactattaactcgatgtttgtattttttttcttctctgccaaaacctgtcaacccgctttatggtaactttgcggtatatgttctcgaaagaaaactggtgtatagagctactcccctaatttcaagttgtaagacattttgcccatttgatatatgtaggtagaaaagatgtcttgtaatctaaaacagagggagtatttatgtagctttttgtagataaaatgtcttatttaaaacagagggagtatttgagtagctttttgacgattgaatgctgatttggacggagggagctacttgtgtagctttttggaacgaagtacttgagtggttttttgaggattgatttctgtaaataaaatgtacttgacccctattataggtgtacatctggctgtgtcgggcttggttggcatgacataatgcgtggatcgtgtctaggtcttaagcccacagattggtatggtatgacttatttagttaaggcccattaaagcctgctaaacataaacttgttgcgcagtgtgcttgtgttgtgtgggcttttatcactgtatttgca

SEQ ID NO: 211131 - DNA, 3394 bp, Zea Mays
atccccagccacccccagcgcgcttgctacgagggaggggagtggtcggctggttgcaccgcacagcaatggtggcgactactcgtcgagctctgttcctctcctgcttccacggcggctcagagatgagcccccgcctctccctgcgcccgcggtacccgtcaatgccgcggcggccgaagggagtggcggctgctggcggcggaggaaacggcgacctggaggccgcagtcggtacgggggacgacgaggaggagaaggtggcggtgttctccgtgtcggggatgacctgcgctgcgtgcgcggggtcggtggagaaggccgtgaagcggctccccggcatccacgacgccgccgtcgacgtcctctggggccgcgcgcaggtcgtcttctacccagccttcgtctcggagattgtgatcatgtgaaccttttggacaggagaacaaaattaccgaagccattgaggatgttggttttgaagcaaaattgattgatgaggaggtcaaggaaaagaacattctactatgcaggctacatataaaaggaatggcctgcaagtattgcacaagcacagttgaatttgccttgcaagcttctcctggggttcaaagagcttcagttgcattggctactgaagaggctgagatccgttacgatcgcaggataatttctgctagccagctaatccaagcagtggaagaaactggctttgaagctttactagtgaccgcaggagaagaccagagcaggatagacctcaaaatggatggtgttctcgatgagaggttgataatgatcttgaaaagctctatacaggcccttcctggtgtggaaaacgttaaattcaactctgaactacacaaggtcaccgtctcatacaatcctgaccacacaggcccccgggacctcattgaagtcatcaaggcagccacatttggtcatgtcaatgcatcaatatatctggaagcagatggaagggaccagcataggtatggggaaataaaacaatacagacagtcgttcttgtggagcttaatattcaccattccagtttttctcacctccatggtgttcatgtatatcccttggctgaaggatgggctggaaaaaaaagttgtcaacatgatgagcattggtgaactacttcggtggattttgtcaacaccggtccaatttgttatcggtcgcaaattttatactggtgcttacaaggcaatgtgccgtggctcaccaaacatggatgtccttattgctctagggacaaacacggcttacttgtactcggtttactcagttcttcgagcagctacctccgggaattacatgtcaactgatttttttgagactagttccatgctcatttcatttattcttcttggaaagtaccttgagatcttggcaaaaggaaaaacatctgaggctattgccaagctgatggatcttgcgccagaaactgcaacactgttagtgtatgactatgaaggaaatgtggtaggagaaaaggagattgacagcaggctgattcagaaaaatgatgtgatcaaagtagtcccgggtggaaaagttgcttccgatggatttgttatttggggccagagccatgtgaatgaaagcatgattactggcgaatcacagccagtagcaaagagaaagggtgacactgtaattggaggtacagtgaatgagaatggtgtgcttcatgttcgggctacatttgtgggatcagagagtgcattggcgcagattgtaaggctagttgagtcggcgcaaatggcaaaggctcctgtccagaagttcgctgaccatatatctagagtctttgttcccctggtgattctgctttcaatggttacttggctcgcatggtttgtcgcggggaggctccatagctaccctcagtcatggataccacgattcatggatagcttccagctcgctcttcagtttgggatatcagttatggtgattgcctgtccttgcgccctagggctggctaccccaactgctgtgatggttgcgactggagttggtgcctcacatggtgttctgatcaagggtgggcaagctctggagagtgcacagaaggtcgactgcatcgtttttgacaagacagggacgctaactattgggaagcctgtcgttgttgacacaaggcttctcaaaaatatggtcttgcgtgaattctatgactatgctgctgctgcagaagtcaacagtgagcaccccctggcaaaagcgatagtggagcatgccaaaaagttgcgtccagaaggaaaccacatgtggccggaagcaagggaatttatttcagtaaccgggcaaggcgtcaaggcggaggttagtggcaagagtgtcatcgtggggaacaaaggcctcatgctgtcctctggcattggtatccccttggaagcttcagaaatcctcgtggaagaggaggggaaggcaaggacagggattatcgtggcagtggaccgagaagtggcgggcgtaatctctgtatccgatccgacaaaaccaaacgccctccaagtgatatcgtacctcaagtccatgaacgtggagagcataatggtgaccggcgacaactgggggacggctaatgctatcggccgagaggttggcatcgagaagataatcgctgaagcgaaaccggagcagaaggccgagagggtgaaggaactccagctgtctggaaggaccgtggcgatggttggcgacgggatcaacgactcccccgcgctcgtctcggccgacgtggggctggcgataggcgcggggacggacgtcgccatcgaggctgcggacatcgtgctcatgaagagcaacctggaggacgtggtgaccgccatcgacctgtccaggaaggccttcttccgcatacggatgaactacgtctgggcgctcgggtacaacgtcgtcggcatcccgatcgctgcgggggtgctcttcccgtccaccgggttccgcctgccgccgtgggtcgccggcgctgcgatggcggcctcgtccgtcagcgtcgtctgctggtccctgctgctgaggtactacaaggctccgaagattgccggcacagctaaagaaattggaattactaccctgtaggcaggtatcactggcactgctgctggaacgggaaggttgtggctggctgctaagtgctaacaatcgctgaaacagaagtctaaaaagaatcgctggaacaagcaagctgtacatatgtgttacaagtatatatacggcgatgctaagtgaagtggtggtgtaacgtaagtactgctactgatctgccatcgttgcatggatgtataccgttttcttttcctctcgaaatgaaaagtggtcctatggcacactactgctatgatggggcctgaataattttgaatcaata

SEQ ID NO: 211132 - DNA, 2793 bp, Zea Mays
gtcagttttaattttttggctgtgctttagagctcttttgtggccttgtgggtggagaactggagacagagaagggaggagggagacaacaggataatatgtggccagtttcgttttgttttgaactggaactgctacagcgtttgtgttgcttactgtaggagaatgccactgtgaagatgaagcgagaaaagtggtcgacaagatggtcaatcaggtccatgtcgtcggagaaggccttataggaaggactctaataagtggggagcaccaatggatttctgatgacatccccttcagtttctctcagataagcgatgaagataacctaggtttatgtcagggttatacttggtggcaacatcagttcctaagtggaataaagactattgctgtagtacctatgccggcgtttggtgtggcacagttcggttccatgcaaaaggtttctgaaagcttgcagtttctggatcaagttaaaggtgcaacatttctgatggaaagtctttcatggtctccttcaacaaaagatgctcagaaagacgctttcatgtacaatccacaatttcaactcgattcttcaaccactagagagggtcttccacgcactaaggctgaaccagaaaactcaaggttggagaatgcaatatccatagattctctgaagaactttgcaattacttcaaatggtctgaatcctcacgtagtggccatgccagtgaactccaaatcgataagtactgttaaattaattcaaagtgacagcaatttgcggtacaataatatttcagagaatgctcaacaattcaaatccgccaaacaacctgattctagttgggcaagtgcagctacatgtttttcaaatttgaccaatcttcaaagaatagagcgcgggctgtcatgcacacctaacaaactacgacattgccttcaaagtgaaaaatcctcaggcttcctggattcgtactcatcaatagtttctacagatgctgagctgaaatgcactttgtttgacaatgccactccatttgttcagagtgatgtgatccaagaggttggtactagtggatctactcgtgcttgtgggctacatgaattgccaaatgaaatatgggcagaaattgcctcaggggaaatgaaaccagtcataaaagaagtcaacgaaaataatggctttctcgaaagcacagcatttgatccagtcatgaatgattggtggggtgacactgccctactagcaggaaacacttcacatctgagtgctactaccatgaactctgtttcaggacaggcaagtagtgaacaattatcaattgaagatagagggctgttttcggaatctgtctttgaggagctgcttggctttgatggtaatgtcggcccagttatggatagcaccgaaccattagctggttttgtctccggttgtcatttgccgaggtacaaccttcaaggttcactttcagtgtgcaaggcacaagtaccgccattgatactcccttccggtagctgtacatccgaaaatgttgtgatgggatcatcaaaagaagcccccgtgtcactgcagaatttatctatggatgattgtggcagtttgaacaccgcaagttccaagatcagccaggtaaagaagcctgaaggagagaaggttgttaagaaaagagctaggccaggtgaaagtacacggccaagaccaaaggaccggcagcagatacaagagcgtgtaaaggagttacgtgagatagttccaaatagtgcaaagtgtagcattgatgctttgttggatcgaacaatcaagcatatgctctttctacaaagtgtgacaaagtatgcagaaaagattaagcaagccgatgaacctaatatgataagcaaggacaatggttctgtattgaatgataactcacatggagttgtcttgaaagacaatccaagtggtggaagcaatggaggtgcgacatgggcctatgaggttgcagggcagactatggtttgtccaataattgttgaggatcttgcaccgcctggtcagatgcttgttgagatgctatgtgaggaacgcggattttttctagagatagctgacaccatacggggatttggacttacaatcttgaagggattgatggaacttcgtgatggaaaaataatggctcgatttcttgttgaggcaaacaagaacgtgacgaggatggatatatttctatcacttgttcagttactgcagcagaacagccgcaatcgatcttcggatcagctagttaaggtcatgaacaatggcattccatcttttgtggatcaccaacaatctcctgcatcaattccggtttggccttgctgagagatagtaattgccacaaacaattcttgtaggccatatttttcaacgagcgttaatgggtacggtttggagttctgattagtacttggtggtgcccgccaactgttgatagaaacgacaggtgttaaggatgtagcaaacgcacattgcggtgtcccgtgtccgaagaaaattcagttagaagatgcacagattctcatgtaacaggtttaggaacattggtgttgtcgtttgtaatttggacactggtgtagtggtgtgaggtagcctatgttgttgtgaagttggtgtgcagtcagtagcaaaattgcctgtgttgctacggtaaataacatttgaaaattaagtgtctgtgttctctttttgatctgctctatctcccgctctccatgggtaaccctatagttggattgccggtctgccatctgtgctcagcacaaactgaatgtccc

SEQ ID NO: 211133 - DNA, 2767 bp, Zea Mays
cacacctacctccttgctgcagctgttcgcgctgaatgcaggttgcttactgtaggagaatgccactgtgaagatgaagcgagaaaagtggtcgacaagatggtcaatcaggtccatgtcgtcggagaaggccttataggaaggactctaataagtggggagcaccaatggatttctgatgacatccccttcagtttctctcagataagcgatgaagataacctaggtttatgtcagggttatacttggtggcaacatcagttcctaagtggaataaagactattgctgtagtacctatgccggcgtttggtgtggcacagttcggttccatgcaaaaggtttctgaaagcttgcagtttctggatcaagttaaaggtgcaacatttctgatggaaagtctttcatggtctccttcaacaaaagatgctcagaaagacgctttcatgtacaatccacaatttcaactcgattcttcaaccactagagagggtcttccacgcactaaggctgaaccagaaaactcaaggttggagaatgcaatatccatagattctctgaagaactttgcaattacttcaaatggtctgaatcctcacgtagtggccatgccagtgaactccaaatcgataagtactgttaaattaattcaaagtgacagcaatttgcggtacaataatatttcagagaatgctcaacaattcaaatccgccaaacaacctgattctagttgggcaagtgcagctacatgtttttcaaatttgaccaatcttcaaagaatagagcgcgggctgtcatgcacacctaacaaactacgacattgccttcaaagtgaaaaatcctcaggcttcctggattcgtactcatcaatagtttctacagatgctgagctgaaatgcactttgtttgacaatgccactccatttgttcagagtgatgtgatccaagaggttggtactagtggatctactcgtgcttgtgggctacatgaattgccaaatgaaatatgggcagaaattgcctcaggggaaatgaaaccagtcataaaagaagtcaacgaaaataatggctttctcgaaagcacagcatttgatccagtcatgaatgattggtggggtgacactgccctactagcaggaaacacttcacatctgagtgctactaccatgaactctgtttcaggacaggcaagtagtgaacaattatcaattgaagatagagggctgttttcggaatctgtctttgaggagctgcttggctttgatggtaatgtcggcccagttatggatagcaccgaaccattagctggttttgtctccggttgtcatttgccgaggtacaaccttcaaggttcactttcagtgtgcaaggcacaagtaccgccattgatactcccttccggtagctgtacatccgaaaatgttgtgatgggatcatcaaaagaagcccccgtgtcactgcagaatttatctatggatgattgtggcagtttgaacaccgcaagttccaagatcagccaggtaaagaagcctgaaggagagaaggttgttaagaaaagagctaggccaggtgaaagtacacggccaagaccaaaggaccggcagcagatacaagagcgtgtaaaggagttacgtgagatagttccaaatagtgcaaagtgtagcattgatgctttgttggatcgaacaatcaagcatatgctctttctacaaagtgtgacaaagtatgcagaaaagattaagcaagccgatgaacctaatatgataagcaaggacaatggttctgtattgaatgataactcacatggagttgtcttgaaagacaatccaagtggtggaagcaatggaggtgcgacatgggcctatgaggttgcagggcagactatggtttgtccaataattgttgaggatcttgcaccgcctggtcagatgcttgttgagatgctatgtgaggaacgcggattttttctagagatagctgacaccatacggggatttggacttacaatcttgaagggattgatggaacttcgtgatggaaaaataatggctcgatttcttgttgaggtaaagaaactcttgttttgggacgccttttcttttatggtgcgcttctcaaatgaaagtcgtgtgttgtgattttacaggcaaacaagaacgtgacgaggatggatatatttctatcacttgttcagttactgcagcagaacagccgcaatcgatcttcggatcagctagttaaggtcatgaacaatggcattccatcttttgtggatcaccaacaatctcctgcatcaattccggtttggccttgctgagagatagtaattgccacaaacaattcttgtaggccatatttttcaacgagcgttaatgggtacggtttggagttctgattagtacttggtggtgcccgccaactgttgatagaaacgacaggtgttaaggatgtagcaaacgcacattgcggtgtcccgtgtccgaagaaaattcagttagaagatgcacagattctcatgtaacaggtttaggaacattggtgttgtcgtttgtaatttggacactggtgtagtggtgtgaggtagcctatgttgttgtgaagttggtgtgcagtcagtagcaaaattgcctgtgttgctacggtaaataacatttgaaaattaagtgtctgtgttctctttttgatctgctctatctcccgctctccatgggtaaccctatagttggattgccggtctgccatctgtgctcagcacaaactgaatgtccc

SEQ ID NO: 211134 - DNA, 665 bp, Zea Mays
aaacaccagtatctaacccacacggcccacctgcaccgagcggttgccgccgttaaaccctaccgctgctctcgtcaccatctctccgactcacccctctgtcctcgcaagccgccgccggccaagtcctgtccctctcccttgtctggttcggatcgtcgttgctagccaggtgctggatccgtagcggcggcggcggccatggacaagagcatgctcggcgacctggacggcctccccgaggaggacaagatgcggatggccgccatgatcgaccagctccagatccgcgacagcctgagaatgtacaattcgctggtggagaggtgcttcacggactgcgtggacacgttccggcgcaagaacctggacaagcaagaggagtcgtgcgtccgccggtgcgcggagaagttcctgaagcactccatgagggtcggcatgaggttcgccgagcttaaccagggtgtggccacgccggactaagaaacacgctgccgctggctggctgctctcgttgcgcgcccgccgccaggtttctggctttcgctggcacagatttgtagccgacaaaaggatttcagcacttcccctgcctgagatatatgcgttttagagccgaacgctgggtgtcagattgaataaaaactgccttgagaaaaaaaaga

SEQ ID NO: 211135 - DNA, 772 bp, Zea Mays
ctccgtgcgtagattccagaggtggatgcgagcggcaaagacgttgacctcagcacctacaaggggaaggttcttctcattgttaacgtcgcatcccagtgtggcttaaccaactccaactacactgagctggcccagctctatgagaagtacaaggaccaaggctttgaaatcctggctttcccatgcaaccagtttggtgggcaggagcctggtaccaatgaggagattgtccagtttgcctgcacacgcttcaaggctgagtaccccatcttcgacaaggttgatgtcaacggtagcaatgctgcgcccatctacaagttcttgaaatctagcaaaggtggccttttcggcgacagcatcaagtggaacttttccaagttcttggttgacaaggagggacgtgttgtggatcgctatgctccaaccacttcacccctgagcattgagaaggatatcaagaagctgcttgggagctcttaatcagtatctgggtgcaaagctgtagaaaaacatgtatcaacaatgccctgagcgataaaatatatgataagttgtattaataaagtattgtcgtacttgagaggttgcagtatctgctctatttcccttgcatacactccgtacttgtatatccccttcaatcctcccgggatccccttgtcaccaaatcagccctcgaatgaattccaatgctgtatcagtttgctaccccattttcgtgtgactaatctgataagagcatgtttgggagaaggtgaatggagaggct

SEQ ID NO: 211136 - DNA, 1676 bp, Zea Mays
gggtcactacttccttcggttttactatcccttcgtttccgctagccttctccttccagagcaaccgcgccattcgtctcctccgtctcgttcgtagtgcaacacatacagcctcgtctggtgaagtgaaagaacgacaagatctgtggtacggcggtgccggccgacatccacccactgtgctaccccttgcggttccagccagcgcagcgatcgattcccgctggccgctgccgtcggtgcctgcccggtcctccactcctcccgctactagtactagtaccagcacactccactgtccactccactgccagtgccatcccattcccatccgagctgcagcgctcgacgacggggagaatagcgtggcgtgggcggcgccatgaagtacagcaaggaagataagcccgagagggcgggcggcgccggcgcagggtccagggcggtgccggtggcgctcgtcgtcgtcgtgctctgcgccttctccttctacctgggcggcatctacagcacgggacggagcctgctggactccatccagccggcgccgacggctctcctcgccctcggcgccgccacgacgacccgccgtccctccgacgacggccaggctcggccggcactggcgtccacggccgccgtggcgttccccgagtgccccgccgactaccaggactacaccccctgcaccgaccccaagcgctggcggaggattcgcaggcagcctcatcaaggaccccgtctgggtcatgaacgtcgtctcctcctacggcccaaactccctcggcgtcgtctacgacagagggctcatcggcgtcaaccacgactggtgtgaggcgttctcgacatatccacgcacctatgacctgttgcatcttgatggcctgttcacagcagagtctcacaggtgcgagatgaagtacgtgctccttgagatggaccgtatccttcgtcccacgggctacgccataatccgggagagcacctacttcctcgattctgtggcacccattgccaaagggatgcgatggagctgcgagaagcacagcagcgagaacaaggccgacaaggacaagatcctcgtctgccagaaaaagctttgggcaggaaagcagtgacgagagaggatcatccttcttccttccgagtataaaaaagtaggcatccagatcggccaacaaggcaagaggcgcttcaatacacatggaagatgagcgagtacttctgatacaaagagtgttcggcagttattatcaaaataaataagccgagtaaaactccatataggatccaacagttaccatttttcattaatcacagtttaattctttttctgtaccgacagtttgtaggcaaggagtgggtcaattcatataccatatggtgagcaaatgtaagtttactccacactagatgtgtatagcttggttggtgctactgctatcgatgtaatagcgggccacgtatttacttcacatgttttgtggatcaatatactatgactgtgatgtcctaaagcgacggattttgttgagtgctgctatcagttgacgtcgcaatgcattgttcttgagcaagcaattcctctgaaattgaaatagaaacaaacaagaaaaaggaaccggtaatgcaatgtagccaaagggggcaaaaagaaaaaggaatctgagaatgac

SEQ ID NO: 211137 - DNA, 2747 bp, Zea Mays
ccagtccctcgcagccaccacccaccgccgagactgcctcacggaccccaccagtacggacccacacgtcatcgggagtaccgcaggatgatgtaagaaaggagactcaaactatgagcttgatagatcaccctaatgtcatcaggttgcatatcccgatggttttgaggagccaattattgcctctattctaaaggaaacactcaaagctctagactacctccataggcaaggacatattcatcgtgatgtgaaggcaggtaatatccttattgataatcctggtgtagtcaagctcggggactttggtgtctctgcttgcatgtttgatagaggcgatagacaaagggctaggaatacatttgttggaacaccatgctggatggcaccagaagttctccagcctggaactggatataatttcaaagctgatatatggtcgtttggaataactgcactagagctggcacatggacatgctcccttttcgaagtaccctcccatgaaggttcttctcatgacgctccaaaatgctcctccaggtcttgactatgaccgtgataaaagattttcaaagtccttcaaggaaatggttgcgatgtgcttggtgaaagatcaaacgaagaggccaacagctgaaaaattacttaagcattcttttttcaagaatgcaaaacctccggagctaactgttaagaacattttaactgatttgccccctctttgggaccgtgtaaaggcactccagctaaaggatgcagcacaactagctttgaagagaatgccttcttcagaacaagaagcactttctatgagtgagtaccaacgaggtgtcagtgcatggaacttcgatattgaggatctaaaggctcaggcatcactgatatgtgatgatgatccacctgaaataaaagaagacgatgacactggtagaataactgacattgataaggatacatcttctgacgattattttggaaagacagcaccatcgaatggaaataactgcagtgatcgttcttctgtgccagcaaatcctggtcaaaatggtcccgaaataaatgaaatattgtcttccaacaatgggaatgcctacagtgaaaggaagcctgatggacgtaaaaacccagaatcagaaaatgattcattgccctcgacgtcgaagcatgatgctgatgggaaagattatagatgtgatttcaggcaaaaacagaggacatactcaggtccagttctgcaatctggtccgaataatagttcgatgactgaaaggggccacattattgaaagggatgcaggagttcaatctgtatctgataaacaaaagaatggtacaagaagagccaataatcttagtggtcctttgtcacttccaactcgtgcttctgcaaatagtctttcaagagccaataatcttagtggccctctgtcacttccaactcgtgcttctgcaaatagtctttctgctcctattcgatcttctgcaggttatgtaggctctttgggtgataaacctaagcgcactatggtggaaattaaaggccgcttctcagtgacatctgagaatgtggatcttgcaaaggttcaagaaattccagggagcagtgcctcacgtaaattgcaagaggggccttcactgagaaaatcagccagtgttggtgattggtcagcgaatgataagacaacgtctactaatcatcaaaggaaggaactctgcaatagctctgtatctacatcaattctgattccgcatcttcaaaaccttgtgaagcaaactgcattccagcaagatctgattacgaacctactaagtagcttgcaacaaaatgagagagtcgatgctcagtcaagagtccagagcacgacgagtgatacagtggttgaagctgctactgctgagagagaacactcgttacttgttaaaatttttgagttacaatctaggatgatttctttgactgacgaattaattgcggcaaagctgaaacatgttcagctgcaagaagagctaaatgtactctactgccaagaagaaatcctggatatgagagaggacgagagcgaagaagcatgatgcggtggagcctgcccccctttttttactactactactgagggggactaaaagccacatgctctaagcccgtgcaattgaggcttggctaactggctgcatacaatacaaggactcgaaggatcattggccaactccgggtgcaatcgaagaacctgcaatgagtttgatggagcggggtttatgatcgttggcctcggatttgaactgttatgtatattcagtcgacccgttcgatttctgactcgggtttggtttgttcagtgagcttttaaggcgtcttgcgatgcgcatctacttgatcattaagatggctatgacgccagcctctaatatatactactagtggtagtaataggtatagcgtccgtatagtaccattgtacttgtacctcagaagtcagcaagactgcgacaataattgcatcgcgtctgtagacagcggaatgcatgagtagctactgtagtacaatggagtgtccccgcatccaggctttgggctgggaaccctgcctgtgctgctgtgagcagtcatgttgtcacctgcgcccattacccgtacatgcgcaatcataaacaaatcagctagctcatcaataatgcactcacggacgggagggaatccaccttgtgcagatggctgcgcaaccatccagcccagcccaggttcagc

SEQ ID NO: 211138 - DNA, 1981 bp, Zea Mays
ctaacttgctacttgtattgggatctgatctgattacaagtgtacatgcatgtattatgcatacggacttcgtttatttcgcaaaaattatctgggcccgcccttgagggctgagctccacagtggttcttggagaggtctgtgatagactactaggctgaatacctcatggaatcttggagagaaaaggggatcttggagaggtttgtgacacactactgtggtgaatagacctatgcagaagagaaaaagggaaagagagaatgttctcaatgaattgaagtccctatgtcaaaaacaagagcaaggagctgttgtacaagtggcttgtggaaggagcatatcatatatttgtaggagataactttacacttgattcatgggcgactggattataggggcgttgataaacatcgtggggagtgttggcataaactttggtaccaaccttctgaagttgggccatgatcagagagaaaagctttccttaattaacaacagcgagggaaatgaaaaattcgttccaaagtctgtaatgcatttccagacttggagaatagtcactacttgcagctcttggatcaatccagtttgtgtccaacattgcttttgcctactttgttttgaacaagactatttcagtgaaagtcatggtagccacaacatttatagtctttggcaacatcttcttagtatcctttggcaaccatcaatcacctgtttacacgccggagcagctgatagcaaaatacagcaatttggtgtttgttctttattgcatgtcattggtctttgttgttgcatttaaccactatctctacaggagtggagaaactattatttcaaatagttcaaaaaatgctggcacatattggcgaacaatgttgccattttcttatgctgttgtatctggtgctattgggtcttgctcagtcttgtttgcaaagtcattgtctaacatgatgaggctgactatgaacagcagatacgagtttcatagctggttcacatactcaattgttcttctgtttctgtgtaccgctggattttggatgggaagattgaatgaagggttgtcattatttgatgcaatactgattgttccaatgtttcaaattgcttggaccttcttctctatctgtacaggatttgtttactttcaagaatatcaagtatttgatacgctcaggataattatggttgtattgggcatgacatttgtctttgttgggatctccttgctagcacccgatgacactaaagctgatacgaaagatggttcgagcactgccgaggaatctataattgatatggacagaaatggaaagatgcagatggaggagacagacacagatgatagcaactcgtttgtcacttctgtaaaagcaaaagcaaaacgtgtactgttgaaggcaaaggtcattggctttctttctggatctgattccaccattgatctgtcacaaatctgcctctcacctgatcttgtttgcagtctgcatgctccatgtcccttggccttggggaggacacaataagcgcttcgtccgtgcttgccatgcctatggtctcatcaagaacaaccggcttcagaggaattgaagatgaccgttcaaagtacgttcctttaagaaccacagattggagtaatctttagcggacggtgatatatagatacacagcaaaggtctttacttttgatgttgcatagcgggtggcagtaaagtattttgttgctccagaggctattgtttgttgtaatcatagttagctgtaacacgagtgtatagttcaacgtttctcccttcaaaacactgtccatagccagctgcatagtacatttgtaagttttagaatacagatcaaatgattcaattcgcttcttatttgctcaaccactcctacggttgcatgtgctgtgatcatcttatgcagaattgcaatagcttctgcggactgcggtctggccgcaccagggtgc

SEQ ID NO: 211139 - DNA, 2352 bp, Zea Mays
gaacgcccagggctagctctatctccctcccgagatctcctcccttcccccccttcttctctcccttgccgacgattacgccaggtgcccaggtcttcttcgggccgaggtcgctgccgccatacacttggtgcccaggtcttctccgggcccttcgccagcgtcgagcagcaccaggctgagctccacagtggttcttggagaggtctgtgatagactactaggctgaatacctcatggaatcttggagagaaaaggggatcttggagaggtttgtgacacactactgtggtgaatagacctatgcagaagagaaaaagggaaagagagaatgttctcaatgaattgaagtccctatgtcaaaaacaagagcaaggagctgttgtacaagtggcttgtggaaggagcatatcatatatttgtaggagataactttacacttgattcatgggcgactggattataggggcgttgataaacatcgtggggagtgttggcataaactttggtaccaaccttctgaagttgggccatgatcagagagaaaagctttccttaattaacaacagcgagggaaatgaaaaattcgttccaaagtctgtaatgcatttccagacttggagaataggtatacttttttttgctgctgggaactgcctcaacttcatgtcatttgcttatgctgcacaggttcttttcgttgtcctcgagacctcaaaagaaaaattagtttaacatgtaggatgtaatataatatgggaaactcatgaatggttgtgtaaacatgtaaagaataaaactctcatggagactgtatttgcgccctgtatttgcgccctgtttttttccattagttcttgggggtaaaaagataagagcttatcagtcatacagtttccatctctccttgtttcttagagctaataatgccatccaatcatattttcttttctctttctagcccagtgttttggtttgaacattgattatttacttgctatattacagtcactacttgcagctcttggatcaatccagtttgtgtccaacattgcttttgcctactttgttttgaacaagactatttcagtgaaagtcatggtagccacaacatttatagtctttggcaacatcttcttagtatcctttggcaaccatcaatcacctgtttacacgccggagcagctgatagcaaaatacagcaatttggtgtttgttctttattgcatgtcattggtctttgttgttgcatttaaccactatctctacaggagtggagaaactattatttcaaatagttcaaaaaatgctggcacatattggcgaacaatgttgccattttcttatgctgttgtatctggtgctattgggtcttgctcagtcttgtttgcaaagtcattgtctaacatgatgaggctgactatgaacagcagatacgagtttcatagctggttcacatactcaattgttcttctgtttctgtgtaccgctggattttggatgggaagattgaatgaagggttgtcattatttgatgcaatactgattgttccaatgtttcaaattgcttggaccttcttctctatctgtacaggatttgtttactttcaagaatatcaagtatttgatacgctcaggataattatggttgtattgggcatgacatttgtctttgttgggatctccttgctagcacccgatgacactaaagctgatacgaaagatggttcgagcactgccgaggaatctataattgatatggacagaaatggaaagatgcagatggaggagacagacacagatgatagcaactcgtttgtcacttctgtaaaagcaaaagcaaaacgtgtactgttgaaggcaaagtctgcatgctccatgtcccttggccttggggaggacacaataagcgcttcgtccgtgcttgccatgcctatggtctcatcaagaacaaccggcttcagaggaattgaagatgaccgttcaaagtacgttcctttaagaaccacagattggagtaatctttagcggacggtgatatatagatacacagcaaaggtctttacttttgatgttgcatagcgggtggcagtaaagtattttgttgctccagaggctattgtttgttgtaatcatagttagctgtaacacgagtgtatagttcaacgtttctcccttcaaaacactgtccatagccagctgcatagtacatttgtaagttttagaatacagatcaaatgattcaattcgcttcttatttgctcaaccactcctacggttgcatgtgctgtgatcatcttatgcagaattgcaatagcttctgcggactgcggtctggccgcaccagggtgc

SEQ ID NO: 211140 - DNA, 2678 bp, Zea Mays
cgggcggcgatggtcagcacagcactcggtagtcggttcggaggtcaggccctgtcgactttgtggccttgagttctggatgaggagatctcttgtatttgtggtctcgttactacagcccatgttatctcgggtccgtcctggacgaggcaacggccgccgcgaacggagaacggccgtcgagaggccacgtgtccacagccgtggcctcactcgcactactcgccctgctcgtcgtctccccagtccccaccagttgccttcgcatcgccggacgccgctcgccctccgcttctgcgactacgtccgagatggccgcctcggcattggcctcccgcgcgctgcggcctccgcacggccgccaccctcccgccccttcgccgcgtccgcgtccgcgctcggcaaccgccgccgctccaaggacgcgctgccgcgcggtggctgcggacgagcgccccgccgaccccgcgttccccgagcgccagaaccgcgggatttccggggcggtggagaggccggaggcggacgtggttgtgataggcagcgggctcggcgggctgtgctgcgccggcctcctggcgaggtacggccaggacgtgctggtgctcgagagccatgaccgcccgggaggcgccgcgcactcgttcgatatcaagggattcaacttcgattcagggccatccttgttctccggattccagtccagaggcccccaggcaaatccacttgctcaggtccttgatgcattaggcgaatcagtcccttgtgcgtcttatgactcttggatggtttatgtacctgaaggacaattcctctcacggataggaccaactgaattcctcaaggaccttgagatgtttgttggtgttgacgctgtccaggagtggaaaaaacttcttgatgcagttattcctatgtctgcagctgcaatggctttgcctccgctttccattcgaggtgatctgggcattatatctacagctgttggtagatacactccttcgttgttgaaatcattcatacaaatgggaccgcaaggagctctgggcgctacgaaacttctacgtccattcaaagaaattgttgattcgctggagctgaaaaatccatttgttcgtaactggatcgatcttctgtgctttctacttgctggagttaaatctgatggtgctctttctgcagaaatggtttatatgtttgcagaatggtacaaaccaggatgcttgcttgagtaccctctgggtggaactggagcaataatagatgcccttgtgagcggtattgaaaaatttggtggcagacttgctcttcgttctcatgttgaaaagatcttaatagagaatggtcgagcagttggtgtcaagctacaaagtggacaagttatccgtgcaaagaaagcggttgttagcaatgcatctatgtgggacactttggatctgttaccacccgatgctgtcccaaaatcatatgaagatagagtgaaagcaactccacaatgtgaatcgtttatgcatctccaccttggttttgatgcagagaatgctagagaggaccttgggatccatcacattgtggttgatgattggaacaaaggagttgatggtgaacaaaatgttgttttgatatccgttcccagtgttcttagcaaggacctggcaccgcccggaaagcacattcttcatgcatatactccagggacagaacctttcagtttgtgggagggactggacaggaaaagtgcagaatatcgaagactgaaggaagaacgttctgaggtgatgtggaaagctgtggagcttgctctcggcccaaaatttagccgcgaaaaatgcgacgtgaaattggtcgggacaccgctaacgcacaggagatttctccgaaggaacaggggaacctatggtccagccataaaagccggagaagccactttccctgggcaagcaacaccgatcccccagctcttttgctgcggtgactcgacctttccagggatcggagtgccggcagttgcggccagcggcgcgattgtggcgaacacgctggttccggtgtcgcagcattcagagctccttgacgctgttggaatctgagtggcagatacgtccgtcggtcctgaacgataatcaaagattttcccactgctgttggaaaaagatcgtatggctgaatggagaagaagacgacgacgacgaccgatacagtagagttttctagtcagaacggagactgggaaaatatgttgtacagtatattatttactacgactgcatgaagcttgtgctgcttctgacaaattggtcgcctcgttcgcctgcatgctccttgtattgttctaccgaaagctctgtggcgcatgcaggccttttgtcggacattttttttttctggtatacggaggaaggaccatgtgcttgtttgtacaactctagtcgcagtttgctgaagtccttgaacgacggcaacaaatgccagctgcgctgtcttttcattggagggcagcactggcctggttgttgtttattattattattattattattattattattattattattattattattattattattattattattattattattattatttaaaagagataataaggccaaaccaccatcgtctttcgtatacccccataaaagtccttttctcattttatgtgccta

SEQ ID NO: 211141 - DNA, 1868 bp, Zea Mays
atggccgcctcggcattggcctcccgcgcgctgcggcctccgcacggccgccaccctcccgccccttcgccgcgtccgcgtccgcgctcggcaaccgccgccgctccaaggacgcgctgccgcgcggtggctgcggacgagcgccccgccgaccccgcgttccccgagcgccagaaccgcgggatttccgggcttcgcctcctcatcgcgtcgcagttgtcgaccagggcggtggagaggccggaggcggacgtggttgtgataggcagcgggctcggcgggctgtgctgcgccggcctcctggcgaggtacggccaggacgtgctggtgctcgagagccatgaccgcccgggaggcgccgcgcactcgttcgatatcaagggattcaacttcgattcagggccatccttgttctccggattccagtccagaggcccccaggcaaatccacttgctcaggtccttgatgcattaggcgaatcagtcccttgtgcgtcttatgactcttggatggtttatgtacctgaaggacaattcctctcacggataggaccaactgaattcctcaaggaccttgagatgtttgttggtgttgacgctgtccaggagtggaaaaaacttcttgatgcagttattcctatgtctgcagctgcaatggctttgcctccgctttccattcgaggtgatctgggcattatatctacagctgttggtagatacactccttcgttgttgaaatcattcatacaaatgggaccgcaaggagctctgggcgctacgaaacttctacgtccattcaaagaaattgttgattcgctggagctgaaaaatccatttgttcgtaactggatcgatcttctgtgctttctacttgctggagttaaatctgatggtgctctttctgcagaaatggtttatatgtttgcagaatggtacaaaccaggatgcttgcttgagtaccctctgggtggaactggagcaataatagatgcccttgtgagcggtattgaaaaatttggtggcagacttgctcttcgttctcatgttgaaaagatcttaatagagaatggtcgagcagttggtgtcaagctacaaagtggacaagttatccgtgcaaagaaagcggttgttagcaatgcatctatgtgggacactttggatctgttaccacccgatgctgtcccaaaatcatatgaagatagagtgaaagcaactccacaatgtgaatcgtttatgcatctccaccttggttttgatgcagagaatgctagagaggaccttgggatccatcacattgtggttgatgattggaacaaaggagttgatggtgaacaaaatgttgttttgatatccgttcccagtgttcttagcaaggacctggcaccgcccggaaagcacattcttcatgcatatactccagggacagaacctttcagtttgtgggagggactggacaggaaaagtgcagaatatcgaagactgaaggaagaacgttctgaggtgatgtggaaagctgtggagcttgctctcggcccaaaatttagccgcgaaaaatgcgacgtgaaattggtcgggacaccgctaacgcacaggagatttctccgaaggaacaggggaacctatggtccagccataaaagccggagaagccactttccctgggcaagcaacaccgatcccccagctcttttgctgcggtgactcgacctttccagggatcggagtgccggcagttgcggccagcggcgcgattgtggcgaacacgctggttccggtgtcgcagcattcagagctccttgacgctgttggaatctgagtggcagatacgtccgtcggtcctggctgattagctgatacccctgcatacac

SEQ ID NO: 211142 - DNA, 1843 bp, Zea Mays
atggccgcctcggcattggcctcccgcgcgctgcggcctccgcacggccgccaccctcccgccccttcgccgcgtccgcgtccgcgctcggcaaccgccgccgctccaaggacgcgctgccgcgcggtggctgcggacgagcgccccgccgaccccgcgttccccgagcgccagaaccgcgggatttccgggcttcgcctcctcatcgcgtcgcagttgtcgaccagggcggtggagaggccggaggcggacgtggttgtgataggcagcgggctcggcgggctgtgctgcgccggcctcctggcgaggtacggccaggacgtgctggtgctcgagagccatgaccgcccgggaggcgccgcgcactcgttcgatatcaagggattcaacttcgattcagggccatccttgttctccggattccagtccagaggcccccaggcaaatccacttgctcaggtccttgatgcattaggcgaatcagtcccttgtgcgtcttatgactcttggatggtttatgtacctgaaggacaattcctctcacggataggaccaactgaattcctcaaggaccttgagatgtttgttggtgttgacgctgtccaggagtggaaaaaacttcttctgcaatggctttgcctccgctttccattcgaggtgatctgggcattatatctacagctgttggtagatacactccttcgttgttgaaatcattcatacaaatgggaccgcaaggagctctgggcgctacgaaacttctacgtccattcaaagaaattgttgattcgctggagctgaaaaatccatttgttcgtaactggatcgatcttctgtgctttctacttgctggagttaaatctgatggtgctctttctgcagaaatggtttatatgtttgcagaatggtacaaaccaggatgcttgcttgagtaccctctgggtggaactggagcaataatagatgcccttgtgagcggtattgaaaaatttggtggcagacttgctcttcgttctcatgttgaaaagatcttaatagagaatggtcgagcagttggtgtcaagctacaaagtggacaagttatccgtgcaaagaaagcggttgttagcaatgcatctatgtgggacactttggatctgttaccacccgatgctgtcccaaaatcatatgaagatagagtgaaagcaactccacaatgtgaatcgtttatgcatctccaccttggttttgatgcagagaatgctagagaggaccttgggatccatcacattgtggttgatgattggaacaaaggagttgatggtgaacaaaatgttgttttgatatccgttcccagtgttcttagcaaggacctggcaccgcccggaaagcacattcttcatgcatatactccagggacagaacctttcagtttgtgggagggactggacaggaaaagtgcagaatatcgaagactgaaggaagaacgttctgaggtgatgtggaaagctgtggagcttgctctcggcccaaaatttagccgcgaaaaatgcgacgtgaaattggtcgggacaccgctaacgcacaggagatttctccgaaggaacaggggaacctatggtccagccataaaagccggagaagccactttccctgggcaagcaacaccgatcccccagctcttttgctgcggtgactcgacctttccagggatcggagtgccggcagttgcggccagcggcgcgattgtggcgaacacgctggttccggtgtcgcagcattcagagctccttgacgctgttggaatctgagtggcagatacgtccgtcggtcctggctgattagctgatacccctgcatacac

SEQ ID NO: 211143 - DNA, 3001 bp, Zea Mays
atggccgcctcggcattggcctcccgcgcgctgcggcctccgcacggccgccaccctcccgccccttcgccgcgtccgcgtccgcgctcggcaaccgccgccgctccaaggacgcgctgccgcgcggtggctgcggacgagcgccccgccgaccccgcgttccccgagcgccagaaccgcgggatttccgggcttcgcctcctcatcgcgtcgcagttgtcgaccagggcggtggagaggccggaggcggacgtggttgtgataggcagcgggctcggcgggctgtgctgcgccggcctcctggcgaggtacggccaggacgtgctggtgctcgagagccatgaccgcccgggaggcgccgcgcactcgttcgatatcaagggattcaacttcgattcagggccatccttgttctccggattccagtccagaggcccccaggcaaatccacttgctcaggtccttgatgcattaggcgaatcagtcccttgtgcgtcttatgactcttggatggtttatgtacctgaaggacaattcctctcacggataggaccaactgaattcctcaaggaccttgagatgtttgttggtgttgacgctgtccaggagtggaaaaaacttcttctgcaatggctttgcctccgctttccattcgaggtgatctgggcattatatctacagctgttggtagatacactccttcgttgttgaaatcattcatacaaatgggaccgcaaggagctctgggcgctacgaaacttctacgtccattcaaagaaattgttgattcgctggagctgaaaaatccatttgttcgtaactggatcgatcttctgtgctttctacttgctggagttaaatctgatggtgctctttctgcagaaatggtttatatgtttgcagaatggtacaaaccaggatgcttgcttgagtaccctctgggtggaactggagcaataatagatgcccttgtgagcggtattgaaaaatttggtggcagacttgctcttcgttctcatgttgaaaagatcttaatagagaatggtcgagcagttggtgtcaagctacaaagtggacaagtaagctctagaagatattttattggcaagcaaacttaaatattgccccttcagaataaaaaagagagagagggagatgtcacagacacagccaataacagccagaactagcatggctttgatttaggtgtcatatgcttatcatagacaatgattttgtttggtgtttaatttcacaatatttttttgagagtccgacactgggaccgtctgcccttttttagatgataaaaggccttcgatgaggatgcactatgaacaatatcaatagcctgtgtctgtgaaaagcaaattaagtgttatccctaggaccacatatcttttttagtttaggcctttctccatgccttcaaactagtggcaaacaatcgagggtggagccaggatttagctatagggaggtcagtctataagtgcagagcatcaggatttagattaggataacaatgtcagaacccacgacttggtgactcggtgagacaactctcaccaccacactcttatcacatgtcagtctaagccactagacaaacttttcattacaatggctgctatcatccaatctatggtttgaagaaatatgtagctgttgaaatcttgttgggaatcatgtccttttgcaggttatccgtgcaaagaaagcggttgttagcaatgcatctatgtgggacactttggatctgttaccacccgatgctgtcccaaaatcatatgaagatagagtgaaagcaactccacaatgtgaatcgtttatgcatctccaccttggttttgatgcagagaatgctagagaggaccttgggatccatcacattgtggttgatgattggaacaaaggagttgatggtgaacaaaatgttgttttgatatccgttcccagtgttcttagcaaggacctggcaccgcccggaaagcacattcttcatgcatatactccagggacagaacctttcagtttgtgggagggactggacaggaaaagtgcagaatatcgaagactgaaggaagaacgttctgaggtgatgtggaaagctgtggagcttgctctcggcccaaaatttagccgcgaaaaatgcgacgtgaaattggtcgggacaccgctaacgcacaggagatttctccgaaggaacaggggaacctatggtccagccataaaagccggagaagccactttccctgggcaagcaacaccgatcccccagctcttttgctgcggtgactcgacctttccagggatcggagtgccggcagttgcggccagcggcgcgattgtggcgaacacgctggttccggtgtcgcagcattcagagctccttgacgctgttggaatctgagtggcagatacgtccgtcggtcctgaacgataatcaaagattttcccactgctgttggaaaaagatcgtatggctgaatggagaagaagacgacgacgacgaccgatacagtagagttttctagtcagaacggagactgggaaaatatgttgtacagtatattatttactacgactgcatgaagcttgtgctgcttctgacaaattggtcgcctcgttcgcctgcatgctccttgtattgttctaccgaaagctctgtggcgcatgcaggccttttgtcggacattttttttttctggtatacggaggaaggaccatgtgcttgtttgtacaactctagtcgcagtttgctgaagtccttgaacgacggcaacaaatgccagctgcgctgtcttttcattggagggcagcactggcctggttgttgtttattattattattattattattattattattattattattattattattattattattattattattattattattattatttaaaagagataataaggccaaaccaccatcgtctttcgtatacccccataaaagtccttttctcattttatgtgccta

SEQ ID NO: 211144 - DNA, 2466 bp, Zea Mays
atggccgcctcggcattggcctcccgcgcgctgcggcctccgcacggccgccaccctcccgccccttcgccgcgtccgcgtccgcgctcggcaaccgccgccgctccaaggacgcgctgccgcgcggtggctgcggacgagcgccccgccgaccccgcgttccccgagcgccagaaccgcgggatttccgggcttcgcctcctcatcgcgtcgcagttgtcgaccagggcggtggagaggccggaggcggacgtggttgtgataggcagcgggctcggcgggctgtgctgcgccggcctcctggcgaggtacggccaggacgtgctggtgctcgagagccatgaccgcccgggaggcgccgcgcactcgttcgatatcaagggattcaacttcgattcagggccatccttgttctccggattccagtccagaggcccccaggcaaatccacttgctcaggtccttgatgcattaggcgaatcagtcccttgtgcgtcttatgactcttggatggtttatgtacctgaaggacaattcctctcacggataggaccaactgaattcctcaaggaccttgagatgtttgttggtgttgacgctgtccaggagtggaaaaaacttcttgtgagtttgcttcatatttgggtttagctgtttagtaaaggctttgctagatgtagatgaacactttgaagtactgaacaatgcatggctgcaatggctttgcctccgctttccattcgaggtgatctgggcattatatctacagctgttggtagatacactccttcgttgttgaaatcattcatacaaatgggaccgcaaggagctctgggcgctacgaaacttctacgtccattcaaagaaattgttgattcgctggagctgaaaaatccatttgttcgtaactggatcgatcttctgtgctttctacttgctggagttaaatctgatggtgctctttctgcagaaatggtttatatgtttgcagaatggtacaaaccaggatgcttgcttgagtaccctctgggtggaactggagcaataatagatgcccttgtgagcggtattgaaaaatttggtggcagacttgctcttcgttctcatgttgaaaagatcttaatagagaatggtcgagcagttggtgtcaagctacaaagtggacaagttatccgtgcaaagaaagcggttgttagcaatgcatctatgtgggacactttggatctgttaccacccgatgctgtcccaaaatcatatgaagatagagtgaaagcaactccacaatgtgaatcgtttatgcatctccaccttggttttgatgcagagaatgctagagaggaccttgggatccatcacattgtggttgatgattggaacaaaggagttgatggtgaacaaaatgttgttttgatatccgttcccagtgttcttagcaaggacctggcaccgcccggaaagcacattcttcatgcatatactccagggacagaacctttcagtttgtgggagggactggacaggaaaagtgcagaatatcgaagactgaaggaagaacgttctgaggtgatgtggaaagctgtggagcttgctctcggcccaaaatttagccgcgaaaaatgcgacgtgaaattggtcgggacaccgctaacgcacaggagatttctccgaaggaacaggggaacctatggtccagccataaaagccggagaagccactttccctgggcaagcaacaccgatcccccagctcttttgctgcggtgactcgacctttccagggatcggagtgccggcagttgcggccagcggcgcgattgtggcgaacacgctggttccggtgtcgcagcattcagagctccttgacgctgttggaatctgagtggcagatacgtccgtcggtcctgaacgataatcaaagattttcccactgctgttggaaaaagatcgtatggctgaatggagaagaagacgacgacgacgaccgatacagtagagttttctagtcagaacggagactgggaaaatatgttgtacagtatattatttactacgactgcatgaagcttgtgctgcttctgacaaattggtcgcctcgttcgcctgcatgctccttgtattgttctaccgaaagctctgtggcgcatgcaggccttttgtcggacattttttttttctggtatacggaggaaggaccatgtgcttgtttgtacaactctagtcgcagtttgctgaagtccttgaacgacggcaacaaatgccagctgcgctgtcttttcattggagggcagcactggcctggttgttgtttattattattattattattattattattattattattattattattattattattattattattattattattattattatttaaaagagataataaggccaaaccaccatcgtctttcgtatacccccataaaagtccttttctcattttatgtgccta

SEQ ID NO: 211145 - DNA, 2321 bp, Zea Mays
atggccgcctcggcattggcctcccgcgcgctgcggcctccgcacggccgccaccctcccgccccttcgccgcgtccgcgtccgcgctcggcaaccgccgccgctccaaggacgcgctgccgcgcggtggctgcggacgagcgccccgccgaccccgcgttccccgagcgccagaaccgcgggatttccgggcttcgcctcctcatcgcgtcgcagttgtcgaccagggcggtggagaggccggaggcggacgtggttgtgataggcagcgggctcggcgggctgtgctgcgccggcctcctggcgaggtacggccaggacgtgctggtgctcgagagccatgaccgcccgggaggcgccgcgcactcgttcgatatcaagggattcaacttcgattcagggccatccttgttctccggattccagtccagaggcccccaggcaaatccacttgctcaggtccttgatgcattaggcgaatcagtcccttgtgcgtcttatgactcttggatggtttatgtacctgaaggacaattcctctcacggataggaccaactgaattcctcaaggaccttgagatgtttgttggtgttgacgctgtccaggagtggaaaaaacttcttctgttggtagatacactccttcgttgttgaaatcattcatacaaatgggaccgcaaggagctctgggcgctacgaaacttctacgtccattcaaagaaattgttgattcgctggagctgaaaaatccatttgttcgtaactggatcgatcttctgtgctttctacttgctggagttaaatctgatggtgctctttctgcagaaatggtttatatgtttgcagaatggtacaaaccaggatgcttgcttgagtaccctctgggtggaactggagcaataatagatgcccttgtgagcggtattgaaaaatttggtggcagacttgctcttcgttctcatgttgaaaagatcttaatagagaatggtcgagcagttggtgtcaagctacaaagtggacaagttatccgtgcaaagaaagcggttgttagcaatgcatctatgtgggacactttggatctgttaccacccgatgctgtcccaaaatcatatgaagatagagtgaaagcaactccacaatgtgaatcgtttatgcatctccaccttggttttgatgcagagaatgctagagaggaccttgggatccatcacattgtggttgatgattggaacaaaggagttgatggtgaacaaaatgttgttttgatatccgttcccagtgttcttagcaaggacctggcaccgcccggaaagcacattcttcatgcatatactccagggacagaacctttcagtttgtgggagggactggacaggaaaagtgcagaatatcgaagactgaaggaagaacgttctgaggtgatgtggaaagctgtggagcttgctctcggcccaaaatttagccgcgaaaaatgcgacgtgaaattggtcgggacaccgctaacgcacaggagatttctccgaaggaacaggggaacctatggtccagccataaaagccggagaagccactttccctgggcaagcaacaccgatcccccagctcttttgctgcggtgactcgacctttccagggatcggagtgccggcagttgcggccagcggcgcgattgtggcgaacacgctggttccggtgtcgcagcattcagagctccttgacgctgttggaatctgagtggcagatacgtccgtcggtcctgaacgataatcaaagattttcccactgctgttggaaaaagatcgtatggctgaatggagaagaagacgacgacgacgaccgatacagtagagttttctagtcagaacggagactgggaaaatatgttgtacagtatattatttactacgactgcatgaagcttgtgctgcttctgacaaattggtcgcctcgttcgcctgcatgctccttgtattgttctaccgaaagctctgtggcgcatgcaggccttttgtcggacattttttttttctggtatacggaggaaggaccatgtgcttgtttgtacaactctagtcgcagtttgctgaagtccttgaacgacggcaacaaatgccagctgcgctgtcttttcattggagggcagcactggcctggttgttgtttattattattattattattattattattattattattattattattattattattattattattattattattattattatttaaaagagataataaggccaaaccaccatcgtctttcgtatacccccataaaagtccttttctcattttatgtgccta

SEQ ID NO: 211146 - DNA, 919 bp, Zea Mays
ttgagtcgtgcaatgcaattttcgagcatcataccgtttctcattaaaatacacttccaaaggaatgtaattcgaaacctaagccagcggctgtgcaaaagaacgcgacgaaacctagcgctaaggctcctgctaaaaagggaaaacagcaagcatcaacaagtgccgaggaaccagacgagcctttgagtcccacttcagagaaaattcgccaacagaggcttgtggaagaagctgacttcaagtcaactacagacctttttgcaaagaagagcggtgaacaaaagtcactagatacttttatcccaaagtccgagagcgactttgcggaatacgcggagcttattgcaaataaactgctcccctacgataaaagttttcactacatggctctcctcaagaatgtcatgagactttccatgacaccgttgaaaggctcggacgcgaaagacatatcttcctccgtgacggcgattgctaacgagaagatcaaggctgagaaagaggccgcagcaggcaaaaagaaacaaggagcgagaaagaagcagctccacatcgagaaaggagacgacgacttcatccccggacggggtggtggctacgatgacccggacgagtacgacttcatgtgatttggctggaaggaagagtaagtagggttaataggtttccgtcttgtatacatttggcaagcagagaacatatcacgagagtttgcggcatactatactatggcatggaacatgcgttatctgtttgaggatgaattttgactctgcaggacaagaagatcacaagtgcttacttaattgttattgaatctctgtggtatttttttagcatacattgcattttcatttattttttgtcaactgtactgtaatactgtcgtcggtatgtactgtaatattgtcgctgg

SEQ ID NO: 211147 - DNA, 1031 bp, Zea Mays
caccctgctaacgcctgcctacttctccaacgcccttacacctatctgaaccttgctcgcaattctgaagatttccagcccgttgctcctgttgtgaaagtcgagccacttaaaaatcagtgggctgatgaagatgtcgatgccgacgacgtaaaagattcatgggaggaagaagaggaagaggagaaacctaagccagcggctgtgcaaaagaacgcgacgaaacctagcgctaaggctcctgctaaaaagggaaaacagcaagcatcaacaagtgccgaggaaccagacgagcctttgagtcccacttcagagaaaattcgccaacagaggcttgtggaagaagctgacttcaagtcaactacagacctttttgcaaagaagagcggtgaacaaaagtcactagatacttttatcccaaagtccgagagcgactttgcggaatacgcggagcttattgcaaataaactgctcccctacgataaaagttttcactacatggctctcctcaagaatgtcatgagactttccatgacaccgttgaaaggctcggacgcgaaagacatatcttcctccgtgacggcgattgctaacgagaagatcaaggctgagaaagaggccgcagcaggcaaaaagaaacaaggagcgagaaagaagcagctccacatcgagaaaggagacgacgacttcatccccggacggggtggtggctacgatgacccggacgagtacgacttcatgtgatttggctggaaggaagagtaagtagggttaataggtttccgtcttgtatacatttggcaagcagagaacatatcacgagagtttgcggcatactatactatggcatggaacatgcgttatctgtttgaggatgaattttgactctgcaggacaagaagatcacaagtgcttacttaattgttattgaatctctgtggtatttttttagcatacattgcattttcatttattttttgtcaactgtactgtaatactgtcgtcggtatgtactgtaatattgtcgctgg

SEQ ID NO: 211148 - DNA, 976 bp, Zea Mays
taattaattctgaagatttccagcccgttgctcctgttgtgaaagtcgagccacttaaaaatcagtgggctgatgaagatgtcgatgccgacgacgtaaaagattcatgggaggaagaagaggaagaggagaaacctaagccagcggctgtgcaaaagaacgcgacgaaacctagcgctaaggctcctgctaaaaagggaaaacagcaagcatcaacaagtgccgaggaaccagacgagcctttgagtcccacttcagagaaaattcgccaacagaggcttgtggaagaagctgacttcaagtcaactacagacctttttgcaaagaagagcggtgaacaaaagtcactagatacttttatcccaaagtccgagagcgactttgcggaatacgcggagcttattgcaaataaactgctcccctacgataaaagttttcactacatggctctcctcaagaatgtcatgagactttccatgacaccgttgaaaggctcggacgcgaaagacatatcttcctccgtgacggcgattgctaacgagaagatcaaggctgagaaagaggccgcagcaggcaaaaagaaacaaggagcgagaaagaagcagctccacatcgagaaaggagacgacgacttcatccccggacggggtggtggctacgatgacccggacgagtacgacttcatgtgatttggctggaaggaagagtaagtagggttaataggtttccgtcttgtatacatttggcaagcagagaacatatcacgagagtttgcggcatactatactatggcatggaacatgcgttatctgtttgaggatgaattttgactctgcaggacaagaagatcacaagtgcttacttaattgttattgaatctctgtggtatttttttagcatacattgcattttcatttattttttgtcaactgtactgtaatactgtcgtcggtatgtactgtaatattgtcgctgg

SEQ ID NO: 211149 - DNA, 1168 bp, Zea Mays
ctctccctctgtctcgactccccgatccgcgcgccatcgctagttccccgacgcgagtacttcgtgttccgatgcgcggttcgtggtggggcccctggcctcgcaccgtcccaccacggcggctccgtatctagagtggggagctctcgccgccgtcccacggcggtctcctaggatttgttcggagatcatctgctcattctgaagatttccagcccgttgctcctgttgtgaaagtcgagccacttaaaaatcagtgggctgatgaagatgtcgatgccgacgacgtaaaagattcatgggaggaagaagaggaagaggagaaacctaagccagcggctgtgcaaaagaacgcgacgaaacctagcgctaaggctcctgctaaaaagggaaaacagcaagcatcaacaagtgccgaggaaccagacgagcctttgagtcccacttcagagaaaattcgccaacagaggcttgtggaagaagctgacttcaagtcaactacagacctttttgcaaagaagagcggtgaacaaaagtcactagatacttttatcccaaagtccgagagcgactttgcggaatacgcggagcttattgcaaataaactgctcccctacgataaaagttttcactacatggctctcctcaagaatgtcatgagactttccatgacaccgttgaaaggctcggacgcgaaagacatatcttcctccgtgacggcgattgctaacgagaagatcaaggctgagaaagaggccgcagcaggcaaaaagaaacaaggagcgagaaagaagcagctccacatcgagaaaggagacgacgacttcatccccggacggggtggtggctacgatgacccggacgagtacgacttcatgtgatttggctggaaggaagagtaagtagggttaataggtttccgtcttgtatacatttggcaagcagagaacatatcacgagagtttgcggcatactatactatggcatggaacatgcgttatctgtttgaggatgaattttgactctgcaggacaagaagatcacaagtgcttacttaattgttattgaatctctgtggtatttttttagcatacattgcattttcatttattttttgtcaactgtactgtaatactgtcgtcggtatgtactgtaatattgtcgctgg

SEQ ID NO: 211150 - DNA, 4242 bp, Zea Mays
cacactgttcctggttttgttaagctctcgcttaacctaaccgccgggagcagaagtgttcgacgaaatgacgaacgccggggcggcgacaggcgccgcgctaggcgcgcgcacggcgcggtcctgcgatagctgcatgcggcggagggcgcgctggcactgccccgcggacaacgcgttcctgtgccagtcctgcgacgtctccgtccactcggcgaacccgctcgcgcggcgccaccaccgcgtccgcctcccctcggcgtcctgctcgtccccaccgcgcgatcccgacgcgccgacgtggctccacggcctcaagcgacggccgcgcacgccgcggtccaagcccgggggaagcaataagcatgaggcggcgcccagctctatcgccgcggccgcgtcggcagcggtccccgacctcgaggcggaggcggaggcggaggcggaggagtccggctccggtatcctgggcgataacgacgacgaccacgggttccaggacgacgacgagaaccttctgtactgcgtgccggtgttcgatcctatgctcgccgagttctacaaccccgtggccgacgagggggagcagaagccggcctgcctgatgctgcctctcgtggaaacatcgccggagttcgcctccggcggcttggcagaggcggacgggctctccggcttcgacgtcccggacatggatctcgctagcttcgcggcggacatggagagcctcctcatgggagtcgacgacgggtttgacgatctgggtttcttggacgaacagaagcctcaggtgaacgcggacgtggacttggaggccatggcggcgccggagcctgaacgagaggacaagaaaaggaagcgggacggctttgattatctgggtttcttggacgaagagaagccacaggtgaacgcggacgtagacttggaggccatggtggcgccggagcctgaacgagaggacaagaaaaggaagcgaacagatatgatactcaagctgaactacgagggcgtcatcgcctcgtgggttcgtgacggcggatcaccgtggtaccacggcgagcgtcctcacctcgacgatccttacgagctatggttggagttcccggcaacggggagccggggacttttcggcggcaccatgacagcggtgaccggcggcgagcgtgaggcacgggtgtcgcggtacagggagaagcggcggaggcggctgttcgccaagaagatccggtacgaggtgcgcaagctcaacgccgagaaacggccgcggatgaagggccggttcgtgaagcgcaccacgctcccgccgctgccgaggccgccaccgccgtcacagcagcaacagaagaagaagcaactgccacgctcattgccacacgtgggcatggtgctcgcgccacctccaggagcggacgggcgcttccggttttgagtctttgagatcacgcacgcaagcacggaaggctcggtatcaggacatcaggtgcacaacggagggatagtgcacaaatgcacaaacttgatcctgaccttccatctcccaatgaacggtcaccgccaaaattgcaagaaggcccctccgcacctcctcctcctttcatatatgttttgcgaaaaccccctcggacgtgcttcctctctcccccaacgctgcaaggcagcagacacacgatgccgcgaatcggactcaggcagagccaccgacctcaccgtccacggcctagtcaccctcgacgtcatcgtccaccgcccacacgccgccgaccgccttgactagtcacagctgtacgcaggctctccgcagcggctggttgcagcgcgcgctggtgcccgtcaccgtgcccgccggcaccagcgcacagggccgcggcgcgctcgcgcacatcttcaggctcgcgatcagcaccaatggtgtgtttgtgctgatgaatgttcgataaaatgagttaaataagcaccattcagctaacattcaatggtaaaatttagaaccaacattgaactaatattgaagcaaaatacaaagccaattcagctatcattcaagcaatactcaaagccaacattcagctatacatcggtgcatcattctcgctctggtagcatgtcctttctactctagtattaaatttgggatgacgaattagcttgggctccccacaagatgctcactactttacgcctcaaatcagtggcagacgcaagacgagaattcatgggacccaaaaacccacatgacaaatcaagcaaaagatcgtaaaaaccagtgttgcatttaattcaagttatatatcaaaacacgatataaattcaaagaaaaaataaatgaacaaaagaagtaaacataatagcctaataaaaattgggtgtaccttgtcgaatattgatctcttcgatgggcaggtgtgccgagaaagtggtgggtcaagggacgtctctagttgagagatggggctcgttggttcgacaagctctgacctccaaggacgggtcacatcatcgcgacgaacgaaatctgacctatcgagcaagctcgctcatgaggatgacgagcgaggcgggggcaccgggaaggggtggggttgtgtagtgtcgcgacataaggaacgagacatcgaagcggactggatcaggcggtgtcgataagaatgggactgggtcatagtcaaaatgttcctagatcgattggattgagaagcggggtcatgggtcgtgggtcgacactttaaaaggagaagtatacatctatgagacgagaatattatgaatttgatatgttgagtctaatgggccgatgatcttgggtcgattctatgggtcaagggtcgtgttctaaaatttcaataacaacctaacaccagtctaatattatctcattctaccattgaaactttaggctatctctatcagattccatatcttatcctttattttaaactttactctacaaacagtgtcatctacagtcatgcatcccctattttacaccacctgctggagacagtgttatatttatgcaaacagaaaaacttcaaccgacctaaaactttaatttttctatactaacattaaatgaacattagatatataagagagaaaattaagggggacatggcccactttgcccccctctcggtctgcccctgcctcaaatatatctatatgtagtacttggcatcaacctagctcgcgatagactgagcatgggggcagacctgctctttgataacgttcagctcctcgtcactccggccggtggtgtatccctcggtgattacatcggcaccaatctcatcaaaatgggagaccatctgcccaagggccagactgcctccttgacaaatgccctagtgaccatgcactccacatggtcaggaagcccccgcaaaagatcaactagagacgcctcgatcgatggcagggtcgagagacgggtgcacgccgtgccggcaaccaaacgaagctctcggagtttggcgctcctttctcacagcaggacgtccacctggcgcgttgcagcgatgacgctatcatgggcgagcaagagctcgcgcgctttccccgctgtcaatgtgtcacacccagttctagaaggtaaaccgaatgcgaaccatgtacgtgtcaggatcagaaattcacgtactcaacgattacacaattggacatcatcacacaatgctcaaaataatagcggaaataattataactttattacatcatgatgtccaaaacattcacatagtcattaacttaaacataaatcaaagtgttgaacgagacgcggtaagataaggccttcataggcagccgactgggagtttgccgctagtctagattagaattccttgaagatctgaaactcctagaaatccttagcatttccttcatcttctcctgagcaatggttgcaatagggacaacctggtgtttggtgtttaagcaagagtgagtacacatcaacgtactcaacaaatgtcatgtttggttgaagtgaactagctgtatgtggggttaagctcaaagcagttgcttttagttggtcaggtatttatcattaatagaagccaagtttaatcacaaacccaagctgatattccaagttttatatacatattgtacatatgtatatatatgaaggatgtgatgttgagtatttacttttctaggattcaatatcccatggatgtgtatgggtatacagacatggaaatgctgagaagtgtaatgtacttgcaatgatgc

SEQ ID NO: 211151 - DNA, 1985 bp, Zea Mays
ctttgtattactgtatatgcatcgcgtcttctttgatcttgaaaccaggtggtgcgcaaggaagcttggaagttggttccctctgcaccacttttcgagtctgaaacacactttccagctctcctccgacaaagactcagaccgccggcggcatgctcctcctcgacggcgaccttgtcctctcctcctccggaagcaccggcgctgcctctcgcacgagcgacagcgggagggagctcgtggcggcgctcttggagagccccgggatccgccacgcggtcgaccggctgaaggtcgcgccggagaggcggatctcggcagggcaggagggggcgccgaagcacgtctacgtgttccagcgggagtacgccacggtggatccggcgcgcgtcgagttagttggcacagatgaggctactacatgcattggtgttgtaattcgcaacaacaagactggaatgacctctgttagccatatggattttccagaaattgtggagggagggatcaagcagatgttagaattacttggttcaccttattggtggctttgctgatgcttccacaaaggttgttcgttcctctggaaagaaacacatcaaacaggaagggtattcctatccactatgttgcaaaatagttgaagtgctgcataagtcccagctacaattccaccttcgatcattttgtgtccttgagaataacacgaagagtgactcatttggaaatgcgctacctataattggtggatttgtggttagtgatttcctctcttctgcatccgttacattgttggttagttggcaccaatctgcttagaaccagtacatagcagttccgatgccttcctacagaatgtccttgaaggtctcattgaaggttaatccaaagttatattctgcagtcacctctccatttccccctacatccatttttgtgtttggtttcggtgcggatttcaaatattcatgcatacaatagagctttagcactgtgaatttgaacatacaaaacttgagattgattgttcacataggctgacctggtttcttcaggttgaaacctcatctggagttgtgataccagcaacctttgatatggattcaaggtgcccagatgaagttgtcaggagaattcgtgtgagcgttagctcttatgatccaacttggcaaggaaggttgctggagacttacgatactcaggacgatgttttccaaattgcacctgcctgctggatgccagattgggccgatatagcgtcctcactcaaccagctctcggactccgaagtcctgctgcggtgctccacctctccagccgcagaaccacctcacttcgtggaaaacgaaagaaggatctggaaatacctgatcgataacccggactgggaagagacgttcccaaaacacaagccccgggtgttccatagggcaagcgacggaagctggtcaaggtactcgtagtgcaagccaagggcttccatcgtctgctgttatcgtcggtgctcccacacatggaacgaaccagaagggaaacccccctctccgttgatttgaacagtgacatattaagtttgagtgcaaagttttctgcgcactgcgattagcacatccgtggacgcttggagatgggagtaaattttataaagtctcttggagatggcagctgctctaaggaccagctaaaaactaaaaaaacgcatgctcttgggccgaaaatgatgagcgattcctcacatctccgttctttttctttatcgaaattttcatttctacgcagttttgtatttttctgaagttataaggttccttgttttgtgcacaaacttataatgcaacttccccaaaactcatataacaccacttcctgcataaacttcaccgaggaacttgtgggcgtaagtttatttattcgtgcataacttttctcagatatatttaaatttgtctggacaacttctcgggattgatttttcatgaaatgct

SEQ ID NO: 211152 - DNA, 1721 bp, Zea Mays
ctttgtattactgtatatgcatcgcgtcttctttgatcttgaaaccaggtggtgcgcaaggaagcttggaagttggttccctctgcaccacttttcgagtctgaaacacactttccagctctcctccgacaaagactcagaccgccggcggcatgctcctcctcgacggcgaccttgtcctctcctcctccggaagcaccggcgctgcctctcgcacgagcgacagcgggagggagctcgtggcggcgctcttggagagccccgggatccgccacgcggtcgaccggctgaaggtcgcgccggagaggcggatctcggcagggcaggagggggcgccgaagcacgtctacgtgttccagcgggagtacgccacggtggatccggcgcgcgtcgagttagttggcacagatgaggctactacatgcattggtgttgtaattcgcaacaacaagactggaatgtaagtgaaaaagaagtgagcatttatctgatcctgacctctgttagccatatggattttccagaaattgtggagggagggatcaagcagatgttagaattacttggttcaccttattggtggctttgctgatgcttccacaaaggttgttcgttcctctggaaagaaacacatcaaacaggaagggtattcctatccactatgttgcaaaatagttgaagtgctgcataagtcccagctacaattccaccttcgatcattttgtgtccttgagaataacacgaagagtgactcatttggaaatgcgctacctataattggtggatttgtggttgaaacctcatctggagttgtgataccagcaacctttgatatggattcaaggtgcccagatgaagttgtcaggagaattcgtgtgagcgttagctcttatgatccaacttggcaaggaaggttgctggagacttacgatactcaggacgatgttttccaaattgcacctgcctgctggatgccagattgggccgatatagcgtcctcactcaaccagctctcggactccgaagtcctgctgcggtgctccacctctccagccgcagaaccacctcacttcgtggaaaacgaaagaaggatctggaaatacctgatcgataacccggactgggaagagacgttcccaaaacacaagccccgggtgttccatagggcaagcgacggaagctggtcaaggtactcgtagtgcaagccaagggcttccatcgtctgctgttatcgtcggtgctcccacacatggaacgaaccagaagggaaacccccctctccgttgatttgaacagtgacatattaagtttgagtgcaaagttttctgcgcactgcgattagcacatccgtggacgcttggagatgggagtaaattttataaagtctcttggagatggcagctgctctaaggaccagctaaaaactaaaaaaacgcatgctcttgggccgaaaatgatgagcgattcctcacatctccgttctttttctttatcgaaattttcatttctacgcagttttgtatttttctgaagttataaggttccttgttttgtgcacaaacttataatgcaacttccccaaaactcatataacaccacttcctgcataaacttcaccgaggaacttgtgggcgtaagtttatttattcgtgcataacttttctcagatatatttaaatttgtctggacaacttctcgggattgatttttcatgaaatgct

SEQ ID NO: 211153 - DNA, 1443 bp, Zea Mays
tcaaaacttattggtggttcaccattttgttgttcgttcctctggaaagaaacacatcaaacaggaagggtattcctatccactatgttgcaaaatagttgaagtgctgcataagtcccagctacaattccaccttcgatcattttgtgtccttgagaataacacgaagagtgactcatttggaaatgcgctacctataattggtggatttgtggttagtgatttcctctcttctgcatccgttacattgttggttagttggcaccaatctgcttagaaccagtacatagcagttccgatgccttcctacagaatgtccttgaaggtctcattgaaggttaatccaaagttatattctgcagtcacctctccatttccccctacatccatttttgtgtttggtttcggtgcggatttcaaatattcatgcatacaatagagctttagcactgtgaatttgaacatacaaaacttgagattgattgttcacataggctgacctggtttcttcaggttgaaacctcatctggagttgtgataccagcaacctttgatatggattcaaggtgcccagatgaagttgtcaggagaattcgtgtgagcgttagctcttatgatccaacttggcaaggaaggttgctggagacttacgatactcaggacgatgttttccaaattgcacctgcctgctggatgccagattgggccgatatagcgtcctcactcaaccagctctcggactccgaagtcctgctgcggtgctccacctctccagccgcagaaccacctcacttcgtggaaaacgaaagaaggatctggaaatacctgatcgataacccggactgggaagagacgttcccaaaacacaagccccgggtgttccatagggcaagcgacggaagctggtcaaggtactcgtagtgcaagccaagggcttccatcgtctgctgttatcgtcggtgctcccacacatggaacgaaccagaagggaaacccccctctccgttgatttgaacagtgacatattaagtttgagtgcaaagttttctgcgcactgcgattagcacatccgtggacgcttggagatgggagtaaattttataaagtctcttggagatggcagctgctctaaggaccagctaaaaactaaaaaaacgcatgctcttgggccgaaaatgatgagcgattcctcacatctccgttctttttctttatcgaaattttcatttctacgcagttttgtatttttctgaagttataaggttccttgttttgtgcacaaacttataatgcaacttccccaaaactcatataacaccacttcctgcataaacttcaccgaggaacttgtgggcgtaagtttatttattcgtgcataacttttctcagatatatttaaatttgtctggacaacttctcgggattgatttttcatgaaatgct

SEQ ID NO: 211154 - DNA, 1142 bp, Zea Mays
aaaacttattggtggttcaccattttgttgttcgttcctctggaaagaaacacatcaaacaggaagggtattcctatccactatgttgcaaaatagttgaagtgctgcataagtcccagctacaattccaccttcgatcattttgtgtccttgagaataacacgaagagtgactcatttggaaatgcgctacctataattggtggatttgtggttgaaacctcatctggagttgtgataccagcaacctttgatatggattcaaggtgcccagatgaagttgtcaggagaattcgtgtgagcgttagctcttatgatccaacttggcaaggaaggttgctggagacttacgatactcaggacgatgttttccaaattgcacctgcctgctggatgccagattgggccgatatagcgtcctcactcaaccagctctcggactccgaagtcctgctgcggtgctccacctctccagccgcagaaccacctcacttcgtggaaaacgaaagaaggatctggaaatacctgatcgataacccggactgggaagagacgttcccaaaacacaagccccgggtgttccatagggcaagcgacggaagctggtcaaggtactcgtagtgcaagccaagggcttccatcgtctgctgttatcgtcggtgctcccacacatggaacgaaccagaagggaaacccccctctccgttgatttgaacagtgacatattaagtttgagtgcaaagttttctgcgcactgcgattagcacatccgtggacgcttggagatgggagtaaattttataaagtctcttggagatggcagctgctctaaggaccagctaaaaactaaaaaaacgcatgctcttgggccgaaaatgatgagcgattcctcacatctccgttctttttctttatcgaaattttcatttctacgcagttttgtatttttctgaagttataaggttccttgttttgtgcacaaacttataatgcaacttccccaaaactcatataacaccacttcctgcataaacttcaccgaggaacttgtgggcgtaagtttatttattcgtgcataacttttctcagatatatttaaatttgtctggacaacttctcgggattgatttttcatgaaatgct

SEQ ID NO: 211155 - DNA, 1455 bp, Zea Mays
ctaaaagacacgtcagccccacacagaagccgacatgtcctgctcctctgaattctgatccgtgcggtgcggccgtgcgggtgtccgtctcctccattgcgaagccgcgagctcctgcgtcaaccagatcacacgaaccaaaccagcgcctcctcccccgagtctcaccgccagcgcccatggcgacacgctactggatcgtgtctgctgcctaactgctatctgtccagcccaggctgcccagctgatcggacgcctaaaaccaaccttttgtgttggctccgcgttcaggttcgtgtgggatgagggcaaataccccacaatgtctccgctcaaggagattgttggcagcatccagtcacaggttgccaagattgaggatgatatgaaggtgcgagcagcggaatataataatgtaaggagccagcttagtgcaatcaacagaaagcaaagtgggagcttagcggttcgtgatctttccaatctggtaaaaccggaggatatgatcacctcggaacatcttgtgacacttcttgcaatcgttcccaagtactcccaaaaagactggctgtcaagctatgagacacttgatacatttgtggtacctaggtcatctaaaaagctctatgaagacaacgaatatgctctctacactgtgacactatttgctaaggttgttgacaactttaaggtccgtgctcgcgagaagggttttcagatccgtgatttcgagtacagtcctgaagcacaggaaagccggatgcaggagatggagaagctactgcgagaccaagaagctatgaggaccactcttcttcagtggtgttatgccagctacagcgaggtattcagttcctggatgcacttttgtgctgtgcgtgtctttgtggagagcattcttagatatggtctgccgccatcattcctgtctgctgttcttgcaccatctacaaagagcgagaagaaagtaaggagcatcttagacgagctctctggcgatgcccatagcctgtattggaaatccgaagacgatgtaggcgttgctggtctgggaggcgaaaccgaggcgcacccttacgtctccttcaccataaattttgtctgagacaaagtatggttcctagaccgtctgtggcctaggcaatataatacttggaagcagctattggaacgcaagcgcggaacgagcatgtatattactctgttgatttatcggttcatgtggtcctgtagttcatatcacagagagatcagccgacggatgctgtaatttctgaggaacctatggaattcctgtagttcatgtggtcctgtaatttctgaggactacctacctatttccctgcagcactgcaccttgtaaaaagacttaacccgtgtctgtagcagctggctactggatttattacatctacaataaaagtcatttttaatggttgtttcataagagttttc

SEQ ID NO: 211156 - DNA, 1366 bp, Zea Mays
ctaaaagacacgtcagccccacacagaagccgacatgtcctgctcctctgaattctgatccgtgcggtgcggccgtgcgggtgtccgtctcctccattgcgaagccgcgagctcctgcgtcaaccagatcacacgaaccaaaccagcgcctcctcccccgagtctcaccgccagcgcccatggcgacacgctactggatcgtgttcgtgtgggatgagggcaaataccccacaatgtctccgctcaaggagattgttggcagcatccagtcacaggttgccaagattgaggatgatatgaaggtgcgagcagcggaatataataatgtaaggagccagcttagtgcaatcaacagaaagcaaagtgggagcttagcggttcgtgatctttccaatctggtaaaaccggaggatatgatcacctcggaacatcttgtgacacttcttgcaatcgttcccaagtactcccaaaaagactggctgtcaagctatgagacacttgatacatttgtggtacctaggtcatctaaaaagctctatgaagacaacgaatatgctctctacactgtgacactatttgctaaggttgttgacaactttaaggtccgtgctcgcgagaagggttttcagatccgtgatttcgagtacagtcctgaagcacaggaaagccggatgcaggagatggagaagctactgcgagaccaagaagctatgaggaccactcttcttcagtggtgttatgccagctacagcgaggtattcagttcctggatgcacttttgtgctgtgcgtgtctttgtggagagcattcttagatatggtctgccgccatcattcctgtctgctgttcttgcaccatctacaaagagcgagaagaaagtaaggagcatcttagacgagctctctggcgatgcccatagcctgtattggaaatccgaagacgatgtaggcgttgctggtctgggaggcgaaaccgaggcgcacccttacgtctccttcaccataaattttgtctgagacaaagtatggttcctagaccgtctgtggcctaggcaatataatacttggaagcagctattggaacgcaagcgcggaacgagcatgtatattactctgttgatttatcggttcatgtggtcctgtagttcatatcacagagagatcagccgacggatgctgtaatttctgaggaacctatggaattcctgtagttcatgtggtcctgtaatttctgaggactacctacctatttccctgcagcactgcaccttgtaaaaagacttaacccgtgtctgtagcagctggctactggatttattacatctacaataaaagtcatttttaatggttgtttcataagagttttc

SEQ ID NO: 211157 - DNA, 1658 bp, Zea Mays
ctaaaagacacgtcagccccacacagaagccgacatgtcctgctcctctgaattctgatccgtgcggtgcggccgtgcgggtgtccgtctcctccattgcgaagccgcgagctcctgcgtcaaccagatcacacgaaccaaaccagcgcctcctcccccgagtctcaccgccagcgcccatggcgacacgctactggatcgtgtctctgcccgtgcagtcacctggcgccatcgcaagctccctgtggtctcgcctccaggactccatctcccgccactccttcgacactccgctctaccgcttcaacgtcccggatctccgcgtcggcaccctcgactcgcttctcgccctcagcgacgacctcgtcaagtccaatgttttcgtggagggcgtgtcacacaagatccggaggcagatcgaggacctcgagcgcgccggaggggtcgagagtgggaccctcaccgtcgatggcgttcctgtcgacacctacctcaccaggttcgtgtgggatgagggcaaataccccacaatgtctccgctcaaggagattgttggcagcatccagtcacaggttgccaagattgaggatgatatgaaggtgcgagcagcggaatataataatgtaaggagccagcttagtgcaatcaacagaaagcaaagtgggagcggttcgtgatctttccaatctggtaaaaccggaggatatgatcacctcggaacatcttgtgacacttcttgcaatcgttcccaagtactcccaaaaagactggctgtcaagctatgagacacttgatacatttgtggtacctaggtcatctaaaaagctctatgaagacaacgaatatgctctctacactgtgacactatttgctaaggttgttgacaactttaaggtccgtgctcgcgagaagggttttcagatccgtgatttcgagtacagtcctgaagcacaggaaagccggatgcaggagatggagaagctactgcgagaccaagaagctatgaggaccactcttcttcagtggtgttatgccagctacagcgaggtattcagttcctggatgcacttttgtgctgtgcgtgtctttgtggagagcattcttagatatggtctgccgccatcattcctgtctgctgttcttgcaccatctacaaagagcgagaagaaagtaaggagcatcttagacgagctctctggcgatgcccatagcctgtattggaaatccgaagacgatgtaggcgttgctggtctgggaggcgaaaccgaggcgcacccttacgtctccttcaccataaattttgtctgagacaaagtatggttcctagaccgtctgtggcctaggcaatataatacttggaagcagctattggaacgcaagcgcggaacgagcatgtatattactctgttgatttatcggttcatgtggtcctgtagttcatatcacagagagatcagccgacggatgctgtaatttctgaggaacctatggaattcctgtagttcatgtggtcctgtaatttctgaggactacctacctatttccctgcagcactgcaccttgtaaaaagacttaacccgtgtctgtagcagctggctactggatttattacatctacaataaaagtcatttttaatggttgtttcataagagttttc

SEQ ID NO: 211158 - DNA, 1216 bp, Zea Mays
ctaaaagacacgtcagccccacacagaagccgacatgtcctgctcctctgaattctgatccgtgcggtgcggccgtgcgggtgtccgtctcctccattgcgaagccgcgagctcctgcgtcaaccagatcacacgaaccaaaccagcgcctcctcccccgagtctcaccgccagcgcccatggcgacacgctactggatcgtgtctctgcccgtgcagtcacctggcgccatcgcaagctccctgtggtctcgcctccaggactccatctcccgccactccttcgacactccgctctaccgcgtgcgagcagcggaatataataatgtaaggagccagcttagtgcaatcaacagaaagcaaagtgggaggtcatctaaaaagctctatgaagacaacgaatatgctctctacactgtgacactatttgctaaggttgttgacaactttaaggtccgtgctcgcgagaagggttttcagatccgtgatttcgagtacagtcctgaagcacaggaaagccggatgcaggagatggagaagctactgcgagaccaagaagctatgaggaccactcttcttcagtggtgttatgccagctacagcgaggtattcagttcctggatgcacttttgtgctgtgcgtgtctttgtggagagcattcttagatatggtctgccgccatcattcctgtctgctgttcttgcaccatctacaaagagcgagaagaaagtaaggagcatcttagacgagctctctggcgatgcccatagcctgtattggaaatccgaagacgatgtaggcgttgctggtctgggaggcgaaaccgaggcgcacccttacgtctccttcaccataaattttgtctgagacaaagtatggttcctagaccgtctgtggcctaggcaatataatacttggaagcagctattggaacgcaagcgcggaacgagcatgtatattactctgttgatttatcggttcatgtggtcctgtagttcatatcacagagagatcagccgacggatgctgtaatttctgaggaacctatggaattcctgtagttcatgtggtcctgtaatttctgaggactacctacctatttccctgcagcactgcaccttgtaaaaagacttaacccgtgtctgtagcagctggctactggatttattacatctacaataaaagtcatttttaatggttgtttcataagagttttc

SEQ ID NO: 211159 - DNA, 3051 bp, Zea Mays
attttccaaaaccgtgggttactgttactgattctatgcccccaaggtaaatgctcgctgtgcagtgagactgcggaagaggatacaacatgaagagatgaaatctgcctaccaacgaaggctcctctctgatgcagaatcagcacgctggttaaaccatgcaatcgacaagatgtggcctgtctgtatggagaagatcgtttcaaaacttctacggcccatcataccatggttcttggataagttcaaaccttggacagtcagcaaagcaagtattcaggaactttacatgggcaggaatccaccaatctttacctccatgagagttctaccagagacatcagatgatgaccatttggttcttgagctgggattgaattttctttctgctgaagatatgagtgctgtacttgctatgcagctgcacaagagtgtgggacttggaatgactgcaaagatgcatttaacaagcatgcatgtcgagggaaagatattagttggtgtgaaatttgttcggagttggccatttcttggccgtgtaagactatgttttgtggagccaccttattttcagatggctgtgaaaccactcattaatcacgggctcgatgtcactgagtttccaggaatttcaggatggctggataagttgatggatactgcatttgggcagacattagttgagcccaatgtgatagtaataaatgtggaaaaatttgcatctactccttcagaaaataactggttcagcattgaggagagacctcctattgcatatgtgaagcttgagattctagaaggaactgacatgaagccatctgatataaatggactagcggacccatatgtgaaaggtcaccttggtcctttcaaattccaaacacagatacagaggaaaacattgtcccctaagtggtttgaagaatttaaaataccaatcacatcatgggaggcaacgaatgaacttgtcatggaagttcgtgataaggaccccatgtttgatgactcacttgggcaatgtaccattagtttacatgatctgagaggtggacaaagacatgacaaatggatatcactgaataatgtgaagaaaggaaggattcacttggcagtaacaattgatgatatatccgaggaccaaaatacatcaagtttggaccaatcattgaagcaagcggatactgaactaccagtatcaacatctgtttgtagcgaagtggatgctagtgaacctcctgaagaaaagaaagtcttaatggatgaagtggagcacataaacattgatggacaagaacagcctggaggtttatatgtacatcgccctggcactggggttccaaggacatgggaatcccggaaaggacgagcacgaaacccagacacacagattcaccaagaggttgacaagcaaaaggaagtcccaacaccaaaagggagtgggcaagggggtctatttaacgtaggctcctttttccggtggaactcgaggaaggggagctccagaaatctcgatgccagccctcctgcaactccgggttctcagagcgtgacagagcttgatccaaagctccctcaaactccacgtcccaacctgaaggagctaggcgagaagcggacgtcgataaagatcgtagtggacgaagaagcaagcccggcagacaaggtgggaggtgcggagaactcaggagaagatgtggcgaaggtgatagagaaaaatgcaggtgaaccgggcaggtcactgacaagcacattgagcaggaagatttgcagaaggagagcagatgataggctatcagatatccccgagaagattgaagctcgtggatctaagccggtgagtgaagggcctattcttgttagaggtgagccaatgataacagtggaccatccgacgacggaacatagcgatggaggtggcactgagcaagatgcggtgggagcaaaggttgctactcagacctcataaggattgcgacttaaggcaacagaagaaatgcaaagcccggcccagtaaaccatcatcgtctttcacggcccatcaaagaggcatccgcgttcgcacattgcagtagcttcccacacccccctccagagccggcacgttctctagactatatttcctatcttattcattttcttctatgggataatactcttgttaatatgagttatacataagcttgtcgctgcacaataatgtaatttatagggtcttattgctgaagtatccatcatcagtacatttatggatgtagtttttagctctgatctatatatcggttgataagataagaagttttctttgaaaaggaaataatccagaataatgtggcggggtcactgttcaattggtctacaacttgtttgccaaagaattggggggccttggtattctggatttagaacgttttgcaagagcgctatgactaagatggttgtggttgcgatggaaggtcaaagaaatagcccactggcatgcaattactatgtgacaagattgatgtggatctcttcaatacatccataattgtgaacattggcaatgggaagatggcaaatttctgggatcaagttggattgaaggacaggctctgaggaatattacaccaagtctatacaagaaagcaaggaggaagaacattacggtgttcaaagcacttcgaaacaattaccggatacagttttgttctcgttacaagcaggaggaggaagtgagagaattcgtctccatgtggcatgcaattagcaacacacaagacctaaatgatctagaagacaccatatcttagcgacggacgacaattgggcaatacaacacaagtagtgcctacaaaattcagttcacaacgaacttctgtagatttaaaatcagtcccatttggaaagcaagaacggaaccaaaatgtggtttttcgcatggacgttgttgcacaacagaattgtaattacagacaaccttcaaaaaaggggatgacctttgatgaggacatcacttctatacatacaatgaatggaccgataacacgatctcgtgcacgatagctaaatctc

SEQ ID NO: 211160 - DNA, 3374 bp, Zea Mays
cccctttttcggccagaggaagaacacagtaaatgctcgctgtgcagtgagactgcggaagaggatacaacatgaagagatgaaatctgcctaccaacgaaggctcctctctgatgcagaatcagcacgctggttaaaccatgcaatcgacaagatgtggcctgtctgtatggagaagatcgtttcaaaacttctacggcccatcataccatggttcttggataagttcaaaccttggacagtcagcaaagcaagtattcaggaactttacatgggcaggaatccaccaatctttacctccatgagagttctaccagagacatcagatgatgaccatttggttcttgagctgggattgaattttctttctgctgaagatatgagtgctgtacttgctatgcagctgcacaagagtgtgggacttggaatgactgcaaagatgcatttaacaagcatgcatgtcgagggaaagatattagttggtgtgaaatttgttcggagttggccatttcttggccgtgtaagactatgttttgtggagccaccttattttcagatggctgtgaaaccactcattaatcacgggctcgatgtcactgagtttccaggaatttcaggatggctggataagttgatggatactgcatttgggcagacattagttgagcccaatgtgatagtaataaatgtggaaaaatttgcatctactccttcagaaaataactggttcagcattgaggagagacctcctattgcatatgtgaagcttgagattctagaaggaactgacatgaagccatctgatataaatggactagcggacccatatgtgaaaggtcaccttggtcctttcaaattccaaacacagatacagaggaaaacattgtcccctaagtggtttgaagaatttaaaataccaatcacatcatgggaggcaacgaatgaacttgtcatggaagttcgtgataaggaccccatgtttgatgactcacttgggcaatgtaccattagtttacatgatctgagaggtggacaaagacatgacaaatggatatcactgaataatgtgaagaaaggaaggattcacttggcagtaacaattgatgatatatccgaggaccaaaatacatcaagtttggaccaatcattgaagcaagcggatactgaactaccagtatcaacatctgtttgtagcgaagtggatgctagtgaacctcctgaagaaaagaaagtcttaatggatgaagtggagcacataaacattgatggacaagaacagcctggaggtttatatgtacatcgccctggcactggggttccaaggacatgggaatcccggaaaggacgagcacgaaacccagacacacagattcaccaagaggttgacaagcaaaaggaagtcccaacaccaaaagggagtgggcaagggggtctatttaacgtaggctcctttttccggtggaactcgaggaaggggagctccagaaatctcgatgccagccctcctgcaactccgggttctcagagcgtgacagagcttgatccaaagctccctcaaactccacgtcccaacctgaaggagctaggcgagaagcggacgtcgataaagatcgtagtggacgaagaagcaagcccggcagacaaggtgggaggtgcggagaactcaggagaagatgtggcgaaggtgatagagaaaaatgcaggtgaaccgggcaggtcactgacaagcacattgagcaggaagatttgcagaaggagagcagatgataggctatcagatatccccgagaagattgaagctcgtggatctaagccggtgagtgaagggcctattcttgttagaggtgagccaatgataacagtggaccatccgacgacggaacatagcgatggaggtggcactgagcaagatgcggtgggagcaaaggttgctactcagacctcataaggattgcgacttaaggtcagcagttcttgttcttgtaatctttgctggtcgatttggttcgggcatgggaccttgctttctgtttatagatcagtgtccatagttgcgaagggtatccatttagaaatggctgaaaaatatagtaacaaagagcagcgtgttgtgcagtgatatacgctcatgttgataagatggctctgttagatcttgtttacttatgtaaagaaacatgaattgcatatatttcttgacataaataatgtaaaacgtatttttttggttgcattctttcctctacgcatatgatattttgcccggttttatcatgtaataatttcccaagattttcagctcaggcaacagaagaaatgcaaagcccggcccagtaaaccatcatcgtctttcacggcccatcaaagaggcatccgcgttcgcacattgcagtagcttcccacacccccctccagagccggcacgttctctagactatatttcctatcttattcattttcttctatgggataatactcttgttaatatgagttatacataagcttgtcgctgcacaataatgtaatttatagggtcttattgctgaagtatccatcatcagtacatttatggatgtagtttttagctctgatctatatatcggttgataagataagaagttttctttgaaaaggaaataatccagaataatgtggcggggtcactgttcaattggtctacaacttgtttgccaaagaattggggggccttggtattctggatttagaacgttttgcaagagcgctatgactaagatggttgtggttgcgatggaaggtcaaagaaatagcccactggcatgcaattactatgtgacaagattgatgtggatctcttcaatacatccataattgtgaacattggcaatgggaagatggcaaatttctgggatcaagttggattgaaggacaggctctgaggaatattacaccaagtctatacaagaaagcaaggaggaagaacattacggtgttcaaagcacttcgaaacaattaccggatacagttttgttctcgttacaagcaggaggaggaagtgagagaattcgtctccatgtggcatgcaattagcaacacacaagacctaaatgatctagaagacaccatatcttagcgacggacgacaattgggcaatacaacacaagtagtgcctacaaaattcagttcacaacgaacttctgtagatttaaaatcagtcccatttggaaagcaagaacggaaccaaaatgtggtttttcgcatggacgttgttgcacaacagaattgtaattacagacaaccttcaaaaaaggggatgacctttgatgaggacatcacttctatacatacaatgaatggaccgataacacgatctcgtgcacgatagctaaatctc

SEQ ID NO: 211161 - DNA, 3360 bp, Zea Mays
aggcccacatggcagcctctgcactgcaggatctcatcccctccggctgcccgtgcccagccgtcgtggcgcgacggcggcggtcggtctggtagggctcccctcctttccaccagatcagaacagatagtcatagatcagtgtcacaccacgacccgccagccggaccgccacttgccaaccaacgcctttccctcctcctccgcctccgggcgctagcgggaatggacgccgccgagctgcccctcgtctaccacatcggtctggtgctggccgcgctctgggccgccgccgccgtcggcttccgcggctccctcctctacctcctcgccttcctctacctctacatggtaaatgctcgctgtgcagtgagactgcggaagaggatacaacatgaagagatgaaatctgcctaccaacgaaggctcctctctgatgcagaatcagcacgctggttaaaccatgcaatcgacaagatgtggcctgtctgtatggagaagatcgtttcaaaacttctacggcccatcataccatggttcttggataagttcaaaccttggacagtcagcaaagcaagtattcaggaactttacatgggcaggaatccaccaatctttacctccatgagagttctaccagagacatcagatgatgaccatttggttcttgagctgggattgaattttctttctgctgaagatatgagtgctgtacttgctatgcagctgcacaagagtgtgggacttggaatgactgcaaagatgcatttaacaagcatgcatgtcgagggaaagatattagttggtgtgaaatttgttcggagttggccatttcttggccgtgtaagactatgttttgtggagccaccttattttcagatggctgtgaaaccactcattaatcacgggctcgatgtcactgagtttccaggaatttcaggatggctggataagttgatggatactgcatttgggcagacattagttgagcccaatgtgatagtaataaatgtggaaaaatttgcatctactccttcagaaaataactggttcagcattgaggagagacctcctattgcatatgtgaagcttgagattctagaaggaactgacatgaagccatctgatataaatggactagcggacccatatgtgaaaggtcaccttggtcctttcaaattccaaacacagatacagaggaaaacattgtcccctaagtggtttgaagaatttaaaataccaatcacatcatgggaggcaacgaatgaacttgtcatggaagttcgtgataaggaccccatgtttgatgactcacttgggcaatgtaccattagtttacatgatctgagaggtggacaaagacatgacaaatggatatcactgaataatgtgaagaaaggaaggattcacttggcagtaacaattgatgatatatccgaggaccaaaatacatcaagtttggaccaatcattgaagcaagcggatactgaactaccagtatcaacatctgtttgtagcgaagtggatgctagtgaacctcctgaagaaaagaaagtcttaatggatgaagtggagcacataaacattgatggacaagaacagcctggaggtttatatgtacatcgccctggcactggggttccaaggacatgggaatcccggaaaggacgagcacgaaacccagacacacagattcaccaagaggttgacaagcaaaaggaagtcccaacaccaaaagggagtgggcaagggggtctatttaacgtaggctcctttttccggtggaactcgaggaaggggagctccagaaatctcgatgccagccctcctgcaactccgggttctcagagcgtgacagagcttgatccaaagctccctcaaactccacgtcccaacctgaaggagctaggcgagaagcggacgtcgataaagatcgtagtggacgaagaagcaagcccggcagacaaggtgggaggtgcggagaactcaggagaagatgtggcgaaggtgatagagaaaaatgcaggtgaaccgggcaggtcactgacaagcacattgagcaggaagatttgcagaaggagagcagatgataggctatcagatatccccgagaagattgaagctcgtggatctaagccggtgagtgaagggcctattcttgttagaggtgagccaatgataacagtggaccatccgacgacggaacatagcgatggaggtggcactgagcaagatgcggtgggagcaaaggttgctactcagacctcataaggattgcgacttaagctcaggcaacagaagaaatgcaaagcccggcccagtaaaccatcatcgtctttcacggcccatcaaagaggcatccgcgttcgcacattgcagtagcttcccacacccccctccagagccggcacgttctctagactatatttcctatcttattcattttcttctatgggataatactcttgttaatatgagttatacataagcttgtcgctgcacaataatgtaatttatagggtcttattgctgaagtatccatcatcagtacatttatggatgtagtttttagctctgatctatatatcggttgataagataagaagttttctttgaaaaggaaataatccagaataatgtggcggggtcactgttcaattggtctacaacttgtttgccaaagaattggggggccttggtattctggatttagaacgttttgcaagagcgctatgactaagatggttgtggttgcgatggaaggtcaaagaaatagcccactggcatgcaattactatgtgacaagattgatgtggatctcttcaatacatccataattgtgaacattggcaatgggaagatggcaaatttctgggatcaagttggattgaaggacaggctctgaggaatattacaccaagtctatacaagaaagcaaggaggaagaacattacggtgttcaaagcacttcgaaacaattaccggatacagttttgttctcgttacaagcaggaggaggaagtgagagaattcgtctccatgtggcatgcaattagcaacacacaagacctaaatgatctagaagacaccatatcttagcgacggacgacaattgggcaatacaacacaagtagtgcctacaaaattcagttcacaacgaacttctgtagatttaaaatcagtcccatttggaaagcaagaacggaaccaaaatgtggtttttcgcatggacgttgttgcacaacagaattgtaattacagacaaccttcaaaaaaggggatgacctttgatgaggacatcacttctatacatacaatgaatggaccgataacacgatctcgtgcacgatagctaaatctc

SEQ ID NO: 211162 - DNA, 3156 bp, Zea Mays
aggcccacatggcagcctctgcactgcaggatctcatcccctccggctgcccgtgcccagccgtcgtggcgcgacggcggcggtcggtctggtagggctcccctcctttccaccagatcagaacagatagtcatagatcagtgtcacaccacgacccgccagccggaccgccacttgccaaccaacgcctttccctcctcctccgcctccgggcgctagcgggaatggacgccgccgagctgcccctcgtctaccacatcggtctggtgctggccgcgctctgggccgccgccgccgtcggcttccgcggctccctcctctacctcctcgccttcctctacctctacatggtaaatgctcgctgtgcagtgagactgcggaagaggatacaacatgaagagatgaaatctgcctaccaacgaaggagcaaagcaagtattcaggaactttacatgggcaggaatccaccaatctttacctccatgagagttctaccagagacatcagatgatgaccatttgctgcacaagagtgtgggacttggaatgactgcaaagatgcatttaacaagcatgcatgtcgagggaaagatattagttggtgtgaaatttgttcggagttggccatttcttggccgtgtaagactatgttttgtggagccaccttattttcagatggctgtgaaaccactcattaatcacgggctcgatgtcactgagtttccaggaatttcaggatggctggataagttgatggatactgcatttgggcagacattagttgagcccaatgtgatagtaataaatgtggaaaaatttgcatctactccttcagaaaataactggttcagcattgaggagagacctcctattgcatatgtgaagcttgagattctagaaggaactgacatgaagccatctgatataaatggactagcggacccatatgtgaaaggtcaccttggtcctttcaaattccaaacacagatacagaggaaaacattgtcccctaagtggtttgaagaatttaaaataccaatcacatcatgggaggcaacgaatgaacttgtcatggaagttcgtgataaggaccccatgtttgatgactcacttgggcaatgtaccattagtttacatgatctgagaggtggacaaagacatgacaaatggatatcactgaataatgtgaagaaaggaaggattcacttggcagtaacaattgatgatatatccgaggaccaaaatacatcaagtttggaccaatcattgaagcaagcggatactgaactaccagtatcaacatctgtttgtagcgaagtggatgctagtgaacctcctgaagaaaagaaagtcttaatggatgaagtggagcacataaacattgatggacaagaacagcctggaggtttatatgtacatcgccctggcactggggttccaaggacatgggaatcccggaaaggacgagcacgaaacccagacacacagattcaccaagaggttgacaagcaaaaggaagtcccaacaccaaaagggagtgggcaagggggtctatttaacgtaggctcctttttccggtggaactcgaggaaggggagctccagaaatctcgatgccagccctcctgcaactccgggttctcagagcgtgacagagcttgatccaaagctccctcaaactccacgtcccaacctgaaggagctaggcgagaagcggacgtcgataaagatcgtagtggacgaagaagcaagcccggcagacaaggtgggaggtgcggagaactcaggagaagatgtggcgaaggtgatagagaaaaatgcaggtgaaccgggcaggtcactgacaagcacattgagcaggaagatttgcagaaggagagcagatgataggctatcagatatccccgagaagattgaagctcgtggatctaagccggtgagtgaagggcctattcttgttagaggtgagccaatgataacagtggaccatccgacgacggaacatagcgatggaggtggcactgagcaagatgcggtgggagcaaaggttgctactcagacctcataaggattgcgacttaagctcaggcaacagaagaaatgcaaagcccggcccagtaaaccatcatcgtctttcacggcccatcaaagaggcatccgcgttcgcacattgcagtagcttcccacacccccctccagagccggcacgttctctagactatatttcctatcttattcattttcttctatgggataatactcttgttaatatgagttatacataagcttgtcgctgcacaataatgtaatttatagggtcttattgctgaagtatccatcatcagtacatttatggatgtagtttttagctctgatctatatatcggttgataagataagaagttttctttgaaaaggaaataatccagaataatgtggcggggtcactgttcaattggtctacaacttgtttgccaaagaattggggggccttggtattctggatttagaacgttttgcaagagcgctatgactaagatggttgtggttgcgatggaaggtcaaagaaatagcccactggcatgcaattactatgtgacaagattgatgtggatctcttcaatacatccataattgtgaacattggcaatgggaagatggcaaatttctgggatcaagttggattgaaggacaggctctgaggaatattacaccaagtctatacaagaaagcaaggaggaagaacattacggtgttcaaagcacttcgaaacaattaccggatacagttttgttctcgttacaagcaggaggaggaagtgagagaattcgtctccatgtggcatgcaattagcaacacacaagacctaaatgatctagaagacaccatatcttagcgacggacgacaattgggcaatacaacacaagtagtgcctacaaaattcagttcacaacgaacttctgtagatttaaaatcagtcccatttggaaagcaagaacggaaccaaaatgtggtttttcgcatggacgttgttgcacaacagaattgtaattacagacaaccttcaaaaaaggggatgacctttgatgaggacatcacttctatacatacaatgaatggaccgataacacgatctcgtgcacgatagctaaatctc

SEQ ID NO: 211163 - DNA, 3087 bp, Zea Mays
aggcccacatggcagcctctgcactgcaggatctcatcccctccggctgcccgtgcccagccgtcgtggcgcgacggcggcggtcggtctggtagggctcccctcctttccaccagatcagaacagatagtcatagatcagtgtcacaccacgacccgccagccggaccgccacttgccaaccaacgcctttccctcctcctccgcctccgggcgctagcgggaatggacgccgccgagctgcccctcgtctaccacatcggtctggtgctggccgcgctctgggccgccgccgccgtcggcttccgcggctccctcctctacctcctcgccttcctctacctctacatggtaaatgctcgctgtgcagtgagactgcggaagaggatacaacatgaagagatgaaatctgcctaccaacgaaggagcaaagcaagtattcaggaactttacatgggcaggaatccaccaatctttacctccatgagagttctaccagagacatcagatgatgaccatttgatattagttggtgtgaaatttgttcggagttggccatttcttggccgtgtaagactatgttttgtggagccaccttattttcagatggctgtgaaaccactcattaatcacgggctcgatgtcactgagtttccaggaatttcaggatggctggataagttgatggatactgcatttgggcagacattagttgagcccaatgtgatagtaataaatgtggaaaaatttgcatctactccttcagaaaataactggttcagcattgaggagagacctcctattgcatatgtgaagcttgagattctagaaggaactgacatgaagccatctgatataaatggactagcggacccatatgtgaaaggtcaccttggtcctttcaaattccaaacacagatacagaggaaaacattgtcccctaagtggtttgaagaatttaaaataccaatcacatcatgggaggcaacgaatgaacttgtcatggaagttcgtgataaggaccccatgtttgatgactcacttgggcaatgtaccattagtttacatgatctgagaggtggacaaagacatgacaaatggatatcactgaataatgtgaagaaaggaaggattcacttggcagtaacaattgatgatatatccgaggaccaaaatacatcaagtttggaccaatcattgaagcaagcggatactgaactaccagtatcaacatctgtttgtagcgaagtggatgctagtgaacctcctgaagaaaagaaagtcttaatggatgaagtggagcacataaacattgatggacaagaacagcctggaggtttatatgtacatcgccctggcactggggttccaaggacatgggaatcccggaaaggacgagcacgaaacccagacacacagattcaccaagaggttgacaagcaaaaggaagtcccaacaccaaaagggagtgggcaagggggtctatttaacgtaggctcctttttccggtggaactcgaggaaggggagctccagaaatctcgatgccagccctcctgcaactccgggttctcagagcgtgacagagcttgatccaaagctccctcaaactccacgtcccaacctgaaggagctaggcgagaagcggacgtcgataaagatcgtagtggacgaagaagcaagcccggcagacaaggtgggaggtgcggagaactcaggagaagatgtggcgaaggtgatagagaaaaatgcaggtgaaccgggcaggtcactgacaagcacattgagcaggaagatttgcagaaggagagcagatgataggctatcagatatccccgagaagattgaagctcgtggatctaagccggtgagtgaagggcctattcttgttagaggtgagccaatgataacagtggaccatccgacgacggaacatagcgatggaggtggcactgagcaagatgcggtgggagcaaaggttgctactcagacctcataaggattgcgacttaagctcaggcaacagaagaaatgcaaagcccggcccagtaaaccatcatcgtctttcacggcccatcaaagaggcatccgcgttcgcacattgcagtagcttcccacacccccctccagagccggcacgttctctagactatatttcctatcttattcattttcttctatgggataatactcttgttaatatgagttatacataagcttgtcgctgcacaataatgtaatttatagggtcttattgctgaagtatccatcatcagtacatttatggatgtagtttttagctctgatctatatatcggttgataagataagaagttttctttgaaaaggaaataatccagaataatgtggcggggtcactgttcaattggtctacaacttgtttgccaaagaattggggggccttggtattctggatttagaacgttttgcaagagcgctatgactaagatggttgtggttgcgatggaaggtcaaagaaatagcccactggcatgcaattactatgtgacaagattgatgtggatctcttcaatacatccataattgtgaacattggcaatgggaagatggcaaatttctgggatcaagttggattgaaggacaggctctgaggaatattacaccaagtctatacaagaaagcaaggaggaagaacattacggtgttcaaagcacttcgaaacaattaccggatacagttttgttctcgttacaagcaggaggaggaagtgagagaattcgtctccatgtggcatgcaattagcaacacacaagacctaaatgatctagaagacaccatatcttagcgacggacgacaattgggcaatacaacacaagtagtgcctacaaaattcagttcacaacgaacttctgtagatttaaaatcagtcccatttggaaagcaagaacggaaccaaaatgtggtttttcgcatggacgttgttgcacaacagaattgtaattacagacaaccttcaaaaaaggggatgacctttgatgaggacatcacttctatacatacaatgaatggaccgataacacgatctcgtgcacgatagctaaatctc

SEQ ID NO: 211164 - DNA, 3219 bp, Zea Mays
aggcccacatggcagcctctgcactgcaggatctcatcccctccggctgcccgtgcccagccgtcgtggcgcgacggcggcggtcggtctggtagggctcccctcctttccaccagatcagaacagatagtcatagatcagtgtcacaccacgacccgccagccggaccgccacttgccaaccaacgcctttccctcctcctccgcctccgggcgctagcgggaatggacgccgccgagctgcccctcgtctaccacatcggtctggtgctggccgcgctctgggccgccgccgccgtcggcttccgcggctccctcctctacctcctcgccttcctctacctctacatggtaaatgctcgctgtgcagtgagactgcggaagaggatacaacatgaagagatgaaatctgcctaccaacgaaggagcaaagcaagtattcaggaactttacatgggcaggaatccaccaatctttacctccatgagagttctaccagagacatcagatgatgaccatttggttcttgagctgggattgaattttctttctgctgaagatatgagtgctgtacttgctatgcagctgcacaagagtgtgggacttggaatgactgcaaagatgcatttaacaagcatgcatgtcgagggaaagatattagttggtgtgaaatttgttcggagttggccatttcttggccgtgtaagactatgttttgtggagccaccttattttcagatggctgtgaaaccactcattaatcacgggctcgatgtcactgagtttccaggaatttcaggatggctggataagttgatggatactgcatttgggcagacattagttgagcccaatgtgatagtaataaatgtggaaaaatttgcatctactccttcagaaaataactggttcagcattgaggagagacctcctattgcatatgtgaagcttgagattctagaaggaactgacatgaagccatctgatataaatggactagcggacccatatgtgaaaggtcaccttggtcctttcaaattccaaacacagatacagaggaaaacattgtcccctaagtggtttgaagaatttaaaataccaatcacatcatgggaggcaacgaatgaacttgtcatggaagttcgtgataaggaccccatgtttgatgactcacttgggcaatgtaccattagtttacatgatctgagaggtggacaaagacatgacaaatggatatcactgaataatgtgaagaaaggaaggattcacttggcagtaacaattgatgatatatccgaggaccaaaatacatcaagtttggaccaatcattgaagcaagcggatactgaactaccagtatcaacatctgtttgtagcgaagtggatgctagtgaacctcctgaagaaaagaaagtcttaatggatgaagtggagcacataaacattgatggacaagaacagcctggaggtttatatgtacatcgccctggcactggggttccaaggacatgggaatcccggaaaggacgagcacgaaacccagacacacagattcaccaagaggttgacaagcaaaaggaagtcccaacaccaaaagggagtgggcaagggggtctatttaacgtaggctcctttttccggtggaactcgaggaaggggagctccagaaatctcgatgccagccctcctgcaactccgggttctcagagcgtgacagagcttgatccaaagctccctcaaactccacgtcccaacctgaaggagctaggcgagaagcggacgtcgataaagatcgtagtggacgaagaagcaagcccggcagacaaggtgggaggtgcggagaactcaggagaagatgtggcgaaggtgatagagaaaaatgcaggtgaaccgggcaggtcactgacaagcacattgagcaggaagatttgcagaaggagagcagatgataggctatcagatatccccgagaagattgaagctcgtggatctaagccggtgagtgaagggcctattcttgttagaggtgagccaatgataacagtggaccatccgacgacggaacatagcgatggaggtggcactgagcaagatgcggtgggagcaaaggttgctactcagacctcataaggattgcgacttaagctcaggcaacagaagaaatgcaaagcccggcccagtaaaccatcatcgtctttcacggcccatcaaagaggcatccgcgttcgcacattgcagtagcttcccacacccccctccagagccggcacgttctctagactatatttcctatcttattcattttcttctatgggataatactcttgttaatatgagttatacataagcttgtcgctgcacaataatgtaatttatagggtcttattgctgaagtatccatcatcagtacatttatggatgtagtttttagctctgatctatatatcggttgataagataagaagttttctttgaaaaggaaataatccagaataatgtggcggggtcactgttcaattggtctacaacttgtttgccaaagaattggggggccttggtattctggatttagaacgttttgcaagagcgctatgactaagatggttgtggttgcgatggaaggtcaaagaaatagcccactggcatgcaattactatgtgacaagattgatgtggatctcttcaatacatccataattgtgaacattggcaatgggaagatggcaaatttctgggatcaagttggattgaaggacaggctctgaggaatattacaccaagtctatacaagaaagcaaggaggaagaacattacggtgttcaaagcacttcgaaacaattaccggatacagttttgttctcgttacaagcaggaggaggaagtgagagaattcgtctccatgtggcatgcaattagcaacacacaagacctaaatgatctagaagacaccatatcttagcgacggacgacaattgggcaatacaacacaagtagtgcctacaaaattcagttcacaacgaacttctgtagatttaaaatcagtcccatttggaaagcaagaacggaaccaaaatgtggtttttcgcatggacgttgttgcacaacagaattgtaattacagacaaccttcaaaaaaggggatgacctttgatgaggacatcacttctatacatacaatgaatggaccgataacacgatctcgtgcacgatagctaaatctc

SEQ ID NO: 211165 - DNA, 1196 bp, Zea Mays
cagatgttggccgaagcaggacgccacgaggcgaacaaccaactgcttccttccccgccggccgccgccgcctacaactaacacttcacgtgcccccatccttttccgcctcaagtcaagtgttcacggtccatcctctcgagagtctaggcccttctcccgaagccgcagacgcagaaaacggctctgcatatggaggcgaagaagaagccgtcggcccccgccgccgtcggagccgcgccgccgccgccgggtaacgggtacttcagcaccgtcttctccgcgccgactgcgtgagctggtgcgatttgatgaaagagtccgttactatgttgcgatttgtggagggacttcaacggtttcccaatttaattctgatgaggggtgattttgataatagaggacctataggattatgcaaaatctatttggatatgacgttgacattttgactttgttttgcattcaagggaagcgcaagtgacgcaaagcatgcggacttgtacacgatgctgaacaagcagagctccagagggcagaatggcagagatggcaaatcccacagccgccctacttacaaggatggcaaacatgctcatccaaatgagccatcagaatctccttactttggctcatccgtgcattacggtggtcgggagttctacagcagcgttttacggaagcaaccagccaatgaaccccatacggattacaagggggacaacccggatggctctgctaccagaggtgattggtggcaaggttcactttattactgaataatctgctgggacctctcccttttgtgaacaaggaataaaaggggtagagctgagaatggtttgttgtagtgttggaagtgttgacgcgagccgtcaagcatcgatcaatagtaatagttgtaatagttgaaagctgcgtcgtgactacaagcatcctgttggtggaggcagtattttagatccatcatcacgcctggacagatgtgggtgtccttttgtattcctgtttccctggtttaggtgcaggtgctgtactaaaatgatgaaactcgcagttcgataaaagcagttgccaaagagtcgcagctggcaggattacttgtctacaagccagctatatggcatggtttggcagccaccgtatctgaataaaatcatagtacaaaatctctgaatatatatgtcatacgcata

SEQ ID NO: 211166 - DNA, 3133 bp, Zea Mays
cctcgaaccggtccagattactctgaccggaccgacctttcttcgtcttccccgttcggtatttccgccctcggcgccgggaaaccctagcccgcgtccatggacgatccctcctccgcctccaacaagcgcaagcgcgggcgcaagcccaaggtgtcgccgccctcccccgaccgctcatccccctctgcggtggccgcccccgctcccgttccggttgcgcgccgtggccgcaagccgcgacgtcatgaggaccccgccgacgcggacgccgcgcgtccgccgtccccgctccgccgcagggtgcttaatacggtggcaaatggaggcgatgcggtggcggaggcaggccccgcgagctgggacgaggtggtgagggtggtgccgtgcatggacgccgtggtcaaggtgttctgcgtgcacacggagcccaacttctcgctgccgtggcagcggaagcggcagtacagctctagcagtagcgggtttatcatcagcggccgccgtgtcctcaccaatgcccactccgtggagcactatacccaggttaagcttaagaagcgcggctctgacaccaagtaccttgccaccgtcctggccatcggcacagagtgcgatattgcgctcttaactgtcaatgacgatgaattctgggaaggagtttcacctgtcgagttcggaacattaccggcccttcaggacgcagttactgttgttggttatccaattggaggagatactatatccgtgacaagtggagttgtctctaggatagaaatactttcatacgttcatggttctacagaacttctaggattgcagatagatgcagctattaattcaggaaattcaggtggtccagcttttaatgatagaggcaaatgtgtcggtatagcatttcaatctcttaaacatgaagatgccgagaatataggctatgtgataccgactccagttattacacatttcatcgaggactacaaaaattctggaggatacacagggtttcctatactaggagttgaatggcagaaaatggagaatcctgatctccgtaaagcaatgggaatgaaaccagatcaaaagggtgttcgtgttaggagggtggagcccacggctccagaatctggatgcctacaaccgtctgatattattcttagctttgatggtgttgacattgctaatgatggaacagccagacaagctgtcccggttccctacacattgatcctcgatgtcaggatgctgagtggtgggggaggaggtgggaatggcagcagcggcggcgggggagaaggcatggacggcgggcagcgtggagatggcagatgcgatcgcgcgtcgtgcagcagcggagatgacagacatggtcgcatggcagaggaaagatggcagacctggtcgcacggcagcagagggacagcagatgtggtcgcgtggcagcggagatgtcgggcgcagccaggaggaggcagacgtcagcagaaacgaagggtggaggctgatggcgacaatgacagaagggaggaagagagaaagcagagttgggactcgtgtgtgcatctgggagatggtggagggataaggtggggacctcctccaactttggtgtatgaccctaaaacactggttgtggccaactacatgaaggaacatggctacttgttcctccacactgctgtggatactatctctaagcaggtgcttgtatcagatatcaatataggttatgaagaaatagttaatactcaggttcttgctttcaatggccagcctgtaaaaaatttaaagaacttagcgaccatggtggaaaattgcaaggatgaatttttgaagtttgatctggagtatgaccagattgttgtcctcgagacgaaaactgcaaagtctgctacccaggacattctgacgacgcactgtataccgtctgcaatgtcggatgaccttaaggcctagacgcctagtagtgagaggtgggagcatgatgcagccctgggccatcaggtgggccaacagcttgggccacattttcggttgaattgattagcgcagcatactacctggtccgggagcaaaagaaaccccaatgtttctgtgttacatgaattaaatgttttttgaggggtttatcaaagagcagactgtctaagcttccccattatagaaggtttgagggagtaccactgtcagataacgataaactggagatgttacagcagaggtgtgaaagcgatagtagctagtaagaatccgatttttttctattcacatgattacattacaactactacatcaaattattaacggtaaaggaatcattggtaaaatatttgcatcttgtttctggacaaataagatcgcaaatatttaagggttgtgtaccaaagttatcccctcatcgcttggttgtcctcatcatgccgtaggtgttctctcgattagtatggaagagtgtagctggcttccagctcaagcgatgagggaatttggattctggccttagaccatggcaccttccactcctgctttggaagcgtctgtatccgttagcgctgagaggcacaccttgccttcactcctctttgcttccctctcgcgatatgcttgcaggttggtagtggtagctcgtccggttccaatgtcttttatttcgttcaacaactatctagatgtacaagtgccattgaccttggcgacttcgcttccgcatggtttgtttttgtcgtccgttgtgcaagattactactcgagtactaaacttgatagaatagaatcaatcgagtctctggtctctattttatgtcacacaacaatacatgtcattggtatttataaaggtcgtcgtcttcatcatttcattattttctagtgtaaaatagcactaaactgtttgcttacaagtatttttgaagctcttctcaacgaaaggaggtgtttataccatgtccttggagttttcttgaactcacacaacacattgaataacctataaacatgatcaagacatttaaggttactcaatatagattagttcatttataaagttatttaaaaagtacttctaatgtttatgttaagtctcttatttttgtctttaagcatcttattgtcaagagctatagcatgatcaccg

SEQ ID NO: 211167 - DNA, 2951 bp, Zea Mays
cgaaccggtccagattactctgaccggaccgacctttcttcgtcttccccgttcggtatttccgccctcggcgccgggaaaccctagcccgcgtccatggacgatccctcctccgcctccaacaagcgcaagcgcgggcgcaagcccaaggtgtcgccgccctcccccgaccgctcatccccctctgcggtggccgcccccgctcccgttccggttgcgcgccgtggccgcaagccgcgacgtcatgaggaccccgccgacgcggacgccgcgcgtccgccgtccccgctccgccgcagggtgcttaatacggtggcaaatggaggcgatgcggtggcggaggcaggccccgcgagctgggacgaggtggtgagggtggtgccgtgcatggacgccgtggtcaaggtgttctgcgtgcacacggagcccaacttctcgctgccgtggcagcggaagcggcagtacagctctagcagtagcgggtttatcatcagcggccgccgtgtcctcaccaatgcccactccgtggagcactatacccaggttaagcttaagaagcgcggctctgacaccaagtaccttgccaccgtcctggccatcggcacagagtgcgatattgcgctcttaactgtcaatgacgatgaattctgggaaggagtttcacctgtcgagttcggaacattaccggcccttcaggacgcagttactgttgttggttatccaattggaggagatactatatccgtgacaagtggagttgtctctaggatagaaatactttcatacgttcatggttctacagaacttctaggattgcagatagatgcagctattaattcaggaaattcaggtggtccagcttttaatgatagaggcaaatgtgtcggtatagcatttcaatctcttaaacatgaagatgccgagaatataggctatgtgataccgactccagttattacacatttcatcgaggactacaaaaattctggaggatacacaggcctgctgcagtggtgactggtgagagctgtctcactgagtcaccaggtcatgggttcaaagcagcctctctgtatttgtgggggaagacttgcttcggtttatccctttcctagacccgactcatgggagcttctgacactagggtttcctatactaggagttgaatggcagaaaatggagaatcctgatctccgtaaagcaatgggaatgaaaccagatcaaaagggtgttcgtgttaggagggtggagcccacggctccagaatctggatgcctacaaccgtctgatattattcttagctttgatggtgttgacattgctaatgatggaacagccagacaagctgtcccggttccctacacattgatcctcgatgtcaggatgctgagtggtgggggaggaggtgggaatggcagcagcggcggcgggggagaaggcatggacggcgggcagcgtggagatggcagatgcgatcgcgcgtcgtgcagcagcggagatgacagacatggtcgcatggcagaggaaagatggcagacctggtcgcacggcagcagagggacagcagatgtggtcgcgtggcagcggagatgtcgggcgcagccaggaggaggcagacgtcagcagaaacgaagggtggaggctgatggcgacaatgacagaagggaggaagagagaaagcagagttgggactcgtgtgtgcatctgggagatggtggagggataaggtggggacctcctccaactttggtgtatgaccctaaaacactggttgtggccaactacatgaaggaacatggctacttgttcctccacactgctgtggatactatctctaagcaggtgcttgtatcagatatcaatataggttatgaagaaatagttaatactcaggttcttgctttcaatggccagcctgtaaaaaatttaaagaacttagcgaccatggtggaaaattgcaaggatgaatttttgaagtttgatctggagtatgaccaggattacatacccacggtgttcgacaatttcagtgcaaatgtcgttgtggatggcaccacggtgaatttgggcctgtgggataccgcagggcaggaagattacaaccgactgaggcctctaagctaccgtggtgcagatgttttcgtgcttgcattctcacttgtgagtcgagctagctatgagaatatcatgaagaagtggataccggagcttcagcattatgcacgtggggtgcctgttgtgttggtaggcacaaaatttgatcttcgtgaagacaagcactacttgatggaccatcctgggttggtgcctgttaccacagcacaaggggaggaacttcgtagacaaattggtgctatgtattacatcgaatgcagttcgaagacacagcagaatgtcaaagctgtgttcgatgctgccatcaaggttgtaatccagcctccaactaaactaagagaaaagaagaaaaagaaatcacgcaagggatgttcgatggtgaacatcttatctggaagaaaaatgctatgcttcaagtcctgaatgatcgaagggggtcttacctgaactaataccatgagtgtgaccccaagttcgcgaagcttgaaatcttgatgcgctcgttgcgcatgtatatttgcacctttggttattaatcactagaggtagatgattgaaactaatctgcttaaccaatgtgcactgctgggcgctggcgtggttagctatatcagttaggcagttcgacagaggtcaaagagattgagattttgttctttcttggcaatgtcacagcttttgtgaatctggtctcatcatactgtccgctagtttatccaatgattccatggtggaatcaatccatagcaacattgtgttgaatgatcctttgcttttgcgctaagcatataacattccagttttggtgaaagctggaagtgaaactctcttctttc

SEQ ID NO: 211168 - DNA, 2147 bp, Zea Mays
tcttcttcgcgccccgctttcccttatagaggaccatctgaaccgttggatcgaagtataaataacgacggacacgcaagaccgatccctctatttgttcgcacgtctctcgtgtcacctcccccgtttgttaccccgagaaggcaagccgaggcggagccggaacgggaaggcgccgaagcgttcgcggtcgcggcttcgcgatttcggcaggaggatcgcctttgagagcttgcgctgggtggtggtggtggagcggcggcgaagatgacggcgccgcgcggtggcggagatgagccgccgccgtcttcggctgcggcggggcacgccgcggggaacgagccagtgacgccgacttccgcgctcgtgtcgggactcaaccgccgcgggtcgaggggtgcgggcatggccaccttctcgatggaggtcttcgacaacgaagtcgtcccatccacgctcaacagcatcgcgcccatcctgcgcgtcgcggccgagatcgagcacgagcgcccccgggtcgcgtacctatgtcggttctatgcatttgagaaggcacaccggctggatcagaactccatcggccgtggcgttaggcagttcaagacagctctgctccaacgtcttgaaaaggataatagccctagtcttgctaagcgcgtgaagaaaagcgatgctcgcgaaatcgagagtttttaccaacagtactacgagaactatgttcgtgcacttgacaaaggggaacaagctgacagggctcaacttgggaaggcctaccagactgccggagtcctctttgaggtactctgcgccgtcaataaaaatgagaaagtcgaggagctcaatcctgagattattcgcttgcacaaggatgtgcaagagaagaaagacatctacacaccattcaatatcctgccccttgatgctgccagtgcatcccagtccatcatgcagctggaggagatcaaagcagcagttgcagccctccgaaacattcgaggcttgaattggccttcaacatttgagccgcagaggcagaagggtggtgaccttgatttgttggattggttgagagctatgtttggctttcagcgagatagtgtgcggaatcaaagagagcatttgattctcctccttgctaatgtccacataaggcttgagccaaagcccgatccactgagcaagcttgatgaccgagctgtcgatgtggtgatgactaagctattcagcaattacaggaagtggtgcaaatttttgtcacggaagcatagtttaagatttccacaaggcgcacaaccacaagaaattcagcaacggaagattctatacctaggtctttatcttcttatatggggtgaagcagcaaacatcagatttatgccggagtgtctttgctacatcttccataatatggcatatgagctgcatggtttgctagctggaaatgttagtattgtgactggggagaatatcaggccatcttatggtggggatgaggaggcattcttgaagaaagtggttacacctttctatagagtcatcagaaaggaggcaggcaaatcacaacatgggaagacaccacattctgcgtggtctaactatgatgacctaaatgagtacttctggacatctgattgtttctcgcttgggtggcctatgcgggatgatggtgactttttcaaatccgtgcatgattcaaggcctgtaacaacggctggaagctcaccacaaaaggattccacgaaaagtacagggaagacaaatttcgttgagactagaacattttggcacatcttccgaagttttgaccgaatgtggactttctatattttggctctacaggcaatgctgatttttgcttggaatgattattcagtgaccgaaatccttcggaaagaccttttgtattatctatctagtgtattcgtcactgcagcatttctacagttcctccaaaatgaacttctcagttaatagatcctgaacaaataatggaagtcaaatgtggactaatgactcatattgctagaaggaatttgtttacatctgataatatctgttagccttaccacttgcaacttttcagttggccaattcatttttttaaatcgtttgtccaaccttctccagataccttctactaatccccc

SEQ ID NO: 211169 - DNA, 2122 bp, Zea Mays
cttatagaggaccatctgaaccgttggatcgaagtataaataacgacggacacgcaagaccgatccctctatttgttcgcacgtctctcgtgtcacctcccccgtttgttaccccgagaaggcaagccgaggcggagccggaacgggaaggcgccgaagcgttcgcggtcgcggcttcgcgatttcgggaggatcgcctttgagagcttgcgctgggtggtggtggtggagcggcggcgaagatgacggcgccgcgcggtggcggagatgagccgccgccgtcttcggctgcggcggggcacgccgcggggaacgagccagtgacgccgacttccgcgctcgtgtcgggactcaaccgccgcgggtcgaggggtgcgggcatggccaccttctcgatggaggtcttcgacaacgaagtcgtcccatccacgctcaacagcatcgcgcccatcctgcgcgtcgcggccgagatcgagcacgagcgcccccgggtcgcgtacctatgtcggttctatgcatttgagaaggcacaccggctggatcagaactccatcggccgtggcgttaggcagttcaagacagctctgctccaacgtcttgaaaaggataatagccctagtcttgctaagcgcgtgaagaaaagcgatgctcgcgaaatcgagagtttttaccaacagtactacgagaactatgttcgtgcacttgacaaaggggaacaagctgacagggctcaacttgggaaggcctaccagactgccggagtcctctttgaggtactctgcgccgtcaataaaaatgagaaagtcgaggagctcaatcctgagattattcgcttgcacaaggatgtgcaagagaagaaagacatctacacaccattcaatatcctgccccttgatgctgccagtgcatcccagtccatcatgcagctggaggagatcaaagcagcagttgcagccctccgaaacattcgaggcttgaattggccttcaacatttgagccgcagaggcagaagggtggtgaccttgatttgttggattggttgagagctatgtttggctttcagcgagatagtgtgcggaatcaaagagagcatttgattctcctccttgctaatgtccacataaggcttgagccaaagcccgatccactgagcaagcttgatgaccgagctgtcgatgtggtgatgactaagctattcagcaattacaggaagtggtgcaaatttttgtcacggaagcatagtttaagatttccacaaggcgcacaaccacaagaaattcagcaacggaagattctatacctaggtctttatcttcttatatggggtgaagcagcaaacatcagatttatgccggagtgtctttgctacatcttccataatatggcatatgagctgcatggtttgctagctggaaatgttagtattgtgactggggagaatatcaggccatcttatggtggggatgaggaggcattcttgaagaaagtggttacacctttctatagagtcatcagaaaggaggcaggcaaatcacaacatgggaagacaccacattctgcgtggtctaactatgatgacctaaatgagtacttctggacatctgattgtttctcgcttgggtggcctatgcgggatgatggtgactttttcaaatccgtgcatgattcaaggcctgtaacaacggctggaagctcaccacaaaaggattccacgaaaagtacagggaagacaaatttcgttgagactagaacattttggcacatcttccgaagttttgaccgaatgtggactttctatattttggctctacaggcaatgctgatttttgcttggaatgattattcagtgaccgaaatccttcggaaagaccttttgtattatctatctagtgtattcgtcactgcagcatttctacagttcctccaaaatgaacttctcagttaatagatcctgaacaaataatggaagtcaaatgtggactaatgactcatattgctagaaggaatttgtttacatctgataatatctgttagccttaccacttgcaacttttcagttggccaattcatttttttaaatcgtttgtccaaccttctccagataccttctactaatccccc

SEQ ID NO: 211170 - DNA, 1437 bp, Zea Mays
gaaaaggaaacagaaaaaaaaaatcacaggagaaaccgatttcccccttttttctttattttcttcgtcctcttcgtctcgactcgccgcccagtcacctcaaatcccttcgatccaatctccaaaccctaggcaatccaacatcaaagtattagctgcccccttcgtcaaaccgcggcggcgcggccatggcccacggcggcggcgccgggaaggcgaaggtgacgccgaacctggcggtggacggcgagggcacgcgcacgctcaaccgcactgtgctgcagcgcctcgacccggccgttgaggatattctcatcaccgcggctcacgtcacgctgtacgactttgacaccgatgtcaaccagtggagacggaaggacgtggaggggtcgctcttcgtcgtcaagaggaatgctcaacctagattccagttcattgtcatgaaccgcaggaatacagataatctagttgaagatctcttgggagattttgaataccaactccaagctccttatattatgtaccgaaatgctgctcaagaagttataggaatttggttttacaactctcaggagtgtcaagaagttgcaaatctttttagcaggattctgaatgctttctcgaaggtgccaccaaagccgaagattccccctgttcaaaggcagctgcaaatgctggtggcaactctgctgtagctgttgcaaggcaaccaattcaactttttggtgctactccggtggctacacatgcagctactagtatcactacaatacaatcgccaggcttgcattatttgcttccttcacaagcctcatcggtttctgggatgcctgctgatgctcatggttctataggaaggtccacaaaccttgtaaatccatcacttttctcaccattgacgtcttcacagacaacaatggtgtgcactaattctgtagtagcaattgctccacctcaacatcctcagactgctcagcagccgcaaagtgctcccttgcttcagccttttctattacctacggcttcaccatctccaccatatgggactccattacttcaaccatttccgccacctaatccatcgccatctcttgcgtctgcaccagtcttgagcccagcactgtctagagacaaagtccgagatgcattactgagacttgtggagaacgatgaattcatagatttagtctacggcgagatcatgaacagacagtaatggattttcaaggtacagtcctctccatcaggctagcttgtgcttggactctgtcattatctgttgtctaggctatttcaagttatcctgtaaattcattgatgaaatccttcggtttgtggagcttgtgctattaatgtacttttgacatttacaaaatctgtgctgtgttcgtggtgcagaaaagttttgttctgagtattatcttgaaacttttgttc

SEQ ID NO: 211171 - DNA, 1508 bp, Zea Mays
gaaaaggaaacagaaaaaaaaaatcacaggagaaaccgatttcccccttttttctttattttcttcgtcctcttcgtctcgactcgccgcccagtcacctcaaatcccttcgatccaatctccaaaccctaggcaatccaacatcaaagtattagctgcccccttcgtcaaaccgcggcggcgcggccatggcccacggcggcggcgccgggaaggcgaaggtgacgccgaacctggcggtggacggcgagggcacgcgcacgctcaaccgcactgtgctgcagcgcctcgacccggccgttgaggatattctcatcaccgcggctcacgtcacgctgtacgactttgacaccgatgtcaaccagtggagacggaaggacgtggaggggtcgctcttcgtcgtcaagagataatctagttgaagatctcttgggagattttgaataccaactccaagctccttatattatgtaccgaaatgctgctcaagaagttataggaatttggttttacaactctcaggagtgtcaagaagttgcaaatctttttagcaggattctgaatgctttctcgaaggtgccaccaaagccgaagattccccctgttcaaagtgaatttgaagaggtggaagcagcacctgtgttggttgatggccctctagaaccgcaaacgtcaaatatcatgtcaactactactcacattcaagaggatcctttatctgcatttttcagtgcagctgcaaatgctggtggcaactctgctgtagctgttgcaaggcaaccaattcaactttttggtgctactccggtggctacacatgcagctactagtatcactacaatacaatcgccaggcttgcattatttgcttccttcacaagcctcatcggtttctgggatgcctgctgatgctcatggttctataggaaggtccacaaaccttgtaaatccatcacttttctcaccattgacgtcttcacagacaacaatggtgtgcactaattctgtagtagcaattgctccacctcaacatcctcagactgctcagcagccgcaaagtgctcccttgcttcagccttttctattacctacggcttcaccatctccaccatatgggactccattacttcaaccatttccgccacctaatccatcgccatctcttgcgtctgcaccagtcttgagcccagcactgtctagagacaaagtccgagatgcattactgagacttgtggagaacgatgaattcatagatttagtctacggcgagatcatgaacagacagtaatggattttcaaggtacagtcctctccatcaggctagcttgtgcttggactctgtcattatctgttgtctaggctatttcaagttatcctgtaaattcattgatgaaatccttcggtttgtggagcttgtgctattaatgtacttttgacatttacaaaatctgtgctgtgttcgtggtgcagaaaagttttgttctgagtattatcttgaaacttttgttc

SEQ ID NO: 211172 - DNA, 1549 bp, Zea Mays
gaaaaggaaacagaaaaaaaaaatcacaggagaaaccgatttcccccttttttctttattttcttcgtcctcttcgtctcgactcgccgcccagtcacctcaaatcccttcgatccaatctccaaaccctaggcaatccaacatcaaagtattagctgcccccttcgtcaaaccgcggcggcgcggccatggcccacggcggcggcgccgggaaggcgaaggtgacgccgaacctggcggtggacggcgagggcacgcgcacgctcaaccgcactgtgctgcagcgcctcgacccggccgttgaggatattctcatcaccgcggctcacgtcacgctgtacgactttgacaccgatgtcaaccagtgggacgtggaggggtcgctcttcgtcgtcaagaggaatgctcaacctagattccagttcattgtcatgaaccgcaggaatacagataatctagttgaagatctcttgggagattttgaataccaactccaagctccttatattatgtaccgaaatgctgctcaagaagttataggaatttggttttacaactctcaggagtgtcaagaagttgcaaatctttttagcaggattctgaatgctttctcgaaggtgccaccaaagccgaagattccccctgttcaaagtgaatttgaagaggtggaagcagcacctgtgttggttgatggccctctagaaccgcaaacgtcaaatatcatgtcaactactactcacattcaagaggatcctttatctgcatttttcagtgcagctgcaaatgctggtggcaactctgctgtagctgttgcaaggcaaccaattcaactttttggtgctactccggtggctacacatgcagctactagtatcactacaatacaatcgccaggcttgcattatttgcttccttcacaagcctcatcggtttctgggatgcctgctgatgctcatggttctataggaaggtccacaaaccttgtaaatccatcacttttctcaccattgacgtcttcacagacaacaatggtgtgcactaattctgtagtagcaattgctccacctcaacatcctcagactgctcagcagccgcaaagtgctcccttgcttcagccttttctattacctacggcttcaccatctccaccatatgggactccattacttcaaccatttccgccacctaatccatcgccatctcttgcgtctgcaccagtcttgagcccagcactgtctagagacaaagtccgagatgcattactgagacttgtggagaacgatgaattcatagatttagtctacggcgagatcatgaacagacagtaatggattttcaaggtacagtcctctccatcaggctagcttgtgcttggactctgtcattatctgttgtctaggctatttcaagttatcctgtaaattcattgatgaaatccttcggtttgtggagcttgtgctattaatgtacttttgacatttacaaaatctgtgctgtgttcgtggtgcagaaaagttttgttctgagtattatcttgaaacttttgttc

SEQ ID NO: 211173 - DNA, 792 bp, Zea Mays
atggaccggtggaccggcgtcgtctacgtcccactctccagaggcggacccctcttccgcgtcgctgcctcgctcctcctctcgccagccaaaacgctcgccatacagaatcaagtcccggggttgtcggcgaaggattcggctggcaaccagcaccctccatcctaccatccaccggctaggactatcatccttggcttcagcaagggtggagtggtggtgaaccagctcgtgacggaactttctcggtggggggcatcaggatcaacgaaccaggcggcggcggccgacgttccacgaccagcagcagcaggtccaggtccaccaccccatccgacccagaacgaccttcttctcctgggggctcctactcggagcagcgacgacctgctgtcaagtatctccgagctccactacgtggacgccggcctcaaccgcgccggagcgtacgtggccgaccgcgcggtgatcgggaggatacgcgagcacgtcgtacgcgccggcgacaagagcctccgcttcgccctccacggtaccccgaggcagtggtgtgatccgagccgcccgtggatccgggaggagaaggacgcgatggtccaggtactcgcggacgaggcccggaggagcgaggggaggcttgtgctgtctgagaagctgtatttcgagggcagacctcgcagcctgctcatgcattttgaggtcttggaagcgatggatatataatgtaatgtaagctgatactcgataggtctgataagcgatggatatataatttgttgtcccctgctgatg

SEQ ID NO: 211174 - DNA, 843 bp, Zea Mays
gtgaattccggcgaagtttgaaacttgcgaccttagttacgcagatacgattttcagtgcaaaacatctttggtgcagctgcaaaaaaaccatcggattgttgcttagtttatcttccgggtgcctattgctgaaccgttctcctctcaaaagatacagaatcaagtcccggggttgtcggcgaaggattcggctggcaaccagcaccctccatcctaccatccaccggctaggactatcatccttggcttcagcaagggtggagtggtggtgaaccagctcgtgacggaactttctcggtggggggcatcaggatcaacgaaccaggcggcggcggccgacgttccacgaccagcagcagcaggtccaggtccaccaccccatccgacccagaacgaccttcttctcctgggggctcctactcggagcagcgacgacctgctgtcaagtatctccgagctccactacgtggacgccggcctcaaccgcgccggagcgtacgtggccgaccgcgcggtgatcgggaggatacgcgagcacgtcgtacgcgccggcgacaagagcctccgcttcgccctccacggtaccccgaggcagtggtgtgatccgagccgcccgtggatccgggaggagaaggacgcgatggtccaggtactcgcggacgaggcccggaggagcgaggggaggcttgtgctgtctgagaagctgtatttcgagggcagacctcgcagcctgctcatgcattttgaggtcttggaagcgatggatatataatgtaatgtaagctgatactcgataggtctgataagcgatggatatataatttgttgtcccctgctgatg

SEQ ID NO: 211175 - DNA, 1605 bp, Zea Mays
gatccatgcccccagcccagcttcccctactacctcaaggccggtatccccaattccccattccttctcctccctttgctcgcctggaggtggtctgcccccaccacctgtgcgcttcccgcttccctgtcccacctcacgctcccaggaggagacactccggaagatggtggggcggcggcttcgcgctccacagatgttgtcgggtccaagaagcagagtctccgcgctccatggaggtcgccttccgcgtggacaacagcgcgacgagatgctacaactacactcatgacagcttcaatagcatatctgcattttttcctcatcctcagaatcgtctctctcggtctgttcttccccctttcgtttatggcttacgaagtgctgaatttttagatccggatctctctctctctgatggtgatttttgagtgagaaagatcgatactatttggttagaatttctattaagtggtaatcatgaaattgaaatcaatctcaaaagttttactgttttaatcccgacatgttcgtactgtggtatgacctttcctttttattttgttttagaattatttacaagttatccattgagattgattttactgttttaatcccgacaatgtctatgaagtcgttgacatctggattatattctattagtgctgatttggatcaattcttgtttattaggagacttcaaatgttttctctcccctataaaaacactttgtttcatttgcttataattaactgctgcactgtccatggattgctctctcattctacttcctatgattttaggattttgacagcctgttgtcaacgaaggcgagcatggtgtactctaagctcagcaatttccagaaaaaaatcgttaacttgcaagttagtttcaatatttctagcatattccaatcacagcatcgtccagtccacacccatccaatttaggggcttcttgttgtgctctcaggccccagtcgaaaagcaaggtcctgtcatcacaaactcctagcaaatttaggatatgtcatgagaacaagacatgacaacattacaacctcagaggttagaggaatgtgtttggggtgagtaatttttttgtgttgtttcctctgtccatggccatggaggagcaaaggaggccacctagctcgaagatagcgccagtgtccatgaaggcgtcctccgcaaatgcgacgcttcaaggcatgaagaacagaagccattttcgaagggacatgaaaactgcactgcaacaagacgtggacaagctgaggaagaagttgtggcacgagaagaacgtccactgagctctaaagcaggcgttcgcgaggccgctctgcctcgcctccctattgtctcaagtcaatgtccttctttgcttttcgatcaatttcacaagcaagaagcaacctaaccaataatttgttgcccttccgaaggactcgatacactttctgatttctgcctcttctgaattgttcctagacattggagcttctggccccgttgcaagtggaaaatccttgtacttaaaggttgcaatgtagtggtcccgttgcaacgcacgggcactcacctagtaaataaaataagcat

SEQ ID NO: 211176 - DNA, 1006 bp, Zea Mays
tcactatagacagttgaaagctatcctcaggttcaggataccaaagtgaggacaactcatggaatgatgttgatggtgcatctatagacgatgatgaacacagcagcccaagagatgaagaacgtcatgaaataagtttgcccattatgaaatcttctggtgctaatgctgactctgccaaaagtgctgataacacagatgacgctgttgatgcagacttccctaactgcattctgaaatgcaaatctgtgtttaagtgcaagctctgtcctaggatcatgtgcttaaatgtggagatggtcaagatacatctgaaatcaaagaggcatgctcgttccgagaaactactaggagaagggaggcttaagctgatgctcaacagcgatggtgaactggaggaagagcaagagacacatgctgaacgacatgctcggactatagccctttcccagcaagtacaaaagcagaagaaggattcaggtaggcagcgacagaatcggagaaagaagaagaggtctcgggttaatctggaagaggcacagaacaacaaaaaacaacgcaaagctaaatgaagtgggtcttgcagaagcttccaagttcttttgtagcttcaactgctgtgttcccaaactttgtagcggccataccgttaggatattcaagtatccaagagttttctcgtcggctgtaccccgtttcggcctaaactgttagtaatttgttgaattttagatatttaattgaagtggatcaaaatgatatttttgagccgagcagctgatataggctcctcgaactacagtgtgtcgcctgtgccaaatcatcacaggttcatgatccacacgaactataattgtgcttctcaaactgtggtgtggagcttgagccattttagaggagtcacacactgtgtgtgtattttaaaaaaagcggatctggtttctcattttgtattaaaccgtttggctgttttcagcaacgtcctctatatctatctctatatctg

SEQ ID NO: 211177 - DNA, 1617 bp, Zea Mays
gcgtgagccatttgcatctgcagtcgcttgacaccatcactttgcgttcgcgcgaagctgccggtaccgggacgcgcaggcacccgacggacggatgggctggggcggctataaaacgcgtcgctccccttaatgacactgtcatcaccaaacgccggtggagtcactcgagcccgcccgggtctcttcctcttccattgattccattcaagatcactactgttaccagccagccagtcgttcgttaagaagagagcgagcgagcaagagagagagagagggagaagggggaagatcagaacgaagagagggagatgagggggcaaacgcagacagcttccgcggggggccggtggcgaggcgacggcgctgcggcgtggtgttggtggtgggtggccgtggtcctcctgcttggccatttaccgagctgcgcgcgcgcggggctgctggagtccaacccgggcctggcctacaacttctacaagaacagctgccccagcgtggactccatcgtccgcagcgtcacctgggcgcagggctgcgacgcgtcgatcctgctggacaccgcgcagagcgagaagacggcggcgccgaacctgtcggtgggcgggtacgaggtgatcgacgcgatcaaggcgcagctggagagggcgtgcccgggcgtggtgtcgtgcgccgacatcgtggcgctggcggcgcgcgacgccgtgtcgtaccagttcaaggcgtcgctgtggcaggtggagacggggcggcgcgacggcacggtgtcgctggcgtccaacacgggggcgctgccgtcgcccttcgcgggcttcgcgggcctgctgcagagcttctcggaccgggggctgaacctgacggacctcgtggcgctgtcgggggcgcacaccatcggcgtggcaagctgctccagcgtcaccccgcgcctgtaccaggggaacgccagcagcgtggacccgctgctggactcggcctacgcgcggacgctcatgtcgtcgtgccccaacccgtcgccggcgtcggccaccgtggcgctggacggcggcacgccgttccggttcgacagcgggtactacaccagggtgcagcagaggcagggcacgctggcctccgacgccgcgctggcgcagaacgccgccgccgcgcagatggtggccgacctcaccaaccccatcaagttctacgccgccttctccatgtccatgaagaagatgggccgcgtcgacgtgctcaccggcgcaaacggccagatcaggaagcagtgccgccaggtcaacacctcctgatcaacaaggcgtcacagggaggggccatggtttttccctcttcgttcttctctttttctgcaccgcctggtattattgttccatgcatccggtttcggctcggcttcggctcggcgcgcatcaaatatatttcgcccccgcgccgtgattgagggccctcctccgacgaaagaaatccattgctttctttgttatttatattagtttactcactgtcctgtgttcgattgtcttgccttgcaaaatgtaagaaagattaaagatgtaagcaaaaaaacaatgcggatcatccactctagagattggtgttggagatcggttttttttt

SEQ ID NO: 211178 - DNA, 204 bp, Zea Mays
gaggccaccaaaggtaccttgcaatcacaacgaacagaagctctcgatctcaccgacaccgaggaagaagagatcaatggcgtccgagcagggagtcgtgatcgcgtgccacagcaaggctgagttcgacgcccacatgaccaaggcccaggaagccggcaagctgtctagaactaataggaagcaaacagagcctaggactgc

SEQ ID NO: 211179 - DNA, 2088 bp, Zea Mays
cctcagttcctcaaccagcggccgaccgtcgaccgagaagcccgagcagcggtccgatcaggtgagcagcggcgcggctgctgcctgcccgcgcctgcctccgcggctccgccggccgtcgaccgagcagccgagcagaggcgcggcggctgcctgcccgcgctcgcctccgcggctccgctggccgtcgttcgccgacccgaacgccgagtcgcgcgagcgtgccggcgtgccccgcctctcgtcggctcgcgactgcgccagcgcggtcgcgccgccccaccccccggtgaccggcgtccggatccatccgtctggcaacccaaccggccaagggccaaccccgtccccggaccccgactccccgagggccaaccggccaaggcacaaccgctgaaccgcacaatgcatatttagtcgcctactcgcctaggcctattatttccctctcaaactcaaattcttcctggaatccaccaaagccctgcctcccctctactgattctgaaagtggagttccatctgcgcgtcggttgatttattctatttgctgagttggactacattacctccatgtcgagactgcgagctctgtggcaggcttcctttaacgccacaaagagagctcttgtatggagttcagatgatctaattccgccaagtgaaagatgtatcttcaatttcaactcaaaagatgagctgaaaaggtggcatttgtactcagattcagagtatggaggtttgtcttctgcatccttagaaataactgatggcgcttcagttggagatactccattaactggtaatagttgttctatgttcttagcttttccatcttgtgccaatcatttgaagtatagtttgaattgagtactttctggtacaagagaaaacaatgatgtatctgtagcttcttacatttagcatgatagacctcattaaccatgaaatgtttgtggttttcttggaaaatgtctgaggtgagtccaaattatcagtgggtaccggctgctgtattttctttagtaattgaatcgaaacatgcagttttttacttatgattttcttagactggtttgtaaggtaacttttattaacatgtgtattcttgaaggtgtgttttctggtaacctttctttggatatgtctgaagagtcaacatggaggatcaggcgctatggattctgtgggatgcgatcaaagaagtttgatgggttcattgaccttgatgcatatgatacaatagcaatgaagatcaaaggggatggaagatgctacatatctacaatatacacggagaattgggtgaattcacccgggcaacaagaagacaactcgtggcaggcttttgtgtacatacctcctcaagacagatgggaagtcttgaagatccctcttgatcgctatttacccacatggagaggaaatgtgatccaggcaaagttggaaatgaaccctgctcggatcgtggggatgtctctctctgtaaacgcagaaggcggtgttcctggcgccaagactgggcctggtgattttaggcttgatgttgcttggatcaaagcgttgagagctttgtgaactccacaagtcatagttttatttcacatcggccctttccttctttatcaccctgccccagtggcgccgctgaactcatcacccgaccacaaccacaggagtaaccatagcacagattgccaactcctttatgcacttaataatggattttgttttgcttctgaggtttatgaataagtggtagaaaaatggagcatttagttaaggtgccccctttggacagatgttgctttttctctctctctagtatctgatcggccgataaaacgagtgcattccacccggacgataatgcgagagtaggattcagtttaattctttgactgttaagagtactactgtttgatcgtttgaattatacacgttcatttgagtaatttttttttcattcaaggtgatcatgtgatttaacatgaccacttgtcatatttggtccccgtatgagatgtgtaatgtgtggggatattttctctctttaatacaaagaagggcagctaatcttgttttttg

SEQ ID NO: 211180 - DNA, 2080 bp, Zea Mays
cctcagttcctcaaccagcggccgaccgtcgaccgagaagcccgagcagcggtccgatcaggtgagcagcggcgcggctgctgcctgcccgcgcctgcctccgcggctccgccggccgtcgaccgagcagccgagcagaggcgcggcggctgcctgcccgcgctcgcctccgcggctccgctggccgtcgttcgccgacccgaacgccgagtcgcgcgagcgtgccggcgtgccccgcctctcgtcggctcgcgactgcgccagcgcggtcgcgccgccccaccccccggtgaccggcgtccggatccatccgtctggcaacccaaccggccaagggccaaccccgtccccggaccccgactccccgagggccaaccggccaaggcacaaccgctgaaccgcacaatgcatatttagtcgcctactcgcctaggcctattatttccctctcaaactcaaattcttcctggaatccaccaaagccctgcctcccctctactgattctgaaagtggagttccatctgcgcgtcggttgatttattctatttgctgagttggactacattacctccatgtcgagactgcgagctctgtggcaggcttcctttaacgccacaaagagagctcttgtatggagttcagatgatctaattccgccaagtgaaagatgtatcttcaatttcaactcaaaagatgagctgaaaaggtggcatttgtactcagattcagagtttgtcttctgcatccttagaaataactgatggcgcttcagttggagatactccattaactggtaatagttgttctatgttcttagcttttccatcttgtgccaatcatttgaagtatagtttgaattgagtactttctggtacaagagaaaacaatgatgtatctgtagcttcttacatttagcatgatagacctcattaaccatgaaatgtttgtggttttcttggaaaatgtctgaggtgagtccaaattatcagtgggtaccggctgctgtattttctttagtaattgaatcgaaacatgcagttttttacttatgattttcttagactggtttgtaaggtaacttttattaacatgtgtattcttgaaggtgtgttttctggtaacctttctttggatatgtctgaagagtcaacatggaggatcaggcgctatggattctgtgggatgcgatcaaagaagtttgatgggttcattgaccttgatgcatatgatacaatagcaatgaagatcaaaggggatggaagatgctacatatctacaatatacacggagaattgggtgaattcacccgggcaacaagaagacaactcgtggcaggcttttgtgtacatacctcctcaagacagatgggaagtcttgaagatccctcttgatcgctatttacccacatggagaggaaatgtgatccaggcaaagttggaaatgaaccctgctcggatcgtggggatgtctctctctgtaaacgcagaaggcggtgttcctggcgccaagactgggcctggtgattttaggcttgatgttgcttggatcaaagcgttgagagctttgtgaactccacaagtcatagttttatttcacatcggccctttccttctttatcaccctgccccagtggcgccgctgaactcatcacccgaccacaaccacaggagtaaccatagcacagattgccaactcctttatgcacttaataatggattttgttttgcttctgaggtttatgaataagtggtagaaaaatggagcatttagttaaggtgccccctttggacagatgttgctttttctctctctctagtatctgatcggccgataaaacgagtgcattccacccggacgataatgcgagagtaggattcagtttaattctttgactgttaagagtactactgtttgatcgtttgaattatacacgttcatttgagtaatttttttttcattcaaggtgatcatgtgatttaacatgaccacttgtcatatttggtccccgtatgagatgtgtaatgtgtggggatattttctctctttaatacaaagaagggcagctaatcttgttttttg

SEQ ID NO: 211181 - DNA, 1676 bp, Zea Mays
tccaaggaattagctaaggattgggtttgcaaacaccaacttcatcagtgtactcagctaatggaatttatgggtatgatgggagctatggacccggcctttggtatggatcgcacatgtataattctggattatatggtggatggaattcactgtatgatggaaagtacagaaccagaggaagaggtaacaatgggtattatgtttatggtaatggaagcatagatggctttaatgagctgaaaagagggccaagaagtggtatgtacaaaaaccagctggggcttgaagctactacccaagcaccagcaaaagagcaggatcttttgtttgctaatggttcacatcctgccatgaaggatcagtataatcaggctgactttgcggaaacatactcagacgctaaattcttcattattaaatcttacagtgaagatgatgttcacaagagcgttaagtacaatgtgtgggctagcactcccaatggtaataagaaacttgatgctgcctatcaagaggctaaagaaaaatcaagcgaaactcctgtttttcttcttttctctgtgagttttgtgtttgctcattacgactactgttgatgctcatcaatttgaaatctttcaccatacttatgctgatatgtgatactctttttgaaggtgaatgcaagtggccagtttgtcggccttgctgaaatggtgggtcgtgttgattttgaaaaaacagtagagcattggcaacaggacaaatggactggttgtttccctgtcaagtggcacattgtgaaggatgttccaaacagcttgctgaagcacatcattcttgagaacaatgaaaacaagccagtgacgaacagcagagatacacatgaggtgaagcttgagcaaggccttcaagtgcttaagattttcaaggatcatgtctgcaagacatccatactggatgacttcggcttttatgataatcgtgagaagatgatgcaagagaggaaagccaaacagcagcagtcgctgaaaaaggtcattgatgtgaagctgcccagcgtcaccgacatggagagaagtcctaaaggggagactggatcaacagaactcactggggttgggactgacgtcttgaacaaagagcgtttattaggcaaagcaggagagaaaaatggcgagaaaggaaatgatgtcgccccacaggacctgaaaacacaaactgagaagttggcgggtctaaatggctgttaatatttttcgttagctcaagccgttgacagtggtgtcggggtggaacctaaggctgtggtgggttgtttgaggaaattctgatgtcccattgagcttgtttcctatagttcataggagctagaggcttagctagttgcttgtgtttggtggtagtcatggtctgtgttctggcgtgtcaggtattttaggaatagaaggatgattaactgggttttgcaatgatggatcatgggttttgaggctgtatttttcgtttatttgcctttcctctctggattctagttcctctctctctctctctctagattctggacaagtgtagtgcttattttaagttggttggtttaagaacctgaaatgaacatgggaattctatcaagcatttacaaacttactttcctctgtacaatatgtgaaaaccgtctacttccatactttctg

SEQ ID NO: 211182 - DNA, 635 bp, Zea Mays
ttttaatgaggaatgcagcttcaacatataatatcctgaacgaggagggcaggccggtggcagctgcagttcttccctatggagtcacttgttaatgttttatcttctataccagttgggcaggcgttctctctttataatcgataaccaactgagctttgtttcgttcgtgctgtttcttggaagttctatatctgtcatgcatgtccaaagtagagttgtctatcttcctgcttttctacttcctctagcaagcccagatgcacagactgttggtatgttttggttgccgagggtacaatcatacatacaggcgaaacacttgccactctgctacgaactgggacgtgcgcccgcctggcgactggcgaggaccacggagtcacggacccggctgttttgccttctgttgatcgtcctaatttcagggctcaggcaggcagacgcgatgggatcctacgtggtaggagtactcgccagttcagatctcgcgggttaatatttactgtcacgtcatgttgtatcactatcgaccatatactataaattatgtaattgatttttgtcagtgtttatctgtgtttatctactgtaatgctcgtccattgtactacctttgttctcgaatatttatc

SEQ ID NO: 211183 - DNA, 926 bp, Zea Mays
tggaaatggtcgaaaacggatacttattcggatatcagcttttttggtatgatgacactggattcaaaattaacaatgtaaaatatgaaggcagtgtattgattgtagagaacaagataatgacatgggcacccaaaacgttctcagagataactcctgaaagtttatcaatcttcaaagttgtgcaccctatcccagagatctttattcttggttgcggaagacacgtccagctggtcagtcctgagctgcggatgttcattcggtcaactggaatgaaactagaagcagttgattcgaggaatgcagcttcaacatataatatcctgaacgaggagggcaggccggtggcagctgcagttcttccctatggagtcacttgttaatgttttatcttctataccagttgggcaggcgttctctctttataatcgataaccaactgagctttgtttcgttcgtgctgtttcttggaagttctatatctgtcatgcatgtccaaagtagagttgtctatcttcctgcttttctacttcctctagcaagcccagatgcacagactgttggtatgttttggttgccgagggtacaatcatacatacaggcgaaacacttgccactctgctacgaactgggacgtgcgcccgcctggcgactggcgaggaccacggagtcacggacccggctgttttgccttctgttgatcgtcctaatttcagggctcaggcaggcagacgcgatgggatcctacgtggtaggagtactcgccagttcagatctcgcgggttaatatttactgtcacgtcatgttgtatcactatcgaccatatactataaattatgtaattgatttttgtcagtgtttatctgtgtttatctactgtaatgctcgtccattgtactacctttgttctcgaatatttatc

SEQ ID NO: 211184 - DNA, 2705 bp, Zea Mays
catctatcaccattccattcctcataagctaatagttagtaataatatgaggaatgagctcattccactaaatttgtgaaatggactcgtgatgcaatggattgattcttcaaaccaaacaccccctagctgaccgcttgtacttgtaacaacaatgtaagatcataacatcacagcatgtatgttgtggacacagtttcataaagttattaatcgaaagaaagtatggcacagttcattgaactgtctgaacctttattgaattatatgaggaaaaaatcagaaagaatcagaaaggggttgagagatagaggtgggtagagctgaaaatacaaaactaaactataaaacgactcataaacttagtagcactccttaaataagtgaattggcatgttggtaattgtagcctgaagtagaggatccatctaaagccgtaacaccatgctgcacaatggacacttcagcgcagcattgtggaagttgctagatgacaatcaaagcgcactgcttaatcaatgacagtcgaatgcctacagattctcggttacttctatcgagcactcaggagagcggttacttctatcgagcactcaagagagctgctaaattttatattaagaaaaaaagggggcaataacccttacatttgggcgctctttgagtctttgtatacagcaaaacaatgacctcgaccaaaaaaaactacctactgctcgctcgcaggctcaagggcaagaagaacccgccaaactccaaaagaataacttctaggttatgtagtataggatgaagataataacattcatgaattggacaatcatttcaccttcaagacaaaagtaaatccatccaaaatcctaaccatactgtctctaatctaaagagtaaagggagacatcacgaactaccgcataaattaagtcaatttcgcacaaatttggaaaagcgttgattcttgtgatcagcaaacggctgtaaaatcatgcttacaatcggaacactctagacccaaacaagacgagatgggggcagaaggcgggagacctgagcgggggaggactgctccatcagctggaggaggttggaggtggaccgcactgcttgtgctatctgctcggtcactgccgccttagcccctccaccaccgccaccgccggccgtcgcagccatccccgccacgtcgacctgggagctcgccctacggcctacggcctacgcccagtacagagttgaaaatgtgtgtaaacaaataaccaaaggcccaaccaaccgcagggccgaatttccaatcgtcaagtgggacccgttcgaatttccgttatgcaaaatttcccgacccctctagaacgaccgcccctgccgaggagccgaccgacgggcgaagcgggagggaggcgatggcggcggcttgggggcagaaggccctgggggctctgccgcagctggtgaagtcgctgcggagtgatcccgtctccggcagcgcacgacacaggcgccttccgtctctcaggaggaccttctcgttgtacgatcagatcaacctcatcgacagcgtcccggaagacgagctccgattccagtcgtatgatgacactggattcaaaattaacaatgtaaaatatgaaggcagtgtattgattgtagagaacaagataatgacatgggcacccaaaacgttctcagagataactcctgaaagtttatcaatcttcaaagttgtgcaccctatcccaggtaattttctcttggtgaatgctctgctaccttcatgcatattgttgtgctaatgtcacaattcaatgctttgtatgggtcttatttcttggttttttatgtggaccagtggtgctggtgctgctctattaggaagccataaggcatgcatgtttttttattgtgagagatttcatgtttatgtttattaattcaacagtcagcccttatttgtggttggtgtgcaaacattttgtcaagagatctttattcttggttgcggaagacacgtccagctggtcagtcctgagctgcggatgttcattcggtcaactggaatgaaactagaagcagttgattcgaggaatgcagcttcaacatataatatcctgaacgaggagggcaggccggtggcagctgcagttcttccctatggagtcacttgttaatgttttatcttctataccagttgggcaggcgttctctctttataatcgataaccaactgagctttgtttcgttcgtgctgtttcttggaagttctatatctgtcatgcatgtccaaagtagagttgtctatcttcctgcttttctacttcctctagcaagcccagatgcacagactgttggtatgttttggttgccgagggtacaatcatacatacaggcgaaacacttgccactctgctacgaactgggacgtgcgcccgcctggcgactggcgaggaccacggagtcacggacccggctgttttgccttctgttgatcgtcctaatttcagggctcaggcaggcagacgcgatgggatcctacgtggtaggagtactcgccagttcagatctcgcgggttaatatttactgtcacgtcatgttgtatcactatcgaccatatactataaattatgtaattgatttttgtcagtgtttatctgtgtttatctactgtaatgctcgtccattgtactacctttgttctcgaatatttatc

SEQ ID NO: 211185 - DNA, 3265 bp, Zea Mays
ccatgtttgacaagagctgtgtaacagtcttaatttgagaggcactgcacattttttttaatatacaaaagaagaggtgaaattgaagaaaataaacttcaacttagttccatgaaaatctggacatgcgtgcgtcttacagaactacaagctgggatttcagtttacttatgatgaatgtatcctagaccaatatgttctagtgggaaagggtcattcgaatgtaagctagaagctcgctagttgatcttcttgtttagaaataaattgacgagtctgtctcgcaatatttttttaaaaaaagaaaaaattgtatattaagacataacgatcatatgacacaacactgacataagtgatccttttctggaaggcaaagaggaagaaaataaacttcagcctagttggttggaatctggacagaattgcagctaaaaagctccatgactaagttttagagaacagctagcagtactgtgaacataataaataaatatgcatataggggaagctaacctttgcaaactcctgtccatataagcatccaaggatgatattacttgaggtagctggtgcagcacctagaacaggacacagatattaactgctaccttacaactagttttggcatccaatgctacacttatttcttacatgctctgtgttctttgcaaaggatgctttttccagcaggttcttcggtagttttgccaaatgaacctgtgaccacaagtacatctatgttgattatcttggttaactaatagcgtgtttggtttgagaaatgaggtagtccatcatcttctcactcctcacttgtggaatggaatgagttcatctatcaccattccattcctcataagctaatagttagtaataatatgaggaatgagctcattccactaaatttgtgaaatggactcgtgatgcaatggattgattcttcaaaccaaacaccccctagctgaccgcttgtacttgtaacaacaatgtaagatcataacatcacagcatgtatgttgtggacacagtttcataaagttattaatcgaaagaaagtatggcacagttcattgaactgtctgaacctttattgaattatatgaggaaaaaatcagaaagaatcagaaaggggttgagagatagaggtgggtagagctgaaaatacaaaactaaactataaaacgactcataaacttagtagcactccttaaataagtgaattggcatgttggtaattgtagcctgaagtagaggatccatctaaagccgtaacaccatgctgcacaatggacacttcagcgcagcattgtggaagttgctagatgacaatcaaagcgcactgcttaatcaatgacagtcgaatgcctacagattctcggttacttctatcgagcactcaggagagcggttacttctatcgagcactcaagagagctgctaaattttatattaagaaaaaaagggggcaataacccttacatttgggcgctctttgagtctttgtatacagcaaaacaatgacctcgaccaaaaaaaactacctactgctcgctcgcaggctcaagggcaagaagaacccgccaaactccaaaagaataacttctaggttatgtagtataggatgaagataataacattcatgaattggacaatcatttcaccttcaagacaaaagtaaatccatccaaaatcctaaccatactgtctctaatctaaagagtaaagggagacatcacgaactaccgcataaattaagtcaatttcgcacaaatttggaaaagcgttgattcttgtgatcagcaaacggctgtaaaatcatgcttacaatcggaacactctagacccaaacaagacgagatgggggcagaaggcgggagacctgagcgggggaggactgctccatcagctggaggaggttggaggtggaccgcactgcttgtgctatctgctcggtcactgccgccttagcccctccaccaccgccaccgccggccgtcgcagccatccccgccacgtcgacctgggagctcgccctacggcctacggcctacgcccagtacagagttgaaaatgtgtgtaaacaaataaccaaaggcccaaccaaccgcagggccgaatttccaatcgtcaagtgggacccgttcgaatttccgttatgcaaaatttcccgacccctctagaacgaccgcccctgccgaggagccgaccgacgggcgaagcgggagggaggcgatggcggcggcttgggggcagaaggccctgggggctctgccgcagctggtgaagtcgctgcggagtgatcccgtctccggcagcgcacgacacaggcgccttccgtctctcaggaggaccttctcgttgtacgatcagatcaacctcatcgacagcgtcccggaagacgagctccgattccagtcgtatgatgacactggattcaaaattaacaatgtaaaatatgaaggcagtgtattgattgtagagaacaagataatgacatgggcacccaaaacgttctcagagataactcctgaaagagatctttattcttggttgcggaagacacgtccagctggtcagtcctgagctgcggatgttcattcggtcaactggaatgaaactagaagcagttgattcgaggaatgcagcttcaacatataatatcctgaacgaggagggcaggccggtggcagctgcagttcttccctatggagtcacttgttaatgttttatcttctataccagttgggcaggcgttctctctttataatcgataaccaactgagctttgtttcgttcgtgctgtttcttggaagttctatatctgtcatgcatgtccaaagtagagttgtctatcttcctgcttttctacttcctctagcaagcccagatgcacagactgttggtatgttttggttgccgagggtacaatcatacatacaggcgaaacacttgccactctgctacgaactgggacgtgcgcccgcctggcgactggcgaggaccacggagtcacggacccggctgttttgccttctgttgatcgtcctaatttcagggctcaggcaggcagacgcgatgggatcctacgtggtaggagtactcgccagttcagatctcgcgggttaatatttactgtcacgtcatgttgtatcactatcgaccatatactataaattatgtaattgatttttgtcagtgtttatctgtgtttatctactgtaatgctcgtccattgtactacctttgttctcgaatatttatc

SEQ ID NO: 211186 - DNA, 1086 bp, Zea Mays
acatttcctcggtccagcaggagccagcgtatacctgagagacggaaggcgcctgtgtcgtgcgctgccggagacgggatcactccgcagcgacttcaccagctgcggcagagcccccagggccttctgcccccaagccgccgccatcgcctccctcccgcttcgcccgtcggtcggctcctcggcaggggcggtcgttctagaggggtcgggaaattttgcataacggaaattcgaacgggtcccacttgacgattggaaattcggccctgcggttggttgggcctttggttatttgtttacacacattttcaactctgtactgggcgtaggccgtaggccgtagggcgagctcccaggtcgacgtggcggggatggctgcgacggccggcggtggcggtggtggaggggctaaggcggcagtgaccgagcagatagcacaagcagtgcggtccacctccaacctcctccagctgatggagcagtcctcccccgctcaggttcatttggcaaaactaccgaagaacctgctggaaaaagcatcctttgcaaagaacacagagcatgtgctgcaccagctacctcaagtaatatcatccttggatgcttatatggacaggagtttgcaaagctcttgtcaaacatggagaacactcagctgaggtacatgttgccttcctctcaaaagaagaaagatcaaaagagtactgaaccttaagaattcagagtcgactgatgtgttcaccgagacataatggaaggatatgttcttgccgttttgtgctaaagaaatttgagttttgtggctctcaagagatggcttggctttatctggtgtaaggatccatcgttgtctactgtctgtcccacatttgctgagttcggttgggggacgctgttaatggaaatattcttctttcttcaaaccatttacgggtgcctaggacctgtatcataaggcaagcatgcctgttagttgtcacacattctggtctatgaacacgttgctttcttgtaattgcattggttgttttagcagtaaattatggtagaaattatgaagtgatcaaagtgtttaacgtggca

SEQ ID NO: 211187 - DNA, 820 bp, Zea Mays
tctggcagctcatgatgccatgcttgcccacagcagcatcagttcctagggggcggcgagtattacacttgggggtagtagaagaaagaaacacccattcagccaggcaatcccggcgcacacggctgtgaatcggtcggtgattgtcaggttaatacacaggttagtttttgtgtagctaacccagcggcgtggtttgcgaacaccgacatgctagaggtggaagctgctaggctagctagaggaaaggagcgcggatggatatacagaaacatttcgtgaaggttttgtttttgttttgttttttggtttttgcgggggtggtggtcatgttctagttttggttcgtacgcgcgtggtgaggccttttggagttttgaaatgagatgtagtagtaattgttgcggcacatattttagaagtcaagccatgttccaacagaagctggaaagagatgtccgctgtatacgggtgagcatgtataccaaccaaagggatgctgtattatacattagcctgtgtgtgtgtgtgcgtgtttttatttttgtttgatccggtttttagccatttgtcttttttttttcaatctggagattttgctgacttgctctgaattattatgcatgcagtggtgtttattttgttctcttcatgtggtgtgataatacatatgcctttttttcttcttctggtgtacataactggatccgattgtttggcatatatacgttgctgtacgtaactggatttgagttcttcacaacgtatggggaagacgaggatgatggagaggacgaccgcgtaaagagaggaagacgac

SEQ ID NO: 211188 - DNA, 357 bp, Zea Mays
caagagtattttggggaatgggaatatatagggatccaaataatcaaatttgccctccctcaccaagtcgaggaccccctccgaatccgagggttcaagcgaccgacggcgaacatggcggcggacggcggcccagcgacgtcggcgctggaagaggccctcaagcccttccaggaaagagcctccgaggctgagatacgcatagcgaagctggaagccttgctgtacaacaaagatggtccgagcggtggatccgaggcaacttcctctgccgtgaaggatctccagtcgaagctagatgtggttactgcagaatgcttgactgaaaaggagaagctcggctcatgaaccttgcag

SEQ ID NO: 211189 - DNA, 1482 bp, Zea Mays
cgaaggttcttctcacgcaccttctttccttcccctccccaacttcgacccttcccctgtccatctctctccttttttttttggtttcctcgcgtttaaagcttcgaggccgaatcgacctccagttctcgagacgactcgtctccctctttcaataagttcggcagggtaggacggcttcttcctctgcgccttcaccttcgcctgcgctgccggggctcgtcgcatggtttttaaatcgggtttgtaagttttagatctttatgtcaactaccaatctgaggcggcgactccatcatggagacgttgatggaaggaaaaacgagcatgttgacatatccagtgctgattccctcaatgaacctctattagggaagtccaatgatgacaactttggatcagaggtgtatgatcctagaaaacaggatctgtgggatgatgatatgaagaaagaacaactacactggtcatttcttttctcaaacttgattacacaatgggcacaatggttagcaagcattattgtgagctcaggatctatctttggtagattatcccccttctcttcagagaaccaaataaatccagtatatcttagccctttacaggttggatactttaagacacagattgcaaatctcttttgatggctcccgtattgaacatcaagatgccttgaggcaactctggcgtttagcttatcccgctcgtgagattccaccactcaaatctgaattatggaaggagatgggttggcaaggcaacgatccatctactgatttcaggggtggtggactcatatcgttggagaacctcatcttttttgctaggaactaccctaattcatttcagatgcttctgaacaaagtacaagggcagagatcagattgggagtacccttttgcagttgctggtatcaacgtttcattcatgctggtccagatgttggatctgaagtcaagtgttccatcttctaagtatggaattcgtttccttgaattgcttggacgtgatgagaacgcctttgaccacctgtactgtgtggcctttcggttgcttgatgctcagtggcttgtgaaacgtgcctcctatatggaattcaatgaggtcttgaaatcaacaagaactcagctggagcgggaactggttctagatgatgtgctggaggtgaaggacctgccgtcctacactatgctggatgagtaagctaaagccgagctgttgaacttggacgctggagaattgactaagctggtctgatggctaatagttatctagcgtatgctgatgtctgatcctaaatgcttaggcggcccacatgccattttacattgccgcatattttttttcttgttgtatactgaggtcttatgaggtgtttatatatgattcctttgtaaatattgtgtttgttatatgttatccttttggacatgctggttccaaggaaataaagcaatcgatctcgtattcattttcagc

SEQ ID NO: 211190 - DNA, 765 bp, Zea Mays
ctggaaagttgtttgtacttctaccaaagaaacaaaggtctgcaacaaaagtgacatttccacttgtctggacaaacacctgctgtagccatcctctctaccgcgagtcagagttgattgaggaaaattgtgcaggggtgagaaatgcagcccaacgcaaactatttgatgaactgggaatagttgctgacgaattacctgttgaccagttcatcctccttgggaggatgctttacatggctccttcagatggaaaatggggcgaacacgagttggattacctcctgttcatggttcgtgacgtgaagctcaacccgaatcctgaagaggtggccgacgtcaagtacgtgaaccgcgatcagctgaaggagctgctcaggaaagctgatgctggggaagatggcgttaagatgtccccttggttcaggctggtggtggacaacttcctcatgggctggtgggatcatgtcgagcaagggactctgcagggggcagcggacatgaaaaccatccataagttgtaagcctgtagtcttgtagatccgcgaagcacgtgctgtgctccgttgagaaataagcgtttctgcaggtgtttgcgctgcctttgttttagccatcattctgatggaaatagtcgataaagtcataatagagtgttcttaaatagggaacagaactatttatattgaaacccgtctatgatgtgtaaatttctaccgaatgaatggaattatggaaatcatagtaattggcgagcaaaagaaa

SEQ ID NO: 211191 - DNA, 1886 bp, Zea Mays
ctcaaatctggacatttatgcatggaaagggacgcgttggattcacctgccttgtcgattgacaaaaggctgcggtcggatgctgtcgaatcacccctggtggatgatgcaacgcaacccaaggagggggcggacggttaccctgtcaaggttcggaagccttacacgatcacgaagcagcgagagaagtggacagaggaagagcatgggaagttcctggaggcactgaagctctatggtcggtcttggcgccagatacaaggtcgtgcgtgaacctggggccagtaattcaattgagatcccaccccctaggccaaagagaaaaccactgcacccataccctcgcaagtgtgccgactccaccgtgacaaatgctccaatgggcgaaccgaagaatgctcctgtttcatcaccatctggttctgaccaagagaatggttcgcctgtctcggtgttatctgcaatgcagtcggatgcttttggttcatcaatatcaaacccatcaactgggggcacgtctcctgcgtcatcagatgatgggaataatgtccctgagatagtgaatggggaggaaaatttgctcactcagcaaatagaagaccgatcccatcaggaatcaaagcaggacaacagtgatggtgagctgtctgaagaagattcatcacgagtccaagaaaccagtttgaagctttttgggaagacagttatcatcccagacccaaagaaagtctgttcctcggatgggggagctggagatgatacacaagaagtgatgcaaacatcctgggttggaggaggggtggcagcataccctgcccataacggatggtttcttccgttccattctttccctgctcatatgtatgagtcaggggatgctaggatttcccctcttcatatgtggtggccttactacggttttccggccggccatccaagagggtttggcacagggctgcttaacgaaggcgccattgagagtgatgccgacaatagcccatcggttgaaactaattctgatcgcacgggcaatgttcatgttcagacgacgacccctaccattcacaacaatgctgtcaaggagtcagttgggccagttgagatgccagagtcgggtccgagcattgagctgaaacccagcgcgaactcggcctttgtaagagtgaagccgagcagcagcgtcagcggagaccaatcactggtaagggggttcgtgccatacaaaagatgtaaggtcgaataacccaacccaacgacatacctgtctgctgctaatcttactggagattgattgatcctgaacagtgtagggactcgagtggcacacatcccttgttccagtgtgcctgccattttttgcctgcaaaattggctgctggtgtatgtgtaatattgtcgttttactgcctgcagcggaatgtaagatgccgcaggcttgttgctgtcacctaggcgtagactgaacagatgttgtgcagggatcgccgatctctgcacccttatgtttgttgtacgaggaaaaccggattctgttgaactctcgtgttcaaaaattcattgattcctgatggaaactgatttgtaaatgaacatggcaatgccgccggacaggttacagtgtatcctgtaagaccaattcttttggtccttgaacaatggaatgcagactaggttttggtcattcaaagcaagctttgggtgtgatgttattgtgttggatgcaaagcaagcgatctgctgctggtggtaacttcgtgagggcttgtgctgctgccgatgatgccgtgctatccctacctcctcttcctgttggtgttgctgccatcatgggttagtttgtaatgcctgttgaagtatacaagtggattgcttatctttttcttatc

SEQ ID NO: 211192 - DNA, 1046 bp, Zea Mays
ggcctagcagccctttccctggggttggatgatataaattttgaagctcggtggagtagatcgggtgagatgctaataatatcgtggattcaagctatggtttctctgtggttgattctaactcattggagttccttttcaacaatgcacctgaggccgccaaatggctgaaggataactctgagttgtcctttgaagaaaaatatcggtctgatagaagctcatggttggctttgtatcctgtcccattcttgttctctggaagtttaaaattccaggcacaaactgaagagattaaaaagtactaccagcatttccctcagttagctgttcaggagatctgggataacaatggacagcgaagggtgcatctcaaacttgcacttggttccttatcagaaatttggacctctgtgctcaatattactgggccactatcaaattggtccttcgctgataacatgctcccagctcctcaaactgtaagtggtgggccaccatcatatatttgtcgactcagtggaaagagcgatgtggattggtctttctggttggaggcaaactcttctgaaagtctgagagtcgatgtcgcagtacttgatcagtaccttgttgatagtacaaagaaactcaagagcctcttcccaagttgggcagacttgacagccttcacaacatttttctcaacgtatcatttatgaggaggtcaagtatttgatgttcaacaagtgtaaatcattttctctttgtagccctacgtttcggggctatatgtggttttgtcaccatgatcagctggacctgagccccgaggctggtgtttgtaaaatctttgtaagcgtgccttgatgtattcatgaatcacacaagattgtaagaatctcaagtcagtcataaattttttaccacttagtcattcacgattgacggtatggcatcactgatcattcgtgttctaagtttaaaaattctaaaaagaaatgttgcatcgacatagaagtactgcgtttcattttgtaatcgataccacctgaggtgaaaggtta

SEQ ID NO: 211193 - DNA, 1350 bp, Zea Mays
ccgtagtgcttttgctttaaaaaatggtcgttggttgcgtatgtgctgcctatgaccccatgtctcctttacggtctttactatggtggattccttatccagttcctgattgaaaagatgggcatgatgggatctcttccaaaaccatatggatattttgtgcctgatgttattgttggagctgtagttggattagtggttggttggtgttttggtcctctatcacctgttgctagtcgttggttgtcgaagacttcaattatccatggcttcctgcaaattacagtggttgctttggctatctcatcccaactgtttccttacagcactggagcaccaaaaagagttgttcttcaacatacttttgttacagatgctaataatatcgtggattcaagctatggtttctctgtggttgattctaactcattggagttccttttcaacaatgcacctgaggccgccaaatggctgaaggataactctgagttgtcctttgaagaaaaatatcggtctgatagaagctcatggttggctttgtatcctgtcccattcttgttctctggaagtttaaaattccaggcacaaactgaagagattaaaaagtactaccagcatttccctcagttagctgttcaggagatctgggataacaatggacagcgaagggtgcatctcaaacttgcacttggttccttatcagaaatttggacctctgtgctcaatattactgggccactatcaaattggtccttcgctgataacatgctcccagctcctcaaactgtaagtggtgggccaccatcatatatttgtcgactcagtggaaagagcgatgtggattggtctttctggttggaggcaaactcttctgaaagtctgagagtcgatgtcgcagtacttgatcagtaccttgttgatagtacaaagaaactcaagagcctcttcccaagttgggcagacttgacagccttcacaacatttttctcaacgtatcatttatgaggaggtcaagtatttgatgttcaacaagtgtaaatcattttctctttgtagccctacgtttcggggctatatgtggttttgtcaccatgatcagctggacctgagccccgaggctggtgtttgtaaaatctttgtaagcgtgccttgatgtattcatgaatcacacaagattgtaagaatctcaagtcagtcataaattttttaccacttagtcattcacgattgacggtatggcatcactgatcattcgtgttctaagtttaaaaattctaaaaagaaatgttgcatcgacatagaagtactgcgtttcattttgtaatcgataccacctgaggtgaaaggtta

SEQ ID NO: 211194 - DNA, 1741 bp, Zea Mays
ttctcatcaatagacacatattttgtgaagtttatgggaagtgctcaatcccaggaaaagatgaatggtactccatacgtttggtgtaatccttgcaatatttattcctgctctggctgcagcattaagattattattcacaaagaatgcaatgaattggtttgctcacccttatttggcgttcctaatgtttgtccctacttcattgattggtctattgctgccaaggcttacatgggggctatcggagcaagcacacttttggggtgcttttgggttgtattctttaataactatggtctacacactagctgggctgagtggaggttttctaacatttttcatttccatgtccatgcttcttggacgatttgtctctagaatcattaggaagcagtggagccaacaatcacctaggtcgttggttgcgtatgtgctgcctatgaccccatgtctcctttacggtctttactatggtggattccttatccagttcctgattgaaaagatgggcatgatgggatctcttccaaaaccatatggatattttgtgcctgatgttattgttggagctgtagttggattagtggttggttggtgttttggtcctctatcacctgttgctagtcgttggttgtcgaagacttcaattatccatggcttcctgcaaattacagtggttgctttggctatctcatcccaactgtttccttacagcactggagcaccaaaaagagttgttcttcaacatacttttgttacagatgctaataatatcgtggattcaagctatggtttctctgtggttgattctaactcattggagttccttttcaacaatgcacctgaggccgccaaatggctgaaggataactctgagttgtcctttgaagaaaaatatcggtctgatagaagctcatggttggctttgtatcctgtcccattcttgttctctggaagtttaaaattccaggcacaaactgaagagattaaaaagtactaccagcatttccctcagttagctgttcaggagatctgggataacaatggacagcgaagggtgcatctcaaacttgcacttggttccttatcagaaatttggacctctgtgctcaatattactgggccactatcaaattggtccttcgctgataacatgctcccagctcctcaaactgtaagtggtgggccaccatcatatatttgtcgactcagtggaaagagcgatgtggattggtctttctggttggaggcaaactcttctgaaagtctgagagtcgatgtcgcagtacttgatcagtaccttgttgatagtacaaagaaactcaagagcctcttcccaagttgggcagacttgacagccttcacaacatttttctcaacgtatcatttatgaggaggtcaagtatttgatgttcaacaagtgtaaatcattttctctttgtagccctacgtttcggggctatatgtggttttgtcaccatgatcagctggacctgagccccgaggctggtgtttgtaaaatctttgtaagcgtgccttgatgtattcatgaatcacacaagattgtaagaatctcaagtcagtcataaattttttaccacttagtcattcacgattgacggtatggcatcactgatcattcgtgttctaagtttaaaaattctaaaaagaaatgttgcatcgacatagaagtactgcgtttcattttgtaatcgataccacctgaggtgaaaggtta

SEQ ID NO: 211195 - DNA, 2072 bp, Zea Mays
ggctgcgacttttgtggcagcctccctctgtgcaagcctgtgatacagattatagaatatttgctgaagacattacaaacattccaggacttgatataatttttgttctcggtggttatttctatcatacttcatatgatacattggagaatctacttcctggaagtattcaagcacgtggtgaaaatttattcaaccttgtgaaggcattcacaaatcctatgttgttaaaagagaacgagatatctaataaagctgctaaggatggaattgaagatgtgggggcggtcttttttgattatttgacttggttcatggtattttattctcgtgatatatctctgattcttcacagtctaccgatagccatttttcttcttgtaccgctgttcctgaagttcccaaacattaccttgatgtcatggtttgtaactctcctaggtttcatgagaggaatggtactccatacgtttggtgtaatccttgcaatatttattcctgctctggctgcagcattaagattattattcacaaagaatgcaatgaattggtttgctcacccttatttggcgttcctaatgtttgtccctacttcattgattggtctattgctgccaaggcttacatgggtctacacactagctgggctgagtggaggttttctaacatttttcatttccatgtccatgcttcttggacgatttgtctctagaatcattaggaagcagtggagccaacaatcacctaggtcgttggttgcgtatgtgctgcctatgaccccatgtctcctttacggtctttactatggtggattccttatccagttcctgattgaaaagatgggcatgatgggatctcttccaaaaccatatggatattttgtgcctgatgttattgttggagctgtagttggattagtggttggttggtgttttggtcctctatcacctgttgctagtcgttggttgtcgaagacttcaattatccatggcttcctgcaaattacagtggttgctttggctatctcatcccaactgtttccttacagcactggagcaccaaaaagagttgttcttcaacatacttttgttacagatgctaataatatcgtggattcaagctatggtttctctgtggttgattctaactcattggagttccttttcaacaatgcacctgaggccgccaaatggctgaaggataactctgagttgtcctttgaagaaaaatatcggtctgatagaagctcatggttggctttgtatcctgtcccattcttgttctctggaagtttaaaattccaggcacaaactgaagagattaaaaagtactaccagcatttccctcagttagctgttcaggagatctgggataacaatggacagcgaagggtgcatctcaaacttgcacttggttccttatcagaaatttggacctctgtgctcaatattactgggccactatcaaattggtccttcgctgataacatgctcccagctcctcaaactgtaagtggtgggccaccatcatatatttgtcgactcagtggaaagagcgatgtggattggtctttctggttggaggcaaactcttctgaaagtctgagagtcgatgtcgcagtacttgatcagtaccttgttgatagtacaaagaaactcaagagcctcttcccaagttgggcagacttgacagccttcacaacatttttctcaacgtatcatttatgaggaggtcaagtatttgatgttcaacaagtgtaaatcattttctctttgtagccctacgtttcggggctatatgtggttttgtcaccatgatcagctggacctgagccccgaggctggtgtttgtaaaatctttgtaagcgtgccttgatgtattcatgaatcacacaagattgtaagaatctcaagtcagtcataaattttttaccacttagtcattcacgattgacggtatggcatcactgatcattcgtgttctaagtttaaaaattctaaaaagaaatgttgcatcgacatagaagtactgcgtttcattttgtaatcgataccacctgaggtgaaaggtta

SEQ ID NO: 211196 - DNA, 2571 bp, Zea Mays
atttgaagaaactaaaactattgaaactaccatagtttgatagttcctaccctgacaacattaacttcaatggtttcatcaaatgtttcagaagatgatgatccatccttgttggtaaatggtcattttgacagcccgcttggatctcctggtgcagcagactgtggttcttgtgttgcatctatgcttgagctatcacgactcctcattgactctgggtgggtccctcctcgaccggtgattttccttttcaatggtgcagaggaactttttcttttgggctcacatggttttattaagacacatagatggaacaggacaatccgtgctttcatcaatattgaagcttctgggagtgggggtacagatttagtttgtcaatctggacctggatcatggccttctcgtgtttatgctcagactgcaaagtatcccatggcaaacagtgttgctcaggatatgtttggaataattccaggtgatacagattatagaatatttgctgaagacattacaaacattccaggacttgatataatttttgttctcggtggttatttctatcatacttcatatgatacattggagaatctacttcctggaagtattcaagcacgtggtgaaaatttattcaaccttgtgaaggcattcacaaatcctatgttgttaaaagagaacgagatatctaataaagctgctaaggatggaattgaagatgtgggggcggtcttttttgattatttgacttggttcatggtattttattctcgtgatatatctctgattcttcacagtctaccgatagccatttttcttcttgtaccgctgttcctgaagttcccaaacattaccttgatgtcatggtttgtaactctcctaggtttcatgagaggaatggtactccatacgtttggtgtaatccttgcaatatttattcctgctctggctgcagcattaagattattattcacaaagaatgcaatgaattggtttgctcacccttatttggcgttcctaatgtttgtccctacttcattgattggtctattgctgccaaggcttacatgggggctatcggagcaagcacacttttggggtgcttttgggttgtattctttaataactatggtctacacactagctgggctgagtggaggttttctaacatttttcatttccatgtccatgcttcttggacgatttgtctctagaatcattaggaagcagtggagccaacaatcacctaggtcgttggttgcgtatgtgctgcctatgaccccatgtctcctttacggtctttactatggtggattccttatccagttcctgattgaaaagatgggcatgatgggatctcttccaaaaccatatggatattttgtgcctgatgttattgttggagctgtagttggattagtggttggttggtgttttggtcctctatcacctgttgctagtcgttggttgtcgaagacttcaattatccatggcttcctgcaaattacagtggttgctttggctatctcatcccaactgtttccttacagcactggagcaccaaaaagagttgttcttcaacatacttttgttacagatgctaataatatcgtggattcaagctatggtttctctgtggttgattctaactcattggagttccttttcaacaatgcacctgaggccgccaaatggctgaaggataactctgagttgtcctttgaagaaaaatatcggtctgatagaagctcatggttggctttgtatcctgtcccattcttgttctctggaagtttaaaattccaggcacaaactgaagagattaaaaagtactaccagcatttccctcagttagctgttcaggagatctgggataacaatggacagcgaagggtgcatctcaaacttgcacttggttccttatcagaaatttggacctctgtgctcaatattactgggccactatcaaattggtccttcgctgataacatgctcccagctcctcaaactgtaagtggtgggccaccatcatatatttgtcgactcagtggaaagagcgatgtggattggtctttctggttggaggcaaactcttctgaaagtctgagagtcgatgtcgcagtacttgatcagtaccttgttgatagtacaaagaaactcaagagcctcttcccaagttgggcagacttgacagccttcacaacatttttctcaacgtatcatttatgaggaggtcaagtatttgatgttcaacaagtgtaaatcattttctctttgtagccctacgtttcggggctatatgtggttttgtcaccatgatcagctggacctgagccccgaggctggtgtttgtaaaatctttgtaagcgtgccttgatgtattcatgaatcacacaagattgtaagaatctcaagtcagtcataaattttttaccacttagtcattcacgattgacggtatggcatcactgatcattcgtgttctaagtttaaaaattctaaaaagaaatgttgcatcgacatagaagtactgcgtttcattttgtaatcgataccacctgaggtgaaaggtta

SEQ ID NO: 211197 - DNA, 2647 bp, Zea Mays
ctaccctctaggggattctaatgactttggtgttctcccttttacatcatacgacacttatagagaatagaggttgaggaaacacttgttagtggctctttcagcatgatgtttctgcgtcatagagtaacactaggctacaggaatcataaaaatattgtcatgagaagatgatgatccatccttgttggtaaatggtcattttgacagcccgcttggatctcctggtgcagcagactgtggttcttgtgttgcatctatgcttgagctatcacgactcctcattgactctgggtgggtccctcctcgaccggtgattttccttttcaatggtgcagaggaactttttcttttgggctcacatggttttattaagacacatagatggaacaggacaatccgtgctttcatcaatattgaagcttctgggagtgggggtacagatttagtttgtcaatctggacctggatcatggccttctcgtgtttatgctcagactgcaaagtatcccatggcaaacagtgttgctcaggatatgtttggaataattccaggtgatacagattatagaatatttgctgaagacattacaaacattccaggacttgatataatttttgttctcggtggttatttctatcatacttcatatgatacattggagaatctacttcctggaagtattcaagcacgtggtgaaaatttattcaaccttgtgaaggcattcacaaatcctatgttgttaaaagagaacgagatatctaataaagctgctaaggatggaattgaagatgtgggggcggtcttttttgattatttgacttggttcatggtattttattctcgtgatatatctctgattcttcacagtctaccgatagccatttttcttcttgtaccgctgttcctgaagttcccaaacattaccttgatgtcatggtttgtaactctcctaggtttcatgagaggaatggtactccatacgtttggtgtaatccttgcaatatttattcctgctctggctgcagcattaagattattattcacaaagaatgcaatgaattggtttgctcacccttatttggcgttcctaatgtttgtccctacttcattgattggtctattgctgccaaggcttacatgggggctatcggagcaagcacacttttggggtgcttttgggttgtattctttaataactatggtctacacactagctgggctgagtggaggttttctaacatttttcatttccatgtccatgcttcttggacgatttgtctctagaatcattaggaagcagtggagccaacaatcacctaggtcgttggttgcgtatgtgctgcctatgaccccatgtctcctttacggtctttactatggtggattccttatccagttcctgattgaaaagatgggcatgatgggatctcttccaaaaccatatggatattttgtgcctgatgttattgttggagctgtagttggattagtggttggttggtgttttggtcctctatcacctgttgctagtcgttggttgtcgaagacttcaattatccatggcttcctgcaaattacagtggttgctttggctatctcatcccaactgtttccttacagcactggagcaccaaaaagagttgttcttcaacatacttttgttacagatgctaataatatcgtggattcaagctatggtttctctgtggttgattctaactcattggagttccttttcaacaatgcacctgaggccgccaaatggctgaaggataactctgagttgtcctttgaagaaaaatatcggtctgatagaagctcatggttggctttgtatcctgtcccattcttgttctctggaagtttaaaattccaggcacaaactgaagagattaaaaagtactaccagcatttccctcagttagctgttcaggagatctgggataacaatggacagcgaagggtgcatctcaaacttgcacttggttccttatcagaaatttggacctctgtgctcaatattactgggccactatcaaattggtccttcgctgataacatgctcccagctcctcaaactgtaagtggtgggccaccatcatatatttgtcgactcagtggaaagagcgatgtggattggtctttctggttggaggcaaactcttctgaaagtctgagagtcgatgtcgcagtacttgatcagtaccttgttgatagtacaaagaaactcaagagcctcttcccaagttgggcagacttgacagccttcacaacatttttctcaacgtatcatttatgaggaggtcaagtatttgatgttcaacaagtgtaaatcattttctctttgtagccctacgtttcggggctatatgtggttttgtcaccatgatcagctggacctgagccccgaggctggtgtttgtaaaatctttgtaagcgtgccttgatgtattcatgaatcacacaagattgtaagaatctcaagtcagtcataaattttttaccacttagtcattcacgattgacggtatggcatcactgatcattcgtgttctaagtttaaaaattctaaaaagaaatgttgcatcgacatagaagtactgcgtttcattttgtaatcgataccacctgaggtgaaaggtta

SEQ ID NO: 211198 - DNA, 2630 bp, Zea Mays
ctccgctagggtgccgaaggaatctaccctctaggggattctaatgactttggtgttctcccttttacatcatacgacacttatagagaatagaggttgaggaaacacttgttagtggctctttcagcatgatgtttctgcgtcatagagtaacactaggctacaggaatcataaaaatattgtcatgagggtttcatcaaatgtttcagaagatgatgatccatccttgttggtaaatggtcattttgacagcccgcttggatctcctggtgcagcagactgtggttcttgtgttgcatctatgcttgagctatcacgactcctcattgactctgggtgggtccctcctcgaccggtgattttccttttcaatggtgcagaggaactttttcttttgggctcacatggttttattaagacacatagatggaacaggacaatccgtgctttcatcaatattgaagcttctgggagtgggggtacagatttagtttgtcaatctggacctggatcatggccttctcgtgtttatgctcagactgcaaagtatcccatggcaaacagtgttgctcaggatatgtttggaataattccaggtgatacagattatagaatatttgctgaagacattacaaacattccaggacttgatataatttttgttctcggtggttatttctatcatacttcatatgatacattggagaatctacttcctggaagtattcaagcacgtggtgaaaatttattcaaccttgtgaaggcattcacaaatcctatgttgttaaaagagaacgagatatctaataaagctgctaaggatggaattgaagatgtgggggcggtcttttttgattatttgacttggttcatggtattttattctcgtgatatatctctgattcttcacagtctaccgatagccatttttcttcttgtaccgctgttcctgaagttcccaaacattaccttgatgtcatggtttgtaactctcctaggtttcatgagaggaatggtactccatacgtttggtgtaatccttgcaatatttattcctgctctggctgcagcattaagattattattcacaaagaatgcaatgaattggtttgctcacccttatttggcgttcctaatgtttgtccctacttcattgattggtctattgctgccaaggcttacatgggtctacacactagctgggctgagtggaggttttctaacatttttcatttccatgtccatgcttcttggacgatttgtctctagaatcattaggaagcagtggagccaacaatcacctaggtcgttggttgcgtatgtgctgcctatgaccccatgtctcctttacggtctttactatggtggattccttatccagttcctgattgaaaagatgggcatgatgggatctcttccaaaaccatatggatattttgtgcctgatgttattgttggagctgtagttggattagtggttggttggtgttttggtcctctatcacctgttgctagtcgttggttgtcgaagacttcaattatccatggcttcctgcaaattacagtggttgctttggctatctcatcccaactgtttccttacagcactggagcaccaaaaagagttgttcttcaacatacttttgttacagatgctaataatatcgtggattcaagctatggtttctctgtggttgattctaactcattggagttccttttcaacaatgcacctgaggccgccaaatggctgaaggataactctgagttgtcctttgaagaaaaatatcggtctgatagaagctcatggttggctttgtatcctgtcccattcttgttctctggaagtttaaaattccaggcacaaactgaagagattaaaaagtactaccagcatttccctcagttagctgttcaggagatctgggataacaatggacagcgaagggtgcatctcaaacttgcacttggttccttatcagaaatttggacctctgtgctcaatattactgggccactatcaaattggtccttcgctgataacatgctcccagctcctcaaactgtaagtggtgggccaccatcatatatttgtcgactcagtggaaagagcgatgtggattggtctttctggttggaggcaaactcttctgaaagtctgagagtcgatgtcgcagtacttgatcagtaccttgttgatagtacaaagaaactcaagagcctcttcccaagttgggcagacttgacagccttcacaacatttttctcaacgtatcatttatgaggaggtcaagtatttgatgttcaacaagtgtaaatcattttctctttgtagccctacgtttcggggctatatgtggttttgtcaccatgatcagctggacctgagccccgaggctggtgtttgtaaaatctttgtaagcgtgccttgatgtattcatgaatcacacaagattgtaagaatctcaagtcagtcataaattttttaccacttagtcattcacgattgacggtatggcatcactgatcattcgtgttctaagtttaaaaattctaaaaagaaatgttgcatcgacatagaagtactgcgtttcattttgtaatcgataccacctgaggtgaaaggtta

SEQ ID NO: 211199 - DNA, 2637 bp, Zea Mays
ggtttgtggtccttgcacgctgggtgctcgactgctcgctggaatacttctcctaaatagaggttgaggaaacacttgttagtggctctttcagcatgatgtttctgcgtcatagagtaacactaggctacaggaatcataaaaatattgtcatgagaagatgatgatccatccttgttggtaaatggtcattttgacagcccgcttggatctcctggtgcagcagactgtggttcttgtgttgcatctatgcttgagctatcacgactcctcattgactctgggtgggtccctcctcgaccggtgattttccttttcaatggtgcagaggaactttttcttttgggctcacatggttttattaagacacatagatggaacaggacaatccgtgctttcatcaatattgaagcttctgggagtgggggtacagatttagtttgtcaatctggacctggatcatggccttctcgtgtttatgctcagactgcaaagtatcccatggcaaacagtgttgctcaggatatgtttggaataattccaggtgatacagattatagaatatttgctgaagacattacaaacattccaggacttgatataatttttgttctcggtggttatttctatcatacttcatatgatacattggagaatctacttcctggaagtattcaagcacgtggtgaaaatttattcaaccttgtgaaggcattcacaaatcctatgttgttaaaagagaacgagatatctaataaagctgctaaggatggaattgaagatgtgggggcggtcttttttgattatttgacttggttcatggtattttattctcgtgatatatctctgattcttcacagtctaccgatagccatttttcttcttgtaccgctgttcctgaagttcccaaacattaccttgatgtcatggtttgtaactctcctaggtttcatgagaggaatggtactccatacgtttggtgtaatccttgcaatatttattcctgctctggctgcagcattaagattattattcacaaagaatgcaatgaattggtttgctcacccttatttggcgttcctaatgtttgtccctacttcattgattggtctattgctgccaaggcttacatgggggctatcggagcaagcacacttttggggtgcttttgggttgtattctttaataactatggtctacacactagctgggctgagtggaggttttctaacatttttcatttccatgtccatgcttcttggacgatttgtctctagaatcattaggaagcagtggagccaacaatcacctaggtcgttggttgcgtatgtgctgcctatgaccccatgtctcctttacggtctttactatggtggattccttatccagttcctgattgaaaagatgggcatgatgggatctcttccaaaaccatatggatattttgtgcctgatgttattgttggagctgtagttggattagtggttggttggtgttttggtcctctatcacctgttgctagtcgttggttgtcgaagacttcaattatccatggcttcctgcaaattacagtggttgctttggctatctcatcccaactgtttccttacagcactggagcaccaaaaagagttgttcttcaacatacttttgttacagatgctaataatatcgtggattcaagctatggtttctctgtggttgattctaactcattggagttccttttcaacaatgcacctgaggccgccaaatggctgaaggataactctgagttgtcctttgaagaaaaatatcggtctgatagaagctcatggttggctttgtatcctgtcccattcttgttctctggaagtttaaaattccaggcacaaactgaagagattaaaaagtactaccagcatttccctcagttagctgttcaggagatctgggataacaatggacagcgaagggtgcatctcaaacttgcacttggttccttatcagaaatttggacctctgtgctcaatattactgggccactatcaaattggtccttcgctgataacatgctcccagctcctcaaactgtaagtggtgggccaccatcatatatttgtcgactcagtggaaagagcgatgtggattggtctttctggttggaggcaaactcttctgaaagtctgagagtcgatgtcgcagtacttgatcagtaccttgttgatagtacaaagaaactcaagagcctcttcccaagttgggcagacttgacagccttcacaacatttttctcaacgtatcatttatgaggaggtcaagtatttgatgttcaacaagtgtaaatcattttctctttgtagccctacgtttcggggctatatgtggttttgtcaccatgatcagctggacctgagccccgaggctggtgtttgtaaaatctttgtaagcgtgccttgatgtattcatgaatcacacaagattgtaagaatctcaagtcagtcataaattttttaccacttagtcattcacgattgacggtatggcatcactgatcattcgtgttctaagtttaaaaattctaaaaagaaatgttgcatcgacatagaagtactgcgtttcattttgtaatcgataccacctgaggtgaaaggtta

SEQ ID NO: 211200 - DNA, 3382 bp, Zea Mays
cttccattcgcagcagcgggtcacgagaggggtccctacgcccgcctttccaaatcctcgctcgctcgcgacgaccgccggcggcaccgccgaggctgacccgcctctgtccgatgcccccacgcgcgccgccgcgccggcggcctgctcccgccgcgggaggccccggcttcggcgactccgcgcgtgtgctgctcgcgctggccgcgctctacgccgccatgtcgctcctcgcctaccgcgtcatccacatgcgccacgtcgcgccgctcggcgccgacgcgccgcggggaaacttctccgagggacgcgtgctccagcacctccgccgcctcgctgttgacatccctggccgccaggaggggagcccagggttggaggccgccgcgcagtacatcaaaggggagctccagggtctcgccgcgcgtgcgggcccggagtacagaatagaggttgaggaaacacttgttagtggctctttcagcatgatgtttctgcgtcatagagtaacactaggctacaggaatcataaaaatattgtcatgagaagatgatgatccatccttgttggtaaatggtcattttgacagcccgcttggatctcctggtgcagcagactgtggttcttgtgttgcatctatgcttgagctatcacgactcctcattgactctgggtgggtccctcctcgaccggtgattttccttttcaatggtgcagaggaactttttcttttgggctcacatggttttattaagacacatagatggaacaggacaatccgtgctttcatcaatattgaagcttctgggagtgggggtacagatttagtttgtcaatctggacctggatcatggccttctcgtgtttatgctcagactgcaaagtatcccatggcaaacagtgttgctcaggatatgtttggaataattccaggtgatacagattatagaatatttgctgaagacattacaaacattccaggacttgatataatttttgttctcggtggttatttctatcatacttcatatgatacattggagaatctacttcctggaagtattcaagcacgtggtgaaaatttattcaaccttgtgaaggcattcacaaatcctatgttgttaaaagagaacgagatatctaataaagctgctaaggatggaattgaagatgtgggggcggtcttttttgattatttgacttggttcatggtattttattctcgtgatatatctctgattcttcacagtctaccgatagccatttttcttcttgtaccgctgttcctgaagttcccaaacattaccttgatgtcatggtttgtaactctcctaggtttcatgagaggaatggtactccatacgtttggtgtaatccttgcaatatttattcctgctctggctgcagcattaagattattattcacaaagaatgcaatgaattggtttgctcacccttatttggcgttcctaatgtttgtccctacttcattgattggtctattgctgccaaggcttacatgggtatttccttataaacatgggctatcggagcaagcacacttttggggtgcttttgggttgtattctttaataactatggtctacacactagctgggctgagtggaggttttctaacatttttcatttccatgtccatgcttcttggacgatttgtctctagaatcattaggaagcagtggagccaacaatcacctaggtgagaaattcttctgtcatcaatggaggtgtttcccgtagtgcttttgctttaaaaaatggtaacttctgttgcacattgcattgcattgcatttttgacctcttatttgttctatatcaaactgtggatatctcatgttcttgtacttatttaatgttcgttttggcccctgttatgatcagagttgacgattttacatgaaaatatgtcacctatcatcctatactgtagattttttaaacagaatgcctatgctaagcccacatccaaccatgacaatatgtttactttgacatctggtttgaatatctttacttgagaccaataatgtacaggtcgttggttgcgtatgtgctgcctatgaccccatgtctcctttacggtctttactatggtggattccttatccagttcctgattgaaaagatgggcatgatgggatctcttccaaaaccatatggatattttgtgcctgatgttattgttggagctgtagttggattagtggttggttggtgttttggtcctctatcacctgttgctagtcgttggttgtcgaagacttcaattatccatggcttcctgcaaattacagtggttgctttggctatctcatcccaactgtttccttacagcactggagcaccaaaaagagttgttcttcaacatacttttgttacagatgctaataatatcgtggattcaagctatggtttctctgtggttgattctaactcattggagttccttttcaacaatgcacctgaggccgccaaatggctgaaggataactctgagttgtcctttgaagaaaaatatcggtctgatagaagctcatggttggctttgtatcctgtcccattcttgttctctggaagtttaaaattccaggcacaaactgaagagattaaaaagtactaccagcatttccctcagttagctgttcaggagatctgggataacaatggacagcgaagggtgcatctcaaacttgcacttggttccttatcagaaatttggacctctgtgctcaatattactgggccactatcaaattggtccttcgctgataacatgctcccagctcctcaaactgtaagtggtgggccaccatcatatatttgtcgactcagtggaaagagcgatgtggattggtctttctggttggaggcaaactcttctgaaagtctgagagtcgatgtcgcagtacttgatcagtaccttgttgatagtacaaagaaactcaagagcctcttcccaagttgggcagacttgacagccttcacaacatttttctcaacgtatcatttatgaggaggtcaagtatttgatgttcaacaagtgtaaatcattttctctttgtagccctacgtttcggggctatatgtggttttgtcaccatgatcagctggacctgagccccgaggctggtgtttgtaaaatctttgtaagcgtgccttgatgtattcatgaatcacacaagattgtaagaatctcaagtcagtcataaattttttaccacttagtcattcacgattgacggtatggcatcactgatcattcgtgttctaagtttaaaaattctaaaaagaaatgttgcatcgacatagaagtactgcgtttcattttgtaatcgataccacctgaggtgaaaggtta

SEQ ID NO: 211201 - DNA, 3454 bp, Zea Mays
cggtcctccgccccgctgctcggctccgccttcccccaataaaccgcagaaaataaagaagagaaaaattcttccattcgcagcagcgggtcacgagaggggtccctacgcccgcctttccaaatcctcgctcgctcgcgacgaccgccggcggcaccgccgaggctgacccgcctctgtccgatgcccccacgcgcgccgccgcgccggcggcctgctcccgccgcgggaggccccggcttcggcgactccgcgcgtgtgctgctcgcgctggccgcgctctacgccgccatgtcgctcctcgcctaccgcgtcatccacatgcgccacgtcgcgccgctcggcgccgacgcgccgcggggaaacttctccgagggacgcgtgctccagcacctccgccgcctcgctgttgacatccctggccgccaggaggggagcccagggttggaggccgccgcgcagtacatcaaaggggagctccagggtctcgccgcgcgtgcgggcccggagtacagaatagaggttgaggaaacacttgttagtggctctttcagcatgatgtttctgcgtcatagagtaacactaggctacaggaatcataaaaatattgtcatgagggtttcatcaaatgtttcagaagatgatgatccatccttgttggtaaatggtcattttgacagcccgcttggatctcctggtgcagcagactgtggttcttgtgttgcatctatgcttgagctatcacgactcctcattgactctgggtgggtccctcctcgaccggtgattttccttttcaatggtgcagaggaactttttcttttgggctcacatggttttattaagacacatagatggaacaggacaatccgtgctttcatcaatattgaagcttctgggagtgggggtacagatttagtttgtcaatctggacctggatcatggccttctcgtgtttatgctcagactgcaaagtatcccatggcaaacagtgttgctcaggatatgtttggaataattccaggtgatacagattatagaatatttgctgaagacattacaaacattccaggacttgatataatttttgttctcggtggttatttctatcatacttcatatgatacattggagaatctacttcctggaagtattcaagcacgtggtgaaaatttattcaaccttgtgaaggcattcacaaatcctatgttgttaaaagagaacgagatatctaataaagctgctaaggatggaattgaagatgtgggggcggtcttttttgattatttgacttggttcatggtattttattctcgtgatatatctctgattcttcacagtctaccgatagccatttttcttcttgtaccgctgttcctgaagttcccaaacattaccttgatgtcatggtttgtaactctcctaggtttcatgagaggaatggtactccatacgtttggtgtaatccttgcaatatttattcctgctctggctgcagcattaagattattattcacaaagaatgcaatgaattggtttgctcacccttatttggcgttcctaatgtttgtccctacttcattgattggtctattgctgccaaggcttacatgggggctatcggagcaagcacacttttggggtgcttttgggttgtattctttaataactatggtctacacactagctgggctgagtggaggttttctaacatttttcatttccatgtccatgcttcttggacgatttgtctctagaatcattaggaagcagtggagccaacaatcacctaggtgagaaattcttctgtcatcaatggaggtgtttcccgtagtgcttttgctttaaaaaatggtaacttctgttgcacattgcattgcattgcatttttgacctcttatttgttctatatcaaactgtggatatctcatgttcttgtacttatttaatgttcgttttggcccctgttatgatcagagttgacgattttacatgaaaatatgtcacctatcatcctatactgtagattttttaaacagaatgcctatgctaagcccacatccaaccatgacaatatgtttactttgacatctggtttgaatatctttacttgagaccaataatgtacaggtcgttggttgcgtatgtgctgcctatgaccccatgtctcctttacggtctttactatggtggattccttatccagttcctgattgaaaagatgggcatgatgggatctcttccaaaaccatatggatattttgtgcctgatgttattgttggagctgtagttggattagtggttggttggtgttttggtcctctatcacctgttgctagtcgttggttgtcgaagacttcaattatccatggcttcctgcaaattacagtggttgctttggctatctcatcccaactgtttccttacagcactggagcaccaaaaagagttgttcttcaacatacttttgttacagatgctaataatatcgtggattcaagctatggtttctctgtggttgattctaactcattggagttccttttcaacaatgcacctgaggccgccaaatggctgaaggataactctgagttgtcctttgaagaaaaatatcggtctgatagaagctcatggttggctttgtatcctgtcccattcttgttctctggaagtttaaaattccaggcacaaactgaagagattaaaaagtactaccagcatttccctcagttagctgttcaggagatctgggataacaatggacagcgaagggtgcatctcaaacttgcacttggttccttatcagaaatttggacctctgtgctcaatattactgggccactatcaaattggtccttcgctgataacatgctcccagctcctcaaactgtaagtggtgggccaccatcatatatttgtcgactcagtggaaagagcgatgtggattggtctttctggttggaggcaaactcttctgaaagtctgagagtcgatgtcgcagtacttgatcagtaccttgttgatagtacaaagaaactcaagagcctcttcccaagttgggcagacttgacagccttcacaacatttttctcaacgtatcatttatgaggaggtcaagtatttgatgttcaacaagtgtaaatcattttctctttgtagccctacgtttcggggctatatgtggttttgtcaccatgatcagctggacctgagccccgaggctggtgtttgtaaaatctttgtaagcgtgccttgatgtattcatgaatcacacaagattgtaagaatctcaagtcagtcataaattttttaccacttagtcattcacgattgacggtatggcatcactgatcattcgtgttctaagtttaaaaattctaaaaagaaatgttgcatcgacatagaagtactgcgtttcattttgtaatcgataccacctgaggtgaaaggtta

SEQ ID NO: 211202 - DNA, 1417 bp, Zea Mays
tgtacagtgttctccatatgaacaagggtctcataaaggtttacactagcatcaagataagagtcttttttcgtcaaggtcactgagtggccatctggggttctcacttcatatataccttagtatatagataatgtcgtaacgcatgagcacttagctattattaataatttgtgagccgttgcaacgcacgggtacctatctattatgatggcgaggacaactccattgccgctaagagtcaaatcaagtttgagacatgacttcaagttcttgaaggtagagaacttgggaaatcaattggttcaacaaaaaggaaagcccaagatagaagtgtatgaaaaggacaggaagaagggtgctggggctttaacaactcatgctagggttcagtaatgttcttccaatactactagcatatgttcaaagtcaccaagctcctgacaagccagttctgtggattacccataatgcaaaaagttttgatgtccctttccttaaccaagagtttgacagaagttcagcccaggttcctgaagatcatttggctatttgtcgatagtctttgttcagtgaaaaagtcgaagaaaacaaaaggcgataggtttctgtcacaagtctaatcatacagtaattagaaagtgtttctgtcacaagtctttcttcatgcaggcggtcggacttgggtacaaatctgtagcacactttctaattgccaagcataataacaaacaagtgcccactgatatagtgcgagagccagagcagcacgcctttgcacagattgttagcttcttaggtacttttgatatctgattacagcagtcgataggttgagagtttgttgcttcattcatacacgcgtctaaggttggatcgctcatgttccttcaaaagctcaatggtattcagaagtcagtaggtcagaatggtgcagttgaacctgatacatcatgagatataataacgtcagtggatttgtgggaagatggtggctcagatgatggatatgtacttgttaagcaggaggatgttgttgatgagatgacttcatttatggctgcatgcttggtgtcaattaaaaagaccaaggacctgccccctgatcaacttcaaaaagcgcttaggaagacgttttcagctgaaaagaagaaaagtaaaatccggaaggcattggatggaactaaagtcatttataatgttgcttcatggggcgccactgctgttggcagcataaagcttgagaccatttgtttagtctatgcagatgagttcgactgctaattagcagcgcctcccagtcaaaagcagcatgtgtattgtataactgtaaatattgccttgatttgaacaaacttgttttttgtgctagaactttatttcacgaacttcatatgatagaccctactgtagagta

SEQ ID NO: 211203 - DNA, 4191 bp, Zea Mays
gttccttccgtcgcaaatgtgctgtgtccctcttcatcctcctcctttctcagtcacatacacgggagctgtccacgccggccttcccccctaccaccacataaatccgcgcctactccgcaccatcttctctgctcaccacgcgcctccaagatttggacgtatgctgataaaaaccggtctggttttcttgggcgtgaagacttcttcaatgcactcaaacttgtcacagtagctcagagcggccgagaattgacacctgatattgttagatcagcattattcggcccagctgctgcgaaaatccctgctcctcggataaatgtttctacagctgctcctcaggcaagtagcgtagctaacctcccgaatgccactcaagcaccaggtcctgttcagcagactcctgtcgtaagagggacacaagggcttcctggtatatcgtcaaatccacaagtcaggccaccacaacctccaaatgcaaacactgcgccccctgctcatggtcagggagttgcctcaaggccacccgtaggaagtggtcccactgggataaaccatactagctcaaccacaccaagtctagcaactgattggttcagtggtaagagaagtgcaagtccgttgggtgcaacttcacaaactccaacaagaggtatttctccacaggccaaccttagcagtgcgggaatctcagtgcagaattcagctcctgtaccaggctacaattctcatacaccaggtgtcaatgcaatttcaacaaatttgaacgtgatgtcttcccaaccatcagtcaatgactccaaggcgttggtgccattgggtaatggattgtcgtcaaactcaacttttggtgctgaccctttctctgcaactccacgaccagaacagggttcaccttttccccccaacgttccaaacaatctgctcagctctacccctcctgcctcagctgctggacatcatcaccctcctaagccaatgcaggctggtcctgtgcagagtatatcctcgctttctcctcatactagccagttgccacacaatcagccacctccgaggcaacaacaatttaatgctacaccaagtgctccaggaccagtgagttcaaatattcccactggacaaattccttcaagcccaagccagcctcaggcaccatggccgaaaatcactcaagtagatgtcagaaaatacatgattgtatttatcaaggtagacagggatcgtgatgggaaaatcactggtgaagaggcaaggaatctatttttaagttggaggcttccaagagatgtcttaaggaaggtgtgggatttgtccgaccaggataaggatgggatgctatctttcaaggaattttgtattgctgtgtacttaatggagagacatcgagagcaccgtcctcttcctgacacagtaacagatgctatttgggctgagggcaccgcactaccctctactggacagtttgcagaaaatcctagtgcccccgctcctcaagcaagtgccggtattcatccaaatttctgttattttttattactgacttttaaggaagtaacttctcaatgatgttgttttaccgaacacttgttgaaggatatacaagtagaacaatgcaaggaccacatcatgggatgcttccctcatccatgaagccaccatctcggaggcctcttcctttagatgctgacgatactattaagccagagcaacaaaagccaaaggtccctgtcttggaggaacatctagttggccaactaagcaaggaggaacaagatacactggatgcaaagtttaatgaagcttcagtcgctgataagaaagtccaagagttggagaaggagatccttgattctagagagaagaccgagttttatcgcacgaagatgcaggagcttattctttacaaaagtaggtgcgacaataggtttaatgaagtctcagaaagtatgtctgctgataaacgtgaggtccaatctctttctgcaaaatatgatgagagatgcaagaaggttggagatgtggcatcaaagctaacaatggatgaggctactttccgtgagatccaggagaagaagttggaaatttataacgccatagttaagctgcaaaaaggggatgatagcgatgagaagtttcaggagcgggctaataagatacagtcagatcttgaggagcttgtgaaatcattgaatgagcaatgcaagagatatgggttgagagctaagccaactactttagtggagcttccttttggttggcaacctggaattcaagagacagcttatgcatgggatgaagaatgggataattttggagatgaaggattctctataataaaggaactaacagttgaagtggagcctcccgttgtagcaaagagtcagcctactgaggatgttaaagcatcttcaaatggggcatcaacagaaaaagaagacaacaagggtgataaatctgctgctgctgtggagcaggttgtcaaacctgaaacagcaccttcgaatatcaaaccagagtcagcaaaaagtcctccagttagtcctgtcaagaacaaagaggatggtcccgatgaacatgataaaaagcaatctggaacaaatgatgtctcaccacgtgagagtatcagcaaccgtggagcaatggattcccctactcatggagataaaacccatgatggacactcatggggcatggataatgactccctatggaactttgatcataaggagggtgagaatggtgattcagatctcttctttgggccacaaggccttcccccgataagaactggaggttcctcatctggtaattcagttgtcaaggaacagaagccgttctttgattctgttcctggtaccccagtggagaaatccgtctttgattccatcccaggcacgccatttcagaaatccgtctttgattctatcccaggcacgccagttcagaaatccgtgtttgattactctgtccctagcacaccgatgcagaactcagtctttgattattctgtcccaagcacgccgatgcagaagtcactctttgattctgtccctggtacaccggtgcagagatcagttttcgattctgttccgagcacaccaatgcagagatcagtttttgactctgttccgagcacgccgacgcagaaaccattcttcgactcctttccaagcacaccaatgcagagatcactgttcgattctgggccaagcagagcagaatctcctaccgccagcagcatgtatggcaaagagcagaagggattcttcgattcttcagtcccgagtactccaatgtacaactcaagcttcacgccaaggtatagcgaagcaggagacgattcattcgacaccatgtcccaatacagctcatttggcatgcacgagagcaattcctttggacagcgcgacagcttatcgagattcgattctttcagcagcaatgctgacaacggtgggaatgacacttttgcgaggtttgattctttccgcagcacttcagatcagggtgggggcaacagcttcatgaggtacgattccatgaacagcagcagcgaccatgacgggatcggcacgtttgcgaggtttgattcgatgaagagcagtaactacaacagccggggctactcgttcgacgacgaggacccctttgggacagggccgtttaaatcgacagagaccacgagccacagcccgacaaaacatgggacggacacatggagcgcgttttgacaggcaggggctgtatcatatattcaatagaggtcatgcgcttgtgcaccttactgcagatatatacacacgtacaggggcaagacaattttttgttgtgtgcatgggcctctgctccaacacacctggggaaggggaagggatgggacggggatttgcttgtgtgcttgctttgtgtttaattttgtacgtaggctgggaacatgtgtttggtgggatgatgatgatgatgctgctgctgctgcttataaactcaacattctttataccttgtattgtacaagtgcatgtacaagatgtgagtcgacccgtttgggttgagtaactctcgagtgttttttcttccatggtgtagcgttttcctgtttctccagaattttctgagcaatgtacagacagacaaacttttgtgtgaaacacctgttgtccaatactgagacccttccattcgttg

SEQ ID NO: 211204 - DNA, 4168 bp, Zea Mays
cggagtcggaggcacccgcaccgcacgccgacccgcgcacactcccccgcggccgcgcccccgatctcgccgggccggtggccctcgccgccggcgacacccaccgcccaatcgcccacgcccggggggcgatggaggcggccttcgacgcctacttccgcgccgcagatctggaccgcgacggccggatcagcggccaggaggccgtcgccttcttcaagggctccggcctgccccagcccgtcctcgcgcagatttggacgtatgctgataaaaaccggtctggttttcttgggcgtgaagacttcttcaatgcactcaaacttgtcacagtagctcagagcggccgagaattgacacctgatattgttagatcagcattattcggcccagctgctgcgaaaatccctgctcctcggataaatgtttctacagctgctcctcaggcaagtagcgtagctaacctcccgaatgccactcaagcaccaggtcctgttcagcagactcctgtcgtaagagggacacaagggcttcctggtatatcgtcaaatccacaagtcaggccaccacaacctccaaatgcaaacactgcgccccctgctcatggtcagggagttgcctcaaggccacccgtaggaagtggtcccactgggataaaccatactagctcaaccacaccaagtctagcaactgattggttcagtggtaagagaagtgcaagtccgttgggtgcaacttcacaaactccaacaagaggtatttctccacaggccaaccttagcagtgcgggaatctcagtgcagaattcagctcctgtaccaggctacaattctcatacaccaggtgtcaatgcaatttcaacaaatttgaacgtgatgtcttcccaaccatcagtcaatgactccaaggcgttggtgccattgggtaatggattgtcgtcaaactcaacttttggtgctgaccctttctctgcaactccacgaccagaacagggttcaccttttccccccaacgttccaaacaatctgctcagctctacccctcctgcctcagctgctggacatcatcaccctcctaagccaatgcaggctggtcctgtgcagagtatatcctcgctttctcctcatactagccagttgccacacaatcagccacctccgaggcaacaacaatttaatgctacaccaagtgctccaggaccagtgagttcaaatattcccactggacaaattccttcaagcccaagccagcctcaggcaccatggccgaaaatcactcaagtagatgtcagaaaatacatgattgtatttatcaaggtagacagggatcgtgatgggaaaatcactggtgaagaggcaaggaatctatttttaagttggaggcttccaagaggataaggatgggatgctatctttcaaggaattttgtattgctgtgtacttaatggagagacatcgagagcaccgtcctcttcctgacacagtaacagatgctatttgggctgagggcaccgcactaccctctactggacagtttgcagaaaatcctagtgcccccgctcctcaagcaagtgccggatatacaagtagaacaatgcaaggaccacatcatgggatgcttccctcatccatgaagccaccatctcggaggcctcttcctttagatgctgacgatactattaagccagagcaacaaaagccaaaggtccctgtcttggaggaacatctagttggccaactaagcaaggaggaacaagatacactggatgcaaagtttaatgaagcttcagtcgctgataagaaagtccaagagttggagaaggagatccttgattctagagagaagaccgagttttatcgcacgaagatgcaggagcttattctttacaaaagtaggtgcgacaataggtttaatgaagtctcagaaagtatgtctgctgataaacgtgaggtccaatctctttctgcaaaatatgatgagagatgcaagaaggttggagatgtggcatcaaagctaacaatggatgaggctactttccgtgagatccaggagaagaagttggaaatttataacgccatagttaagctgcaaaaaggggatgatagcgatgagaagtttcaggagcgggctaataagatacagtcagatcttgaggagcttgtgaaatcattgaatgagcaatgcaagagatatgggttgagagctaagccaactactttagtggagcttccttttggttggcaacctggaattcaagagacagcttatgcatgggatgaagaatgggataattttggagatgaaggattctctataataaaggaactaacagttgaagtggagcctcccgttgtagcaaagagtcagcctactgaggatgttaaagcatcttcaaatggggcatcaacagaaaaagaagacaacaagggtgataaatctgctgctgctgtggagcaggttgtcaaacctgaaacagcaccttcgaatatcaaaccagagtcagcaaaaagtcctccagttagtcctgtcaagaacaaagaggatggtcccgatgaacatgataaaaagcaatctggaacaaatgatgtctcaccacgtgagagtatcagcaaccgtggagcaatggattcccctactcatggagataaaacccatgatggacactcatggggcatggataatgactccctatggaactttgatcataaggagggtgagaatggtgattcagatctcttctttgggccacaaggccttcccccgataagaactggaggttcctcatctggtaattcagttgtcaaggaacagaagccgttctttgattctgttcctggtaccccagtggagaaatccgtctttgattccatcccaggcacgccatttcagaaatccgtctttgattctatcccaggcacgccagttcagaaatccgtgtttgattactctgtccctagcacaccgatgcagaactcagtctttgattattctgtcccaagcacgccgatgcagaagtcactctttgattctgtccctggtacaccggtgcagagatcagttttcgattctgttccgagcacaccaatgcagagatcagtttttgactctgttccgagcacgccgacgcagaaaccattcttcgactcctttccaagcacaccaatgcagagatcactgttcgattctgggccaagcagagcagaatctcctaccgccagcagcatgtatggcaaagagcagaagggattcttcgattcttcagtcccgagtactccaatgtacaactcaagcttcacgccaaggtatagcgaagcaggagacgattcattcgacaccatgtcccaatacagctcatttggcatgcacgagagcaattcctttggacagcgcgacagcttatcgagattcgattctttcagcagcaatgctgacaacggtgggaatgacacttttgcgaggtttgattctttccgcagcacttcagatcagggtgggggcaacagcttcatgaggtacgattccatgaacagcagcagcgaccatgacgggatcggcacgtttgcgaggtttgattcgatgaagagcagtaactacaacagccggggctactcgttcgacgacgaggacccctttgggacagggccgtttaaatcgacagagaccacgagccacagcccgacaaaacatgggacggacacatggagcgcgttttgacaggcaggggctgtatcatatattcaatagaggtcatgcgcttgtgcaccttactgcagatatatacacacgtacaggggcaagacaattttttgttgtgtgcatgggcctctgctccaacacacctggggaaggggaagggatgggacggggatttgcttgtgtgcttgctttgtgtttaattttgtacgtaggctgggaacatgtgtttggtgggatgatgatgatgatgctgctgctgctgcttataaactcaacattctttataccttgtattgtacaagtgcatgtacaagatgtgagtcgacccgtttgggttgagtaactctcgagtgttttttcttccatggtgtagcgttttcctgtttctccagaattttctgagcaatgtacagacagacaaacttttgtgtgaaacacctgttgtccaatactgagacccttccattcgttg

SEQ ID NO: 211205 - DNA, 3858 bp, Zea Mays
cctgttttcgctgcaacttcccaccaccgcctatatccgcgttccccccgggcgatcgatcgatcgcggctaacctcgccgccgcccccatcgaggcagccatggcggagatggccgaacggtccgtcgcgggcgagctgccggaggagccgcggccgccgcacggggaggaggacgacgaggaggaagaggagggggacgtgtgccggatctgccgcaaccgcggcgacgaggaccacccgctgcgctacccgtgcgcctgcagcggaagcatcaaattcgtgcaccaggactgcctcctccagtggctcgaccatagcaactcgcgccagtgcgaggtctgtaaacatgcattctccttctcacccgtgtacgctgataatgctccgacaagactccctttccaggaactgattgttggtgttggaatgaaagcatgccatgtgtttcaattcatccttcggcttgcctttgttctctcagtttggctcatgattatcccattcattacctattggatttggcggttaacattggtgagaagtattggtgaagcgcaaaggctgttcctcagtcacatcagtgctcagttgattcttagcgattgccttcatgggttccttctctcagctatcattgtccttatatttcttggagccacctcattacgggactacataaggcatttgcgtgaacttggtggacatgatgctgagagggatgatggaggtcgtgaaaggcatggtgctcgggctgtcaggaggctagctggtcctaataatagggttcctgcagatggaaatattgatgaattagcagaagcccaaggaatcggtgctggtgaacttttgaggagaaatgcggaaaatgttgctgctcgattagaacgacttgaggctcaggtggagcagatgcttgatggtctggatgatgctgatggagcagaggacgttccttttgatgaacttgttggtatgcaaggccctgtcttccacttggttgagaatgcaataacagttttggccagcaatgctatattcctcattgttgtgatctttgttccattctcattgggaaggattgttctgtactacctatcatggtttttctcttcggcttctactcctatgctggcaaaaatgatgcccttcacagaaacagctatttctatagctaatgatacattaaagagcgcacttaatgttgtgaagaatttttcttctgacagtaataatgaaggtgttatcgggcatgtgattgaggttgtaactcaatccttgaagataaatgccactggtctgagtgtaattcaagtcactgggaagagcagtctgatgaaaggaacagcaattggctcatcttatctttcggatctgacaactcttgctgttggatacatgttcatcttctgtcttgtacttttgtacatcggatcactggctttacttcgatatgccaggggagaacgtttcaccatcggaagactctatgatgctgggcacaacaattgcgcagaggattgaattctttacagtgtcacccttagcgagctcatctatccattggctagttgggattgtgtatatgctccaaataagcatatttgtcagccttcttcgaggggttctgcgcaatggagttctttattttctgcgggaccctgctgatccaaattacaatccatttagggatttgattgacgatcctgtgcataagcatgcccgacgagttcttttgtcagttgcagtgtatggaagtttgattgtgatgttggtcttcttacctgtaaaactggccatgagagtagctccttcaatttttcctctggacatcaccatatttgatccatttactgagattccagttgatgtccttctgttccaaatatgcatcccatttgctattgagcatttcaagcctcgtgcaaccattaaatctcttctgcatcattggtttgctgtggttggttggggccttggcttaaccgatttcttgctgccaaaacctgaagaaaacggtgggcaggaaaactggaatggcagggcagaaaggagagacaggggacatggtgggcaggaaatggttgccccacaggttgaacaacttatgatacaacatgttgccgcagaacataatgacaggggaaatgcaaatgaagccaatgatgtcactgaagaatctgatgtagatgatcagggagactctgagtatggctttgtgcttcgcatcgtgctcctgcttgtactggcatggatgacactactaatattcaatgctggaatgatagttattcctatctcgcttggccgtcttgtttttgagggtgttccgcgcctgccaatcacacatggcattaagtgcaatgatctgttctcctttagcattgggtgctatattctctagagtgttgcagctgggaccagatatgccattgattacatcagatcacgacagctgggatttctggttcaacagatctgcaagtggtgctcaattgttttgaagagctcttttctcttgtcaatatggatctttgttattcctgtgctgattggacttctttttgagctgctggtcattgtacccatgagggtgcctattgatgagagccctgtcttcttattgtaccaggattgggcactggggttaatattcttgaaaatatggactagactggttatgttggatcagatggcacctttggttgatgaaagctggaggtcaaagtttgagagagttagagacgatggcttctcccgtttaaggggtctgtgggtcctccatgaaattataatgccgattctcaccaaactccttaccgctctctgtgtcccatacgtccttgcaaggggcatcttcccggtgctgggttacccactcatcgtgaactcagcagtgtatcgctttgcctggcttggatgcctgatcttcagcgcactcttcttttgtggaaagaggttccatgtctggttcaccaacctccacaactccatcagggatgaccgctatctgattggccgaaggctgcacaactttggtgaggacacacccgagccgagtgaatctggagcaactatagggtcagatgaccaggaccaagctcttgtcctgcgagatcaggaagaggaagtggggttgaggatgaggcgcaataatatgcgtgcaaaccaacaacccaggctggctttttaagaaggagatagttttggatatagagctcataaccatggtataagctttggcctgcagcttctgcttgtgctttgtaatgggcgttgtagagggggtttatgtggttgcgataggaaagagtctaaggactgttctacgacaagtctgggagaaagctaaagtggttagtgattataagaactggtggcaactccctttcctgtggtagtcttggctgactgtaaatatcgtttgacagacactaccaggccaactcagtttgttgtttcttgtaatgactaatgaattaagttgaactgttgggtagatataaggtactaggttgtatgacttccaccacttccaccattttttttgtcatctttgtttcttggcaaccgcagtatagcattctatttgtgtcaaggagcatactggtggacaattgcttcccatcaccagcaaagataatatgaagcctcggaacctaagaagcttcgtcaacgaagaccctcaggactcgtcgacccttgcctcttcagtattgtagcgttaaaatgagctatatactagtagttcaaggttagttagcacttcatgggagggttagaaagcgaggacttctataaataccatttggcatgtactagtatgaaaaactatcatctaattgagtttaaattttat

SEQ ID NO: 211206 - DNA, 2163 bp, Zea Mays
gttccttccgtcgcaaatgtgctgtgtccctcttcatcctcctcctttctcagtcacatacacgggagctgtccacgccggccttcccccctaccaccacataaatccgcgcctactccgcaccatcttctctgctcaccacgcgcctccaaggatgggcgcacggatttagctgatcccgtcgctgctcgcgcccgatctcgcggcgccccgccccatcagctccgcgagatgatctgagccccgcgatctggtggagaaatggagccgccgccggatctgaacacccacctgccgccgcggaagcgcctgctcgccgggctcaggacggcagccaccgccgccgagccgctaccgccgccgcccgcccacgccgacctcgccgcccgcctccgcgagatggcgctcgccgccaacgcgtcggcgtcctcgcccgaggagacgatcgaggcggcgagggcggccgcgcaggccgccgcggacgccgccgttgctgcgcgcgccgtggccgccgagaaggccgccgtcgccgcgaaggctagggcggccgcgcgcgccgccatggagttcatcgactccttctctaccagggccggcgcgtccaggaacgggagcggcctccagttcaagatcaggtctaggaagaagcatgtccaggtcaagatgctgtacaggcccaatggaaccctagggccagcggaggctcccaagcctaggagacgcaagcagtcggatgaagaggtcccgcacaatttgcaccgcctcatgaatagctcgccgaggatctctcacgctggactgcccaagaggcctcgcacgaccgctgctggggatgccaaaaatggagctgtagcacccggtggaggtaacggcgctggtgtttgtaacggttcttcagttcaggtgccgacggaggctggcggttggttgggtaatggatgctctgaggcgaaatctcatgagagaaccgttccattgctcaaccacgaggtctctggtgaagactcatccaggcacgccgcgaagagtagcggcggcattgctgacaacggagtcggggttgggaactcgagtgctggtcagaaagtgaaggtcaagaggaaggagctgctcctgaatcaaaataccggtaaagaaagagaagaaccagaagaggccacacaaacagagccctttgtacgttctatcacgctcgatgaatcgaaaccaaactcaaaaggaaaaggaaggtcaaacccaaatgggaatggaacagaaaggcttgcaggccctgcagatacgaagggccgtggcgaaggcgtgacgccaccgaagataacttccgtatggaagatcaagaagctgaagacatctcactgctcttccgacagcaaggtgctgcacaaggtctgcgtgccgcctcctacggcggctgagacctctgcttcggtgaaagctgattagcgaggcaccatagcgtatagttcggcggatgcatgtcttagctacgcttgttgtgaggtttttgtatgttcaagttgctactcggacgaggagggaaagcggagatcgttttttataccgatcacaatattcatgggtggctgaacatggaagggccattggaattgcaagatgttagatcctatttgttttcacatgtgagtatattttgtgatggtgatgagtgatgactactgtcttgagggcgccctgcatgttgtggcacctgcaccatgtgtaaccagattaccagaattcagttgagtgtttgtctgtgtttgatgccagcaccatggtgtggctggagaagacaccatgcctagcttagctagtaccagaattcagttgacttgtgataacctggtggtgataggaaagttgggagcagcatgggtactgttgctggtatggcaagcatgagtgatggtggtggacctggtggccacaggtgcacctagattttttctctcttctgctgctgctgctggtggatctagcacagatgatgcatactcctacatgattgctactccctctgtctgaacaaaatgacgttctagttttctccaggaaattacagattatctcatgtttgacaaaaaaaacaagacaaattatcttatgtttgaccaagtattacgctaaattgaagtggagcatggataagatgtgggatgctgg

SEQ ID NO: 211207 - DNA, 2787 bp, Zea Mays
aatccatgtccagctagggctgccaatcgacagtcccgaggttagcagcatgcggagatggcaagtgctggcagctgcaggcaggcacatgtaagtatggcggcggatcgatagctggggtgagtgcgaagcacatcccaccatggcgccatcccttgccgacctctcccgagagctctgcgcagccgtcgtcaaatccaccttccgcccccacctctccctcctcgccgcctcgccatcccttctcaccgccgtcctccaccgcctctccccgctcccctccgctgcgctcgccttcttccgcgcgctgcctccgccgcacccgctggacgcctcgctcgccgtcctccgcctcctggcgccgcacccgcgccaccacaccgccgcgcgggccctcctccgggacctctcccttcgccacccgctctcctccccgctcctcctcccctccctcctcgccggcccccacgtccccagctggctcgtcctcgtcctcgcccagtcagcgcgcccccacgacgccgtacgggtgttcgaccacatgcgcgcgcgcggcctcgcccccgacgcccacgcctgcaccgcgctcctcacagcgctcgccagggcccggatgacggccaccgcgcgcagggtgttcgacgaaatggccagggcggggctcgccgccaccacgcacgtctacaacgccatgctgcacgtgtgcctcaaggccggggacgccgcgcaagccgaggcgatcgtcaccaggatggacgcggccggcgtgaccttggaccgattctcctataacaccgtcatcgccctctactgccggaaggggatggggtacgaggccatgtgtgcgcgggaccgcatggacaaggaggggatacggccggacactgtcacatggaactcctccatccatggcctgtgcaaggaaggcagggtgaaggaggcggctcagctcttcacggaaatggttgcggcacaggcgacaccagacaatgtcacctacaccacactgattgatgggtactgccgcgcgggcaatgttgaggaagctgtcaagctccgagggagaatggaggccgcagggatgctcccaggggtcgccacttacaatgccattctcaggaagctctgtgaggatggcaacatgaaggaagtccatcggttgcttcatgagatggacgggaggaaggtgcaggctgatcatgtgacctgcaacacgctcatcaacgcctactgcaagagaggcgacatgacctcagcatgcaaggtcaagaaaaagatgatggagtctgggctgcagctcaatcacttcacttacaaggctctcatccatggattctgcaaggccagggagcttgatggagccaaggaagccttctttcagatggtcgatgcaggtttttcacccaattatagcgtattttcatggcttgtcgacggtttctgcaagaagaacaatgcagatgcagtgctagccatccctgatgaacttatgaaaagaggccttccaccagataaagcggtatatagatctctgattcgaaggctttgcagaaaagggctggttgatcaggcacaaagagtatttgaccagatgcaaagcaaaggcttagtcggtgacagtcttgtatatgccacactcgcatacacatacctgacaaaaggaaacccaactgccgctttgaataccttggatggtatgacaaagaaccaattgtacataacaccccagatttacaactgcctgtgtacttcttatgctgatgagaaggaaaccctcaatatgctgtgggttcgtgctattgagagaggcctaatcaagaagagcgtgtacaaactgatgcacgaagcaaggctggaatcaacaaagcttacagttgagactgggtgatatgctcctgtttcaaggccagactatctaggggctacacttgatacttgaatacaattggattcaggacattcaggatgcaacctctgtttgtgttttcactgaataccttgatatttgggatatgttatctgggactgtactgcagccaggtgaagatactcattgctggcggctttcagcttcgagacagtactcggccaaatcagcttatgaaaacttctttcaaggctcagttcaatttcagcgatgggagcgaatatggaagccatgggtgccaggcaaatgccatttgcttctttggttggtggtacataaacggtgctggatatgtactagcttgctctacaaagtttgccgcatccagtgtgctgtcctcactgtgatcaggtcgatgggacaagtgatcatcagctcactaattgtgcgtttgtgagacattttgggttcaatctcctgcggggatttggccttcgaggtctgtcaccttctgttgaagatagatcctttgattacgggccagctaacggaccagtgcagaaatacctcaattttctgagcctggagccctggactctggaagcatcggaatctccatgtttttgatggtgctgccccagaaatggcaggtgtattgcttgctgcttgaggaggtacaactttgggtaatggctggagcccatagggttttccctcttgagttaccttacacctattgattatgcttcgattatgatcattagtatttcagtcacagactcacatgcatggatgtaaagctaagaattcactttccaaattcaaaagccactcaatcacaatcagcttgttgatgagacacaaatcaaacattcaaactttttttttttgcaatattcagttctgtaagaagtaggtag

SEQ ID NO: 211208 - DNA, 3121 bp, Zea Mays
atgctgttgtggcgagtgctgctccggcaccggcggccgccgttccccgtccacgccgccggattcttcaccagctccggaagcaacaccactgcgcctcctcctgctggagcggaggggctccgcgacgagccgggggaggagggctccctggcgcggcgggtggagcgggcggcgtcggtcggcgcggccatgcggggctggatggcagacggccgcgccgtgcaccgtggccacgtattccacgccatcaaccgcctccgacgacaccgcctacaccgcaccgccctgcaggtgttctgctgatttctgtacttgttcacgatgtggtggaaagcttatttgaatggtggtcatggaatggatcgtgagagagaggccctacaagctgagtgagcttgattactcgtatctgctggagttcacagctaaagtccatggcatttctgaagccgaaagcctcttccttcgcgtgcctcaggaatgccggaaagagctcctctacaacaaccttgtcatggctgctttagatctgaatcacattaagcattcatacgcttacatgaggaagatgagagaattgtccctgccgatctcgccgtatgtttacaaccgcctgatcatccttcactcatcacccggtcgcaggaaaactatatccaagatcctttcccagatgaaagctgatcgtgtggtccctcacacgtcaacctacaacatcctattgaaaatacaagccaatgagcacaacattgatgggctagccagggtgttcaatggtatgaaaagagcaaagattgagcccaatgagatcacttatggcattctagccattgcacatgctgttgcaaggctatatactgtttgccatacatatgtagaagccattgagaattccatgacaggtactaattggtccacgctggaaattcttcttatcctgtatggataccttgggaaggaaaaggagctaaagaggacatgggagatcatgcaagacctccctcatattcgatccaaaagcttcacactagcaatcgaagcatttggaaaggttggctccattgaccaggcagaaaagatatggatccatataaaatcaacaaagaagttaagccttacagaacagtttaattctatgttatcagtttactgcaggcacggtgttgtcgataaagcatcatctgtattcaaggaaatgagagcaaatggatgccagcctaatgctattacttatcgccacttagcattgggttgcttgaaatcaggtcttgttaaagaagctttgaacacaatagatatgggaaagaaggaagtcgtcactaaaaaggtgaggagttcaacaccatggttggagaccacacatctgttgcttgagaactttgcagaaattggagacttggaaaatgcaaagagactgtacagtgaactgaatgaatccaaatattctctgaattcctttgtgtataacaccctcctgaaagcttatgtgaaggcaaaagtttatgagccggatttgtcgaggacaatgattttgagaggggcaatgcctgacgctgagacatatagccttctcagactgattgaacaattcaagatctaatgctctatgtgtgttgttgctttgaaggaaaaccagtaaaccactgctggattttgtcatgcaaaaaccattagagatactgtggacagcgtgttgcattctggcaatcaaattttttttgcacagtaatcccaacttccgcactaatcaattggagatatgcagctatcttttctatcataaacaattttagaactgcaagatatacaattcttgtgcattccgaattttggaaatgttcctttttctcatgcagaaggcacccaaacaataaaggaggccaattgtcttttatcatgccacaaagaggtgatagaaatggtgaatatttaattgtgttgctactggtaagtctttgcagatccttgctcctgcgacacttctaaggtgctaggctgctagctatacttatgagaaaacagtagaagcatcctccacacaagctttgccagaaccaagctgaataaacacaagtgctattctctggttgcagaactgaacagaactccattctgccttttgcctatacacaaatcaaatatgctcaaatcatccacgcggaagggtagtgaatggaatcggaaccaacacaaagcaaatttcaccgatgatgtgaacttgccaaccataccaaataatttgccgttgagcttgacaattccctttgctgttgagcttgtttcttgagcagatactgttcagctgcgaggataaaggaacctggaaatttccgtggagaaggctccaacttttttttttctacctcatcaattagtttaactacattgggattcaggttagaagtctacatactggttaagtgctcatccgggtacaacatcgtgttttttttctttgaacttctgttgctcttttagagcttgtagtttgatcttgtggaccttctacatctgcttgctttataaataattctgcaccaagctgttcttgttctccagtagtgagatggttttccgtaagaaaatgtgaacagctagtgggtcacaaagaatgccatcagcattatcatgaggctgtgtggtgggtgcagtgtttctgaatgttcaggttggcaaatggcatacgaatggaaaatgccccactgatttgatcaactccatctgccatataaatctcttttgggctgattataggtgtgagtgctgcatgaaaggttctgctgaaattaggagcccttttctcttttttgagcctgacaccggttgtggcaattttatgtgctaataaatagccagtggcataacaaggcaacatggttttttttttggtatggttactcttgtgctgctcagtcacagcgacattagcaattggagcagaaacagagacccaagcagaagtcagtatagtgtttctacgctagaatagtttgctaacaggacacgcttacaatgatgaagtaatgtaactatgttggaaactcgggaatagcgacatcagataagttataatggcatatcagaacagaaacagaggctcaatcagaaaatatattcc

SEQ ID NO: 211209 - DNA, 3196 bp, Zea Mays
gagcacttgggctgatgggctcgaccgatagaagttgggccacgactccggcgctcagcgttaggtgagtgagacaggtgcccccaccctgccgtactggggcctccgccctccgcctatctgcgaagccgcgatgctgttgtggcgagtgctgctccggcaccggcggccgccgttccccgtccacgccgccggattcttcaccagctccggaagcaacaccactgcgcctcctcctgctggagcggaggggctccgcgacgagccgggggaggagggctccctggcgcggcgggtggagcgggcggcgtcggtcggcgcggccatgcggggctggatggcagacggccgcgccgtgcaccgtggccacgtattccacgccatcaaccgcctccgacgacaccgcctacaccgcaccgccctgcaggtcatggaatggatcgtgagagagaggccctacaagctgagtgagcttgattactcgtatctgctggagttcacagctaaagtccatggcatttctgaagccgaaagcctcttccttcgcgtgcctcaggaatgccggaaagagctcctctacaacaaccttgtcatggctgctttagatctgaatcacattaagcattcatacgcttacatgaggaagatgagagaattgtccctgccgatctcgccgtatgtttacaaccgcctgatcatccttcactcatcacccggtcgcaggaaaactatatccaagatcctttcccagatgaaagctgatcgtgtggtccctcacacgtcaacctacaacatcctattgaaaatacaagccaatgagcacaacattgatgggctagccagggtgttcaatggtatgaaaagagcaaagattgagcccaatgagatcacttatggcattctagccattgcacatgctgttgcaaggctatatactgtttgccatacatatgtagaagccattgagaattccatgacaggtactaattggtccacgctggaaattcttcttatcctgtatggataccttgggaaggaaaaggagctaaagaggacatgggagatcatgcaagacctccctcatattcgatccaaaagcttcacactagcaatcgaagcatttggaaaggttggctccattgaccaggcagaaaagatatggatccatataaaatcaacaaagaagttaagccttacagaacagtttaattctatgttatcagtttactgcaggcacggtgttgtcgataaagcatcatctgtattcaaggaaatgagagcaaatggatgccagcctaatgctattacttatcgccacttagcattgggttgcttgaaatcaggtcttgttaaagaagctttgaacacaatagatatgggaaagaaggaagtcgtcactaaaaaggtgaggagttcaacaccatggttggagaccacacatctgttgcttgagaactttgcagaaattggagacttggaaaatgcaaagagactgtacagtgaactgaatgaatccaaatattctctgaattcctttgtgtataacaccctcctgaaagcttatgtgaaggcaaaagtttatgagccggatttgtcgaggacaatgattttgagaggggcaatgcctgacgctgagacatatagccttctcagactgattgaacaattcaagatctaatgctctatgtgtgttgttgctttgaaggaaaaccagtaaaccactgctggattttgtcatgcaaaaaccattagagatactgtggacagcgtgttgcattctggcaatcaaattttttttgcacagtaatcccaacttccgcactaatcaattggagatatgcagctatcttttctatcataaacaattttagaactgcaagatatacaattcttgtgcattccgaattttggaaatgttcctttttctcatgcagaaggcacccaaacaataaaggaggccaattgtcttttatcatgccacaaagaggtgatagaaatggtgaatatttaattgtgttgctactggtaagtctttgcagatccttgctcctgcgacacttctaaggtgctaggctgctagctatacttatgagaaaacagtagaagcatcctccacacaagctttgccagaaccaagctgaataaacacaagtgctattctctggttgcagaactgaacagaactccattctgccttttgcctatacacaaatcaaatatgctcaaatcatccacgcggaagggtagtgaatggaatcggaaccaacacaaagcaaatttcaccgatgatgtgaacttgccaaccataccaaataatttgccgttgagcttgacaattccctttgctgttgagcttgtttcttgagcagatactgttcagctgcgaggataaaggaacctggaaatttccgtggagaaggctccaacttttttttttctacctcatcaattagtttaactacattgggattcaggttagaagtctacatactggttaagtgctcatccgggtacaacatcgtgttttttttctttgaacttctgttgctcttttagagcttgtagtttgatcttgtggaccttctacatctgcttgctttataaataattctgcaccaagctgttcttgttctccagtagtgagatggttttccgtaagaaaatgtgaacagctagtgggtcacaaagaatgccatcagcattatcatgaggctgtgtggtgggtgcagtgtttctgaatgttcaggttggcaaatggcatacgaatggaaaatgccccactgatttgatcaactccatctgccatataaatctcttttgggctgattataggtgtgagtgctgcatgaaaggttctgctgaaattaggagcccttttctcttttttgagcctgacaccggttgtggcaattttatgtgctaataaatagccagtggcataacaaggcaacatggttttttttttggtatggttactcttgtgctgctcagtcacagcgacattagcaattggagcagaaacagagacccaagcagaagtcagtatagtgtttctacgctagaatagtttgctaacaggacacgcttacaatgatgaagtaatgtaactatgttggaaactcgggaatagcgacatcagataagttataatggcatatcagaacagaaacagaggctcaatcagaaaatatattcc

SEQ ID NO: 211210 - DNA, 1027 bp, Zea Mays
attatccgtccgtatccgcccgttttcacccctaccaccgcaggtgatcctgtgactcgttcgcgctcttcgaaggcggcagcactgcgggggacatgtatgacaatgtgctcgatggcatgaggggaggaggaggaggagggcagttggcttcttgggctggcgcgccagagttcttccctgactcaacctcatttaggcggcctcagggcaggccatgggggtcaaggcagatgtatcagcggggtggtggcattctaatgccagggagggagaagaatggcgggcgccatggtccatccatctcatttggcgatcatgagcatggtcatgtgccgaatgagattgacaggaagggccatggtgatgcggctcatgacctgaggattgtagcagagagagtgcaggacctgaggcactcgcagtcggaagctgacaccaaacgagccaaacaacaatacgctcagagatctcgtgttcgcaagatccaatatattcagagctcgagagaagagttcagtccttacagacagaggggatagaagtaactgctgaaattgattttatcggtcagcaaaatatcatgttagacttggaaaataaggccttgaagcaatggctcgagagtctgtctcaggagcatcttattaaacgctatcagcatgagatgtttgagagggaaattggtagtcttagaacattgttccagcagcagcaacaacatgtaccatagcagcaggttcctacccataggggtagtaacagcagagacctggattcacagtttgcaaacctgtctctaaaacacaacgatccaagttcagaccgtgatgctatctctagccttcgcatttaagattccttcgttccagcttttggttttctgagcttcaccgaaattcctctcccctttgtgccactatttgtggttgttagtagcatcagcaccagtgaactgggaatctcatcccatggtgaataaagctggatagttctttcagaattagcacctgatggtcatccttag

SEQ ID NO: 211211 - DNA, 1380 bp, Zea Mays
cgcgtttgggttctccgccaggccggcgcgttcgacccggtagcccgaaaccgcccatatatcttgccaactttctgcgacacggtggaggcgtggagctaactacccccacgctggctcgccaccgccgccgcagcaggcgtgggaatctgggcagcgccccgcggagaagaggaggcagcgcgctctccgtccgccatggcgggctcttccgaccccgacaagctcatgagcaaagccgacaaactaacaaaattgagttttacaagatggaatgctgattggaaaagcgctacctccttgtatgagcaagctgcaattgcgtataggttcagaaaggataatgagaaagcaaaagatgcttttgagaaggcctcaaaaggacaggaaatgatctcctcaccatgggacgctgctaagcatatggaatctgctgctgctttagcaaaggagcttgggcgctggaatgaagtatctgatttctatcacagagcttcagaattataccgtgaatgtggaaggccacaacctgcatctgatgctctagcaaagggtgccagtgcattggaggagaaatctccagaagaagctatcaaaatgtatgatgaggcttgttcagttctagaagaagatgggaaggaacagatggcttttgacttgtaccgtgccgcagcagctttgtatatcaagatggagaaatattcagatgccgctgctttgtttttaagacttggttcagctgctgataagtgcaatgccatcaatagccaatgcaaggcctatctgagtgcgatcatcatctatctttacacacatgattttcagcaagctcaaaaatgctacaatgactgctcagaggttcaagccttcctcaatagcgaccagaatcgatgcgcaacgaagttattgtctgcttatgaggaaggtgatgctgaagaaatcaaacgcatggctcaatcaagtgccttcaatcaccttgaccatgtggtaattaggcttgcacggaagctaccaacagatgatctgcaggccatcaagaaagctgacgatggcgaggaatccttggacgaggatgacctgacttaaaacgatctcccgagccaaaaggtgcatagagcaaacgtcatagtttgccataggtgggggaaccgctgtaaaaagaagttatgcgagttacatactaaaaacttgggcagcattcccagatctataaacatgaaatttgtagggcccaattatgttgtatccgtactggtggtttggtgttaccgaaacagcgaaactttagtggtataggcaaaaaaaaaaaaaaaaacgggggaaaacagagaggagcgtaaagcagggaaggaattgacgtacctgacaagatccaaggcc

SEQ ID NO: 211212 - DNA, 1472 bp, Zea Mays
cgcaaacgcgcaagcggtaatcggatgctggatcgctgttcatcacccattaccgtaccgtacctcgtcgcgcaagcctcgtatactctgttcccgcgtttgggttctccgccaggccggcgcgttcgacccggtagcccgaaaccgcccatatatcttgccaactttctgcgacacggtggaggcgtggagctaactacccccacgctggctcgccaccgccgccgcagcaggcgtgggaatctgggcagcgccccgcggagaagaggaggcagcgcgctctccgtccgccatggcgggctcttccgaccccgacaagctcatgagcaaagccgacaaactaacaaaattgagttttacaagatggaatgctgattggaaaagcgctacctccttgtatgagcaagctgcaattgcgtataggttcagaaaggataatgagaaagcaaaagatgcttttgagaaggcctcaaaaggacaggaaatgatctcctcaccatgggacgctgctaagcatatggaatctgctgctgctttagcaaaggagcttgggcgctggaatgaagtatctgatttctatcacagagcttcagaattataccgtgaatgtggaaggccacaacctgcatctgatgctctagcaaagggtgccagtgcattggaggagaaatctccagaagaagctatcaaaatgtatgatgaggcttgttcagttctagaagaagatgggaaggaacagatggcttttgacttgtaccgtgccgcagcagctttgtatatcaagatggagaaatattcagatgccgctgctttgtttttaagacttggttcagctgctgataagtgcaatgccatcaatagccaatgcaaggcctatctgagtgcgatcatcatctatctttacacacatgattttcagcaagctcaaaaatgctacaatgactgctcagaggttcaagccttcctcaatagcgaccagaatcgatgcgcaacgaagttattgtctgcttatgaggaaggtgatgctgaagaaatcaaacgcatggctcaatcaagtgccttcaatcaccttgaccatgtggtaattaggcttgcacggaagctaccaacagatgatctgcaggccatcaagaaagctgacgatggcgaggaatccttggacgaggatgacctgacttaaaacgatctcccgagccaaaaggtgcatagagcaaacgtcatagtttgccataggtgggggaaccgctgtaaaaagaagttatgcgagttacatactaaaaacttgggcagcattcccagatctataaacatgaaatttgtagggcccaattatgttgtatccgtactggtggtttggtgttaccgaaacagcgaaactttagtggtatgcaaaaaaaaaaaaaaaaacgggggaaaacagagaggagcgtaaagcagggaaggaattgacgtacctgacaagatccaaggcc

SEQ ID NO: 211213 - DNA, 154 bp, Zea Mays
ggtacttggggtgaagaaaagagaagtgtctataggctcgggttctaaatcgagggaaaaggttgtgctggtacaagatgcgactcttgaaggtgtctacgatgctctgaagaagtcttgtaattgtgcatgagtttgcttgccaaatggatct

SEQ ID NO: 211214 - DNA, 1043 bp, Zea Mays
gagccaacgaagaagcaagccccatcgtcatcatggaaggaggaggccatcccacccacgctgacgaggagccaccgaaggagaaggccccaccacccaaggagaaagccgcccaaggaaaccttttcatttcaggttgtttagatctactagagcttaatttagtcagactagagacagttcgccatatgttgatgatcaccgtgacactgtcgaagaagcctctggatacatcatctccaggctttcctgcttatccctactactctataagcacgcttaggggccctgatgctcggggaatcaaggaaatatggcacaactattgtccctggtctgtatgcaccagttcatctacatttctttgttgctcgtatggacatggctgttgattgcaaattgaatgaggttcataaccaggtggttgaggttaatgttaaggtggaaagtgcaggcacacataacatgcacaataatgatttctatgctaaagagaagttgctcaaatcaatgcgtgattgtgatccttcgtctttgcgccattggattgccccattgcagcactacactgcgctaatggaccttcaggactattctgagaatggaactgtaaccgtggtatatcgagtgatacttaaaggaactgatggagaggcatatagagatgccacgggcacaacacagttccatgaggggcgcagggaagatgctgttgcagccgcagaggaagctgcattcagcaaagcttgcgcatggttcggttttggcctgtatctgtaccaccaggatgaatctcattacgacgaccacttccattgaggctcaatctgcaaaagagttgatcataagttgtaacatgcgttggatatgcccctagaaaacttcgtatctagaatcaatttttggtctttgcgtagtatcatactcataacacaaagaagtgaacctatgtagatgctatttgaaacctttttattaatattataattcttattaatattattgtataattactttttgagtggagagaaggaaggcctttt

SEQ ID NO: 211215 - DNA, 1035 bp, Zea Mays
ccaaggccgaccgggccaagctcgacgtacgagtgcatcctctgcgcctgctgctccacctcctgcccgtcctactggtggaacccggaggagtacctcggcctggccgcgctgctccacgccaacagctacccaggaaaggaaaagattagaatcgcaaggccagattctcagggtgatatgcacttccatgggcacccgacgacattaaattcacaagaataagaaaccccctccaccttaagggttcaagtaggagccaacgaagaagcaagccccatcgtcatcatggaaggaggaggccatcccacccacgctgacgaggagccaccgaaggagaaggccccaccacccaaggagaaagccgcccaaggaaaccttttcatttcaggtggttgaggttaatgttaaggtggaaagtgcaggcacacataacatgcacaataatgatttctatgctaaagagaagttgctcaaatcaatgcgtgattgtgatccttcgtctttgcgccattggattttgtggcaacggaagttccaggccccattgcagcactacactgcgctaatggaccttcaggactattctgagaatggaactgtaaccgtggtatatcgagtgatacttaaaggaactgatggagaggcatatagagatgccacgggcacaacacagttccatgaggggcgcagggaagatgctgttgcagccgcagaggaagctgcattcagcaaagcttgcgcatggttcggttttggcctgtatctgtaccaccaggatgaatctcattacgacgaccacttccattgaggctcaatctgcaaaagagttgatcataagttgtaacatgcgttggatatgcccctagaaaacttcgtatctagaatcaatttttggtctttgcgtagtatcatactcataacacaaagaagtgaacctatgtagatgctatttgaaacctttttattaatattataattcttattaatattattgtataattactttttgagtggagagaaggaaggcctttt

SEQ ID NO: 211216 - DNA, 1172 bp, Zea Mays
ccaaggccgaccgggccaagctcgacgtacgagtgcatcctctgcgcctgctgctccacctcctgcccgtcctactggtggaacccggaggagtacctcggcctggccgcgctgctccacgccaacagctacccaggaaaggaaaagattagaatcgcaaggccagattctcagggtgatatgcacttccatgggcacccgacgacattaaattcacaagaataagaaaccccctccaccttaagggttcaagtaggagccaacgaagaagcaagccccatcgtcatcatggaaggaggaggccatcccacccacgctgacgaggagccaccgaaggagaaggccccaccacccaaggagaaagccgcccaaggaaaccttttcatttcaggggccctgatgctcggggaatcaaggaaatatggcacaactattgtccctggtctgtatgcaccagttcatctacatttctttgttgctcgtatggacatggctgttgattgcaaattgaatgaggttcataaccaggtggttgaggttaatgttaaggtggaaagtgcaggcacacataacatgcacaataatgatttctatgctaaagagaagttgctcaaatcaatgcgtgattgtgatccttcgtctttgcgccattggattttgtggcaacggaagttccaggccccattgcagcactacactgcgctaatggaccttcaggactattctgagaatggaactgtaaccgtggtatatcgagtgatacttaaaggaactgatggagaggcatatagagatgccacgggcacaacacagttccatgaggggcgcagggaagatgctgttgcagccgcagaggaagctgcattcagcaaagcttgcgcatggttcggttttggcctgtatctgtaccaccaggatgaatctcattacgacgaccacttccattgaggctcaatctgcaaaagagttgatcataagttgtaacatgcgttggatatgcccctagaaaacttcgtatctagaatcaatttttggtctttgcgtagtatcatactcataacacaaagaagtgaacctatgtagatgctatttgaaacctttttattaatattataattcttattaatattattgtataattactttttgagtggagagaaggaaggcctttt

SEQ ID NO: 211217 - DNA, 1587 bp, Zea Mays
ctcggatccacgtccaccgcgtcgcagaccaaggccgaccgggccaagctcgacgtacgagtgcatcctctgcgcctgctgctccacctcctgcccgtcctactggtggaacccggaggagtacctcggcctggccgcgctgctccacgccaacaggtgaacagggcttcagcagggacgctggtttagcaatggaggcgatccattccttatctgcttcaaaatcaagttatccaatggttgatctcacccaactcttcatgacagctacccaggaaaggaaaagattagaatcgcaaggccagattctcagggtgatatgcacttccatgggcacccgacgacattaaattcacaagaataagaaaccccctccaccttaagggttcaagtaggagccaacgaagaagcaagccccatcgtcatcatggaaggaggaggccatcccacccacgctgacgaggagccaccgaaggagaaggccccaccacccaaggagaaagccgcccaaggaaaccttttcatttcaggttgtttagatctactagagcttaatttagtcagactagagacagttcgccatatgttgatgatcaccgtgacactgtcgaagaagcctctggatacatcatctccaggctttcctgcttatccctactactctataagcacgcttaggggccctgatgctcggggaatcaaggaaatatggcacaactattgtccctggtctgtatgcaccagttcatctacatttctttgttgctcgtatggacatggctgttgattgcaaattgaatgaggttcataaccaggtggttgaggttaatgttaaggtggaaagtgcaggcacacataacatgcacaataatgatttctatgctaaagagaagttgctcaaatcaatgcgtgattgtgatccttcgtctttgcgccattggattgtaagagttgttttcttgttttatattttttttgttattcctaccattgaattgggcattcaatacctgttcattatctttatgcttatgcaatccaataatgatggaaaataactgacttggctgctctcttgagttgtggcaacggaagttccaggccccattgcagcactacactgcgctaatggaccttcaggactattctgagaatggaactgtaaccgtggtatatcgagtgatacttaaaggaactgatggagagagatgccacgggcacaacacagttccatgaggggcgcagggaagatgctgttgcagccgcagaggaagctgcattcagcaaagcttgcgcatggttcggttttggcctgtatctgtaccaccaggatgaatctcattacgacgaccacttccattgaggctcaatctgcaaaagagttgatcataagttgtaacatgcgttggatatgcccctagaaaacttcgtatctagaatcaatttttggtctttgcgtagtatcatactcataacacaaagaagtgaacctatgtagatgctatttgaaacctttttattaatattataattcttattaatattattgtataattactttttgagtggagagaaggaaggcctttt

SEQ ID NO: 211218 - DNA, 1454 bp, Zea Mays
ctcggatccacgtccaccgcgtcgcagaccaaggccgaccgggccaagctcgacgtacgagtgcatcctctgcgcctgctgctccacctcctgcccgtcctactggtggaacccggaggagtacctcggcctggccgcgctgctccacgccaacaggtgaacagggcttcagcagggacgctggtttagcaatggaggcgatccattccttatctgcttcaaaatcaagttatccaatggttgatctcacccaactcttcatgacagctacccaggaaaggaaaagattagaatcgcaaggccagattctcagggtgatatgcacttccatgggcacccgacgacattaaattcacaagaataagaaaccccctccaccttaagggttcaagtaggagccaacgaagaagcaagccccatcgtcatcatggaaggaggaggccatcccacccacgctgacgaggagccaccgaaggagaaggccccaccacccaaggagaaagccgcccaaggaaaccttttcatttcaggttgtttagatctactagagcttaatttagtcagactagagacagttcgccatatgttgatgatcaccgtgacactgtcgaagaagcctctggatacatcatctccaggctttcctgcttatccctactactctataagcacggggccctgatgctcggggaatcaaggaaatatggcacaactattgtccctggtctgtatgcaccagttcatctacatttctttgttgctcgtatggacatggctgttgattgcaaattgaatgaggttcataaccaggtggttgaggttaatgttaaggtggaaagtgcaggcacacataacatgcacaataatgatttctatgctaaagagaagttgctcaaatcaatgcgtgattgtgatccttcgtctttgcgccattggattttgtggcaacggaagttccaggccccattgcagcactacactgcgctaatggaccttcaggactattctgagaatggaactgtaaccgtggtatatcgagtgatacttaaaggaactgatggagaggcatatagagatgccacgggcacaacacagttccatgaggggcgcagggaagatgctgttgcagccgcagaggaagctgcattcagcaaagcttgcgcatggttcggttttggcctgtatctgtaccaccaggatgaatctcattacgacgaccacttccattgaggctcaatctgcaaaagagttgatcataagttgtaacatgcgttggatatgcccctagaaaacttcgtatctagaatcaatttttggtctttgcgtagtatcatactcataacacaaagaagtgaacctatgtagatgctatttgaaacctttttattaatattataattcttattaatattattgtataattactttttgagtggagagaaggaaggcctttt

SEQ ID NO: 211219 - DNA, 1245 bp, Zea Mays
tagcgtcctcggatccacgtccaccgcgtcgcagaccaaggccgaccgggccaagctcgacgtacgagtgcatcctctgcgcctgctgctccacctcctgcccgtcctactggtggaacccggaggagtacctcggcctggccgcgctgctccacgccaacaggtgaacagggcttcagcagggacgctggtttagcaatggaggcgatccattccttatctgcttcaaaatcaagttatccaatggttgatctcacccaactcttcatgacagctacccaggaaaggaaaagattagaatcgcaaggccagattctcagggtgatatgcacttccatgggcacccgacgacattaaattcacaagaataagaaaccccctccaccttaagggttcaagtaggagccaacgaagaagcaagccccatcgtcatcatggaaggaggaggccatcccacccacgctgacgaggagccaccgaaggagaaggccccaccacccaaggagaaagccgcccaaggaaaccttttcatttcagttcgccatatgttgatgatcaccgtgacactgtcgaagaagcctctggatacatcatctccagggtggttgaggttaatgttaaggtggaaagtgcaggcacacataacatgcacaataatgatttctatgctaaagagaagttgctcaaatcaatgcgtgattgtgatccttcgtctttgcgccattggattttgtggcaacggaagttccaggccccattgcagcactacactgcgctaatggaccttcaggactattctgagaatggaactgtaaccgtggtatatcgagtgatacttaaaggaactgatggagaggcatatagagatgccacgggcacaacacagttccatgaggggcgcagggaagatgctgttgcagccgcagaggaagctgcattcagcaaagcttgcgcatggttcggttttggcctgtatctgtaccaccaggatgaatctcattacgacgaccacttccattgaggctcaatctgcaaaagagttgatcataagttgtaacatgcgttggatatgcccctagaaaacttcgtatctagaatcaatttttggtctttgcgtagtatcatactcataacacaaagaagtgaacctatgtagatgctatttgaaacctttttattaatattataattcttattaatattattgtataattactttttgagtggagagaaggaaggcctttt

SEQ ID NO: 211220 - DNA, 1727 bp, Zea Mays
tagcgtcctcggatccacgtccaccgcgtcgcagaccaaggccgaccgggccaagctcgacgtacgagtgcatcctctgcgcctgctgctccacctcctgcccgtcctactggtggaacccggaggagtacctcggcctggccgcgctgctccacgccaacaggtgaacagggcttcagcagggacgctggtttagcaatggaggcgatccattccttatctgcttcaaaatcaagttatccaatggttgatctcacccaactcttcatgacagctacccaggaaaggaaaagattagaatcgcaaggccagattctcagggtgatatgcacttccatgggcacccgacgacattaaattcacaagaataagaaaccccctccaccttaagggttcaagtaggagccaacgaagaagcaagccccatcgtcatcatggaaggaggaggccatcccacccacgctgacgaggagccaccgaaggagaaggccccaccacccaaggagaaagccgcccaaggaaaccttttcatttcagttcgccatatgttgatgatcaccgtgacactgtcgaagaagcctctggatacatcatctccagggtaagtcaaaaacctatcctatcgctacaaacacagaagaatttcagagttgatcacctttcttttcctaattcgtaaattgttgttcattgttttcagctttcctgcttatccctactactctataagcacggtgtgtaggcgtccacaccgtgcaccatgttcttagttttggtagaattctttgtcttaaagctgactggaaatctcagcttaggggccctgatgctcggggaatcaaggaaatatggcacaactattgtccctggtctgtatgcaccagttcatctacatttctttgttgctcgtatggacatggctgttgattgcaaattgaatgaggttcataaccaggtggttgaggttaatgttaaggtggaaagtgcaggcacacataacatgcacaataatgatttctatgctaaagagaagttgctcaaatcaatgcgtgattgtgatccttcgtctttgcgccattggattgtaagagttgttttcttgttttatattttttttgttattcctaccattgaattgggcattcaatacctgttcattatctttatgcttatgcaatccaataatgatggaaaataactgacttggctgctctcttgagttgtggcaacggaagttccaggccccattgcagcactacactgcgctaatggaccttcaggactattctgagaatggaactgtaaccgtggtatatcgagtgatacttaaaggaactgatggagagagatgccacgggcacaacacagttccatgaggggcgcagggaagatgctgttgcagccgcagaggaagctgcattcagcaaagcttgcgcatggttcggttttggcctgtatctgtaccaccaggatgaatctcattacgacgaccacttccattgaggctcaatctgcaaaagagttgatcataagttgtaacatgcgttggatatgcccctagaaaacttcgtatctagaatcaatttttggtctttgcgtagtatcatactcataacacaaagaagtgaacctatgtagatgctatttgaaacctttttattaatattataattcttattaatattattgtataattactttttgagtggagagaaggaaggcctttt

SEQ ID NO: 211221 - DNA, 1807 bp, Zea Mays
tccgttgtcgtagcgtcctcggatccacgtccaccgcgtcgcagaccaaggccgaccgggccaagctcgacgtacgagtgcatcctctgcgcctgctgctccacctcctgcccgtcctactggtggaacccggaggagtacctcggcctggccgcgctgctccacgccaacaggtgaacagggcttcagcagggacgctggtttagcaatggaggcgatccattccttatctgcttcaaaatcaagttatccaatggttgatctcacccaactcttcatgacagctacccaggaaaggaaaagattagaatcgcaaggccagattctcagggtgatatgcacttccatgggcacccgacgacattaaattcacaagaataagaaaccccctccaccttaagggttcaagtaggagccaacgaagaagcaagccccatcgtcatcatggaaggaggaggccatcccacccacgctgacgaggagccaccgaaggagaaggccccaccacccaaggagaaagccgcccaaggaaaccttttcatttcagcttaggggccctgatgctcggggaatcaaggaaatatggcacaactattgtccctggtctgtatgcaccagttcatctacatttctttgttgctcgtatggacatggctgttgattgcaaattgaatgaggttcataaccaggtgggggttgccatctatttgcaccttttttaattgatcagattgcccactaaaatttgtttgcaatctaaatgggaccacaacgaaacgaattctaactgggtttattaggtggttcgagtagcactcaagttttgagtttgattgcctataggagcgaatttcaggttgatccctttcttataccccattgtgtgggagcttccagcaaagggtatgatctttacatcaaatcaaataaaataaatcaaaatgatgttatacctgctaatgttacataaactacttagatgaaatctacttcaggctaccaaaaaagtgtttattcaaccatgcaattttaatagaagtataaacttctgaggccttaagtctgtaaaagtaaaatcattgtgcctttatccagtggactatctctgtaaatccattatattaaagtcactatgattgattgtttgatcatttctcgtgcaggtggttgaggttaatgttaaggtggaaagtgcaggcacacataacatgcacaataatgatttctatgctaaagagaagttgctcaaatcaatgcgtgattgtgatccttcgtctttgcgccattggattttgtggcaacggaagttccaggccccattgcagcactacactgcgctaatggaccttcaggactattctgagaatggaactgtaaccgtggtatatcgagtgatacttaaaggaactgatggagaggcatatagagatgccacgggcacaacacagttccatgaggggcgcagggaagatgctgttgcagccgcagaggaagctgcattcagcaaagcttgcgcatggttcggttttggcctgtatctgtaccaccaggatgaatctcattacgacgaccacttccattgaggctcaatctgcaaaagagttgatcataagttgtaacatgcgttggatatgcccctagaaaacttcgtatctagaatcaatttttggtctttgcgtagtatcatactcataacacaaagaagtgaacctatgtagatgctatttgaaacctttttattaatattataattcttattaatattattgtataattactttttgagtggagagaaggaaggcctttt

SEQ ID NO: 211222 - DNA, 1177 bp, Zea Mays
gtccgttgtcgtagcgtcctcggatccacgtccaccgcgtcgcagaccaaggccgaccgggccaagctcgacgtacgagtgcatcctctgcgcctgctgctccacctcctgcccgtcctactggtggaacccggaggagtacctcggcctggccgcgctgctccacgccaacaggtgaacagggcttcagcagggacgctggtttagcaatggaggcgatccattccttatctgcttcaaaatcaagttatccaatggttgatctcacccaactcttcatgacagctacccaggaaaggaaaagattagaatcgcaaggccagattctcagggtgatatgcacttccatgggcacccgacgacattaaattcacaagaataagaaaccccctccaccttaagggttcaagtaggagccaacgaagaagcaagccccatcgtcatcatggaaggaggaggccatcccacccacgctgacgaggagccaccgaaggagaaggccccaccacccaaggagaaagccgcccaaggaaaccttttcatttcaggtggttgaggttaatgttaaggtggaaagtgcaggcacacataacatgcacaataatgatttctatgctaaagagaagttgctcaaatcaatgcgtgattgtgatccttcgtctttgcgccattggattttccaggccccattgcagcactacactgcgctaatggaccttcaggactattctgagaatggaactgtaaccgtggtatatcgagtgatacttaaaggaactgatggagaggcatatagagatgccacgggcacaacacagttccatgaggggcgcagggaagatgctgttgcagccgcagaggaagctgcattcagcaaagcttgcgcatggttcggttttggcctgtatctgtaccaccaggatgaatctcattacgacgaccacttccattgaggctcaatctgcaaaagagttgatcataagttgtaacatgcgttggatatgcccctagaaaacttcgtatctagaatcaatttttggtctttgcgtagtatcatactcataacacaaagaagtgaacctatgtagatgctatttgaaacctttttattaatattataattcttattaatattattgtataattactttttgagtggagagaaggaaggcctttt

SEQ ID NO: 211223 - DNA, 1192 bp, Zea Mays
gtccgttgtcgtagcgtcctcggatccacgtccaccgcgtcgcagaccaaggccgaccgggccaagctcgacgtacgagtgcatcctctgcgcctgctgctccacctcctgcccgtcctactggtggaacccggaggagtacctcggcctggccgcgctgctccacgccaacaggtgaacagggcttcagcagggacgctggtttagcaatggaggcgatccattccttatctgcttcaaaatcaagttatccaatggttgatctcacccaactcttcatgacagctacccaggaaaggaaaagattagaatcgcaaggccagattctcagggtgatatgcacttccatgggcacccgacgacattaaattcacaagaataagaaaccccctccaccttaagggttcaagtaggagccaacgaagaagcaagccccatcgtcatcatggaaggaggaggccatcccacccacgctgacgaggagccaccgaaggagaaggccccaccacccaaggagaaagccgcccaaggaaaccttttcatttcaggtggttgaggttaatgttaaggtggaaagtgcaggcacacataacatgcacaataatgatttctatgctaaagagaagttgctcaaatcaatgcgtgattgtgatccttcgtctttgcgccattggattttgtggcaacggaagttccaggccccattgcagcactacactgcgctaatggaccttcaggactattctgagaatggaactgtaaccgtggtatatcgagtgatacttaaaggaactgatggagaggcatatagagatgccacgggcacaacacagttccatgaggggcgcagggaagatgctgttgcagccgcagaggaagctgcattcagcaaagcttgcgcatggttcggttttggcctgtatctgtaccaccaggatgaatctcattacgacgaccacttccattgaggctcaatctgcaaaagagttgatcataagttgtaacatgcgttggatatgcccctagaaaacttcgtatctagaatcaatttttggtctttgcgtagtatcatactcataacacaaagaagtgaacctatgtagatgctatttgaaacctttttattaatattataattcttattaatattattgtataattactttttgagtggagagaaggaaggcctttt

SEQ ID NO: 211224 - DNA, 1262 bp, Zea Mays
ctgcaccgaccggagccgccgcagacccacctcgccatggcggcggcggtcgcggcgcctcccatccccgcccctaaccacactccccttccatcctcgctcacttccagccgcccccattcccagttgaaggagctgtccaggaaccgggaaccccatcaccggatcaggagcagccgtgtcgcggggatggtcgttgctgagctcacgatgaccgcccgatggtgtcggaccccgcaccgccgtcggcaccgcgctaatgatggtgaacagggcttcagcagggacgctggtttagcaatggaggcgatccattccttatctgcttcaaaatcaagttatccaatggttgatctcacccaactcttcatgacagctacccaggaaaggaaaagattagaatcgcaaggccagattctcagggtgatatgcacttccatgggcacccgacgacattaaattcacaagaataagaaaccccctccaccttaagggttcaagtaggagccaacgaagaagcaagccccatcgtcatcatggaaggaggaggccatcccacccacgctgacgaggagccaccgaaggagaaggccccaccacccaaggagaaagccgcccaaggaaaccttttcatttcaggtggttgaggttaatgttaaggtggaaagtgcaggcacacataacatgcacaataatgatttctatgctaaagagaagttgctcaaatcaatgcgtgattgtgatccttcgtctttgcgccattggattgccccattgcagcactacactgcgctaatggaccttcaggactattctgagaatggaactgtaaccgtggtatatcgagtgatacttaaaggaactgatggagaggcatatagagatgccacgggcacaacacagttccatgaggggcgcagggaagatgctgttgcagccgcagaggaagctgcattcagcaaagcttgcgcatggttcggttttggcctgtatctgtaccaccaggatgaatctcattacgacgaccacttccattgaggctcaatctgcaaaagagttgatcataagttgtaacatgcgttggatatgcccctagaaaacttcgtatctagaatcaatttttggtctttgcgtagtatcatactcataacacaaagaagtgaacctatgtagatgctatttgaaacctttttattaatattataattcttattaatattattgtataattactttttgagtggagagaaggaaggcctttt

SEQ ID NO: 211225 - DNA, 3311 bp, Zea Mays
aataatgcaagtggggtcacggcaaaggtgtggcgcgtgcgtggacctcgccctcatctcgtctcctccggcggtccggcctgtccaataattctagtattccaccgccgcacacctcctgtcttccttcaccttcgcgctccgccgccgccgtcgattcgtgctgctctcacccctaacctgtccaacatcgccggggagggaagcagcagaagaagctccccttacctccggctatcgcctgaggataaagtggggtctgtaggggagtcttaggggggagcaaaagggataggatagggagagatgaagcaatcaatttcttcgtccgccttcgcccctgcttacgtccccgctactaaccctaggatcattctgtcttttctcgtttcttatccgactcttcttcgttttatgcctatcagttatgaggttgaacgccttcagaagcttctctactagattagtgtaaatagtagacttgttcgagtttagcttggctggaagaattagtctctggtccgtgtttatatctgctagcaataatggctgcgatgaacggagaggtattgggtgaatgtggaaggaacataaatagtctcaagagaaagcgggagagccccgctgcatatgctgctggcgtattctgcacctctgaattgcatcagcatactgtcaatgattctgctgttaggtttcatcttgataaagaccgtaaggcaaagatcgtgtgccacttcaacaagcaggttttgcagagctataagaaattcatgagtagtgcaccacctaagcgtattttgcttcgccaaggtgctgtctggaaagactttccagaaaagattgtcaaattggcccaagctgacttcagggcaaaaaagatgatcacagaaacaggatatcagaaccagctatttttgctggattttgcccatatgacattcatagacacaaagacaggttttcagaggccaattgcttggatcgatgaaaatgaaaagtgctacttcccggaatcatttatacaagatcagaagttatttatgaagaaagattttggcaacggaaatcatgagtacattagtgaagagcgaaatgggacacgagaaacgaatcaccagtttggagcatcagaaagttctgctgaaagctcaaactttgagtcaagtattggagatgtttctagtcctaagagagctagggctgaaaagaatttcattgtaaaaaaatattgtgatatgggagaagctattggagaaaatgagtcatgcactttgttgcctacagcctgtaacctactaccacaccaagctaatctgggtgaggtatcccgtgctcagcgcactattgaagccgtggagaagctgttgctgcaggggatgggttcagttattgaatccaaggacattattggaatctacaggactccattattggatgaccacggacaagtccgttaccatattcaccaaaagcaagtacaggttaccggatgtcatcgtggaaacgcaaatgtccgttatgcatggcttccttgctccaaaagcactgtgcatgtaatgatgctgaatggtgttttgcaagttgataagcctcccaataagtgtgcagcctatggagagggcactctccttacaccagcaaatcgttcggatgcctggtatgttcttgatatatcaattattacatatatgtcaggatttttttctccccccttcctaaagtgttgctggcacctaactctcgtatcttcttatctatgcttcgtagccattcacattttctgagttctgttatgtttgcatctatgactcagatgtttgcacacactttttgatagataacaacaactaaatactgtttcattttgttattctctttcctcaccaagttcatttcccttcctctaaccgttgccaattcaatatttgtattactttttgcagtgtgaaatactctgatgttgatgaaaatggcattgtccgtatgatgttgtgccgtgtaataatggggaacgtagaaatagttcaccctggatctaagcagtgccaacctagtaataagtattttgatagtggagtagacgaccttaaaaatccacggcattacgttgtgtgggatatgaatctgaatagtcatatctattctgagtttgtagtcactgtcaaattgccttctaaaaccaaagattcctttgtatcgcaagaaaactgtcagaattcgtctgatctatcactggtgttgaactctagttcacctgattgtatttcacaggtaagatgctttacatggggtattaacaagatagtactgtaacactagagacaactgttgctaacttgatatacagaagagttccactgttggagcagcaagagtgcagtaattcagattctgtgatttgactcaataattgacatgattgcattattgagattataacttggagctgattatattcgttatctatgatagaaacctccaaatatgataagtttccctgtgaaaccatgctattttagccacgctggagttggttaaagcaccagttaacaacttccttttatgcataaaacaggagatgaacctggaggcacctccagcattgggaggtggatgtgcagcccccatgctaggagattcgatggaaaaggctccaagctcaccttggatgcctttctccatgctgtttgcagcgatctctaccaaagtgtctcctgagaatatggacgtgattattggttgctatgaagagtttaagagcaagaaaataagccgaggtgaactagtgaagaagctgaggcatgtagttggtgatagagtgctaatatcgacgataatgcgtctccaagataagttacctccagtggataagcgtgaggaaccagacacatcggcgtccaaggtggtggcggaaccatgagatgggtgtcaggaggtgggcgaggaatgcagaaagggaggaaccagccgacttgacatagaaaaccctgtgggaagcagcaactatgaagcctcttgcatcagtcttgtgcatggaggctgctgtttgttctctgtatcgtaggtgtctacgtttgcgaggaaattgtatccggtgtttctctttcttcaaattaaaccacgcacatgcagctgccgtactttttggaccattgaagtgtttcgtccgtgaaaaaggctccttttaccttcccgtttgccttcctaagagcatctccagtagttttgtaaaataaaactccctaaaagacgatgtagagagttgctaaataataatagagagtaaaaaattgcatgttcttcaatag

SEQ ID NO: 211226 - DNA, 3296 bp, Zea Mays
aataatgcaagtggggtcacggcaaaggtgtggcgcgtgcgtggacctcgccctcatctcgtctcctccggcggtccggcctgtccaataattctagtattccaccgccgcacacctcctgtcttccttcaccttcgcgctccgccgccgccgtcgattcgtgctgctctcacccctaacctgtccaacatcgccggggagggaagcagcagaagaagctccccttacctccggctatcgcctgaggataaagtggggtctgtaggggagtcttaggggggagcaaaagggataggatagggagagatgaagcaatcaatttcttcgtccgccttcgcccctgcttacgtccccgctactaaccctaggatcattctgtcttttctcgtttcttatccgactcttcttcgttttatgcctatcagttatgaggttgaacgccttcagaagcttctctactagattagtgtaaatagtagacttgttcgagtttagcttggctggaagaattagtctctggtccgtgtttatatctgctagcaataatggctgcgatgaacggagaggtattgggtgaatgtggaaggaacataaatagtctcaagagaaagcgggagagccccgctgcatatgctgctggcgtattctgcacctctgaattgcatcagcatactgtcaatgattctgctgttaggtttcatcttgataaagaccgtaaggcaaagatcgtgtgccacttcaacaagcaggttttgcagagctataagaaattcatgagtagtgcaccacctaagcgtattttgcttcgccaaggtgctgtctggaaagactttccagaaaagattgtcaaattggcccaagctgacttcagggcaaaaaagatgatcacagaaacaggatatcagaaccagctatttttgctggattttgcccatatgacattcatagacacaaagacaggttttcagaggccaattgcttggatcgatgaaaatgaaaagtgctacttcccggaatcatttatacaagatcagaagttatttatgaagaaagattttggcaacggaaatcatgagtacattagtgaagagcgaaatgggacacgagaaacgaatcaccagtttggagcatcagaaagttctgctgaaagctcaaactttgagtcaagtattggagatgtttctagtcctaagagagctagggctgaaaagaatttcattgtaaaaaaatattgtgatatgggagaagctattggagaaaatgagtcatgcactttgttgcctacagcctgtaacctactaccacaccaagctaatctgggtgaggtatcccgtgctcagcgcactattgaagccgtggagaagctgttgctgcaggggatgggttcagttattgaatccaaggacattattggaatctacaggactccattattggatgaccacggacaagtccgttaccatattcaccaaaagcaagtacaggttaccggatgtcatcgtggaaacgcaaatgtccgttatgcatggcttccttgctccaaaagcactgtgcatgtaatgatgctgaatggtgttttgcaagttgataagcctcccaataagtgtgcagcctatggagagggcactctccttacaccagcaaatcgttcggatgcctgtgtgaaatactctgatgttgatgaaaatggcattgtccgtatgatgttgtgccgtgtaataatggggaacgtagaaatagttcaccctggatctaagcagtgccaacctagtaataagtattttgatagtggagtagacgaccttaaaaatccacggcattacgttgtgtgggatatgaatctgaatagtcatatctattctgagtttgtagtcactgtcaaattgccttctaaaaccaaagattcctttgtatcgcaagaaaactgtcagaattcgtctgatctatcactggtgttgaactctagttcacctgattgtatttcacaggtaagatgctttacatggggtattaacaagatagtactgtaacactagagacaactgttgctaacttgatatacagaagagttccactgttggagcagcaagagtgcagtaattcagattctgtgatttgactcaataattgacatgattgcattattgagattataacttggagctgattatattcgttatctatgatagaaacctccaaatatgataagtttccctgtgaaaccatgctattttagccacgctggagttggttaaagcaccagttaacaacttccttttatgcataaaacaggagatgaacctggaggcacctccagcattgggaggtggatgtgcagcccccatgctaggagattcgatggaaaaggctccaagctcaccttggatgcctttctccatgctgtttgcagcgatctctaccaaagtgtctcctgagaatatggacgtgattattggttgctatgaagagtttaagagcaagaaaataagccgaggtgaactagtgaagaagctgaggcatgtagttggtgatagagtgctaatatcgacgataatgcgtctccaagataaggtgtgaattgttctgcttgaaccttgctgatacagttatcttggattctttttggaagactgaaatccttttagccgtaaggtgtgtcagctggtggggttctgggatggaccgccagtccgccacgcaccgaacttctgaaggcctatatcttttgctgtgaacaagctacttttcaagagcatcagaacagcagtggtttgataacctgattctttttacactgttttctgaggaaatgcttcttttgtgtgtgtctatttggcagcagttacctccagtggataagcgtgaggaaccagacacatcggcgtccaaggtggtggcggaaccatgagatgggtgtcaggaggtgggcgaggaatgcagaaagggaggaaccagccgacttgacatagaaaaccctgtgggaagcagcaactatgaagcctcttgcatcagtcttgtgcatggaggctgctgtttgttctctgtatcgtaggtgtctacgtttgcgaggaaattgtatccggtgtttctctttcttcaaattaaaccacgcacatgcagctgccgtactttttggaccattgaagtgtttcgtccgtgaaaaaggctccttttaccttcccgtttgccttcctaagagcatctccagtagttttgtaaaataaaactccctaaaagacgatgtagagagttgctaaataataatagagagtaaaaaattgcatgttcttcaatag

SEQ ID NO: 211227 - DNA, 3254 bp, Zea Mays
aataatgcaagtggggtcacggcaaaggtgtggcgcgtgcgtggacctcgccctcatctcgtctcctccggcggtccggcctgtccaataattctagtattccaccgccgcacacctcctgtcttccttcaccttcgcgctccgccgccgccgtcgattcgtgctgctctcacccctaacctgtccaacatcgccggggagggaagcagcagaagaagctccccttacctccggctatcgcctgaggataaagtggggtctgtaggggagtcttaggggggagcaaaagggataggatagggagagatgaagcaatcaatttcttcgtccgccttcgcccctgcttacgtccccgctactaaccctagttatgaggttgaacgccttcagaagcttctctactagattagtgtaaatagtagacttgttcgagtttagcttggctggaagaattagtctctggtccgtgtttatatctgctagcaataatggctgcgatgaacggagaggtattgggtgaatgtggaaggaacataaatagtctcaagagaaagcgggagagccccgctgcatatgctgctggcgtattctgcacctctgaattgcatcagcatactgtcaatgattctgctgttaggtttcatcttgataaagaccgtaaggcaaagatcgtgtgccacttcaacaagcaggttttgcagagctataagaaattcatgagtagtgcaccacctaagcgtattttgcttcgccaaggtgctgtctggaaagactttccagaaaagattgtcaaattggcccaagctgacttcagggcaaaaaagatgatcacagaaacaggatatcagaaccagctatttttgctggattttgcccatatgacattcatagacacaaagacaggttttcagaggccaattgcttggatcgatgaaaatgaaaagtgctacttcccggaatcatttatacaagatcagaagttatttatgaagaaagattttggcaacggaaatcatgagtacattagtgaagagcgaaatgggacacgagaaacgaatcaccagtttggagcatcagaaagttctgctgaaagctcaaactttgagtcaagtattggagatgtttctagtcctaagagagctagggctgaaaagaatttcattgtaaaaaaatattgtgatatgggagaagctattggagaaaatgagtcatgcactttgttgcctacagcctgtaacctactaccacaccaagctaatctgggtgaggtatcccgtgctcagcgcactattgaagccgtggagaagctgttgctgcaggggatgggttcagttattgaatccaaggacattattggaatctacaggactccattattggatgaccacggacaagtccgttaccatattcaccaaaagcaagtacaggttaccggatgtcatcgtggaaacgcaaatgtccgttatgcatggcttccttgctccaaaagcactgtgcatgtaatgatgctgaatggtgttttgcaagttgataagcctcccaataagtgtgcagcctatggagagggcactctccttacaccagcaaatcgttcggatgcctggtatgttcttgatatatcaattattacatatatgtcaggatttttttctccccccttcctaaagtgttgctggcacctaactctcgtatcttcttatctatgcttcgtagccattcacattttctgagttctgttatgtttgcatctatgactcagatgtttgcacacactttttgatagataacaacaactaaatactgtttcattttgttattctctttcctcaccaagttcatttcccttcctctaaccgttgccaattcaatatttgtattactttttgcagtgtgaaatactctgatgttgatgaaaatggcattgtccgtatgatgttgtgccgtgtaataatggggaacgtagaaatagttcaccctggatctaagcagtgccaacctagtaataagtattttgatagtggagtagacgaccttaaaaatccacggcattacgttgtgtgggatatgaatctgaatagtcatatctattctgagtttgtagtcactgtcaaattgccttctaaaaccaaagattcctttgtatcgcaagaaaactgtcagaattcgtctgatctatcactggtgttgaactctagttcacctgattgtatttcacaggtaagatgctttacatggggtattaacaagatagtactgtaacactagagacaactgttgctaacttgatatacagaagagttccactgttggagcagcaagagtgcagtaattcagattctgtgatttgactcaataattgacatgattgcattattgagattataacttggagctgattatattcgttatctatgatagaaacctccaaatatgataagtttccctgtgaaaccatgctattttagccacgctggagttggttaaagcaccagttaacaacttccttttatgcataaaacaggagatgaacctggaggcacctccagcattgggaggtggatgtgcagcccccatgctaggagattcgatggaaaaggctccaagctcaccttggatgcctttctccatgctgtttgcagcgatctctaccaaagtgtctcctgagaatatggacgtgattattggttgctatgaagagtttaagagcaagaaaataagccgaggtgaactagtgaagaagctgaggcatgtagttggtgatagagtgctaatatcgacgataatgcgtctccaagataagttacctccagtggataagcgtgaggaaccagacacatcggcgtccaaggtggtggcggaaccatgagatgggtgtcaggaggtgggcgaggaatgcagaaagggaggaaccagccgacttgacatagaaaaccctgtgggaagcagcaactatgaagcctcttgcatcagtcttgtgcatggaggctgctgtttgttctctgtatcgtaggtgtctacgtttgcgaggaaattgtatccggtgtttctctttcttcaaattaaaccacgcacatgcagctgccgtactttttggaccattgaagtgtttcgtccgtgaaaaaggctccttttaccttcccgtttgccttcctaagagcatctccagtagttttgtaaaataaaactccctaaaagacgatgtagagagttgctaaataataatagagagtaaaaaattgcatgttcttcaatag

SEQ ID NO: 211228 - DNA, 2895 bp, Zea Mays
aataatgcaagtggggtcacggcaaaggtgtggcgcgtgcgtggacctcgccctcatctcgtctcctccggcggtccggcctgtccaataattctagtattccaccgccgcacacctcctgtcttccttcaccttcgcgctccgccgccgccgtcgattcgtgctgctctcacccctaacctgtccaacatcgccggggagggaagcagcagaagaagctccccttacctccggctatcgcctgaggataaagtggggtctgtaggggagtcttaggggggagcaaaagggataggatagggagagatgaagcaatcaatttcttcgtccgccttcgcccctgcttacgtccccgctactaaccctagttatgaggttgaacgccttcagaagcttctctactagattagtgtaaatagtagacttgttcgagtttagcttggctggaagaattagtctctggtccgtgtttatatctgctagcaataatggctgcgatgaacggagaggtattgggtgaatgtggaaggaacataaatagtctcaagagaaagcgggagagccccgctgcatatgctgctggcgtattctgcacctctgaattgcatcagcatactgtcaatgattctgctgttaggtttcatcttgataaagaccgtaaggcaaagatcgtgtgccacttcaacaagcaggttttgcagagctataagaaattcatgagtagtgcaccacctaagcgtattttgcttcgccaaggtgctgtctggaaagactttccagaaaagattgtcaaattggcccaagctgacttcagggcaaaaaagatgatcacagaaacaggatatcagaaccagctatttttgctggattttgcccatatgacattcatagacacaaagacaggttttcagaggccaattgcttggatcgatgaaaatgaaaagtgctacttcccggaatcatttatacaagatcagaagttatttatgaagaaagattttggcaacggaaatcatgagtacattagtgaagagcgaaatgggacacgagaaacgaatcaccagtttggagcatcagaaagttctgctgaaagctcaaactttgagtcaagtattggagatgtttctagtcctaagagagctagggctgaaaagaatttcattgtaaaaaaatattgtgatatgggagaagctattggagaaaatgagtcatgcactttgttgcctacagcctgtaacctactaccacaccaagctaatctgggtgaggtatcccgtgctcagcgcactattgaagccgtggagaagctgttgctgcaggggatgggttcagttattgaatccaaggacattattggaatctacaggactccattattggatgaccacggacaagtccgttaccatattcaccaaaagcaagtacaggttaccggatgtcatcgtggaaacgcaaatgtccgttatgcatggcttccttgctccaaaagcactgtgcatgtaatgatgctgaatggtgttttgcaagttgataagcctcccaataagtgtgcagcctatggagagggcactctccttacaccagcaaatcgttcggatgcctgtgtgaaatactctgatgttgatgaaaatggcattgtccgtatgatgttgtgccgtgtaataatggggaacgtagaaatagttcaccctggatctaagcagtgccaacctagtaataagtattttgatagtggagtagacgaccttaaaaatccacggcattacgttgtgtgggatatgaatctgaatagtcatatctattctgagtttgtagtcactgtcaaattgccttctaaaaccaaagattcctttgtatcgcaagaaaactgtcagaattcgtctgatctatcactggtgttgaactctagttcacctgattgtatttcacagaagagttccactgttggagcagcaagagtgcagtaattcagattctgtgatttgactcaataattgacatgattgcattattgagattataacttggagctgattatattcgttatctatgatagaaacctccaaatatgataagtttccctgtgaaaccatgctattttagccacgctggagttggttaaagcaccagttaacaacttccttttatgcataaaacaggagatgaacctggaggcacctccagcattgggaggtggatgtgcagcccccatgctaggagattcgatggaaaaggctccaagctcaccttggatgcctttctccatgctgtttgcagcgatctctaccaaagtgtctcctgagaatatggacgtgattattggttgctatgaagagtttaagagcaagaaaataagccgaggtgaactagtgaagaagctgaggcatgtagttggtgatagagtgctaatatcgacgataatgcgtctccaagataagcagttacctccagtggataagcgtgaggaaccagacacatcggcgtccaaggtggtggcggaaccatgagatgggtgtcaggaggtgggcgaggaatgcagaaagggaggaaccagccgacttgacatagaaaaccctgtgggaagcagcaactatgaagcctcttgcatcagtcttgtgcatggaggctgctgtttgttctctgtatcgtaggtgtctacgtttgcgaggaaattgtatccggtgtttctctttcttcaaattaaaccacgcacatgcagctgccgtactttttggaccattgaagtgtttcgtccgtgaaaaaggctccttttaccttcccgtttgccttcctaagagcatctccagtagttttgtaaaataaaactccctaaaagacgatgtagagagttgctaaataataatagagagtaaaaaattgcatgttcttcaatag

SEQ ID NO: 211229 - DNA, 2986 bp, Zea Mays
cttgaggacgaagggcggtgggtgaaacgcaattgctaataatgcaagtggggtcacggcaaaggtgtggcgcgtgcgtggacctcgccctcatctcgtctcctccggcggtccggcctgtccaataattctagtattccaccgccgcacacctcctgtcttccttcaccttcgcgctccgccgccgccgtcgattcgtgctgctctcacccctaacctgtccaacatcgccggggagggaagcagcagaagaagctccccttacctccggctatcgcctgaggataaagtggggtctgtaggggagtcttaggggggagcaaaagggataggatagggagagatgaagcaatcaatttcttcgtccgccttcgcccctgcttacgtccccgctactaaccctaggatcattctgtcttttctcgtttcttatccgactcttcttcgttttatgcctatcagttatgaggttgaacgccttcagaagcttctctactagattagtgtaaatagtagacttgttcgagtttagcttggctggaagaattagtctctggtccgtgtttatatctgctagcaataatggctgcgatgaacggagaggtattgggtgaatgtggaaggaacataaatagtctcaagagaaagcgggagagccccgctgcatatgctgctggcgtattctgcacctctgaattgcatcagcatactgtcaatgattctgctgttaggtttcatcttgataaagaccgtaaggcaaagatcgtgtgccacttcaacaagcaggttttgcagagctataagaaattcatgagtagtgcaccacctaagcgtattttgcttcgccaaggtgctgtctggaaagactttccagaaaagattgtcaaattggcccaagctgacttcagggcaaaaaagatgatcacagaaacaggatatcagaaccagctatttttgctggattttgcccatatgacattcatagacacaaagacaggttttcagaggccaattgcttggatcgatgaaaatgaaaagtgctacttcccggaatcatttatacaagatcagaagttatttatgaagaaagattttggcaacggaaatcatgagtacattagtgaagagcgaaatgggacacgagaaacgaatcaccagtttggagcatcagaaagttctgctgaaagctcaaactttgagtcaagtattggagatgtttctagtcctaagagagctagggctgaaaagaatttcattgtaaaaaaatattgtgatatgggagaagctattggagaaaatgagtcatgcactttgttgcctacagcctgtaacctactaccacaccaagctaatctgggtgaggtatcccgtgctcagcgcactattgaagccgtggagaagctgttgctgcaggggatgggttcagttattgaatccaaggacattattggaatctacaggactccattattggatgaccacggacaagtccgttaccatattcaccaaaagcaagtacaggttaccggatgtcatcgtggaaacgcaaatgtccgttatgcatggcttccttgctccaaaagcactgtgcatgtaatgatgctgaatggtgttttgcaagttgataagcctcccaataagtgtgcagcctatggagagggcactctccttacaccagcaaatcgttcggatgcctgtgtgaaatactctgatgttgatgaaaatggcattgtccgtatgatgttgtgccgtgtaataatggggaacgtagaaatagttcaccctggatctaagcagtgccaacctagtaataagtattttgatagtggagtagacgaccttaaaaatccacggcattacgttgtgtgggatatgaatctgaatagtcatatctattctgagtttgtagtcactgtcaaattgccttctaaaaccaaagattcctttgtatcgcaagaaaactgtcagaattcgtctgatctatcactggtgttgaactctagttcacctgattgtatttcacagaagagttccactgttggagcagcaagagtgcagtaattcagattctgtgatttgactcaataattgacatgattgcattattgagattataacttggagctgattatattcgttatctatgatagaaacctccaaatatgataagtttccctgtgaaaccatgctattttagccacgctggagttggttaaagcaccagttaacaacttccttttatgcataaaacaggagatgaacctggaggcacctccagcattgggaggtggatgtgcagcccccatgctaggagattcgatggaaaaggctccaagctcaccttggatgcctttctccatgctgtttgcagcgatctctaccaaagtgtctcctgagaatatggacgtgattattggttgctatgaagagtttaagagcaagaaaataagccgaggtgaactagtgaagaagctgaggcatgtagttggtgatagagtgctaatatcgacgataatgcgtctccaagataagttacctccagtggataagcgtgaggaaccagacacatcggcgtccaaggtggtggcggaaccatgagatgggtgtcaggaggtgggcgaggaatgcagaaagggaggaaccagccgacttgacatagaaaaccctgtgggaagcagcaactatgaagcctcttgcatcagtcttgtgcatggaggctgctgtttgttctctgtatcgtaggtgtctacgtttgcgaggaaattgtatccggtgtttctctttcttcaaattaaaccacgcacatgcagctgccgtactttttggaccattgaagtgtttcgtccgtgaaaaaggctccttttaccttcccgtttgccttcctaagagcatctccagtagttttgtaaaataaaactccctaaaagacgatgtagagagttgctaaataataatagagagtaaaaaattgcatgttcttcaatag

SEQ ID NO: 211230 - DNA, 4420 bp, Zea Mays
ctactaagtactaatagtaccctagagccttagatttaattgatatggttcatctgttgtatttgtttggcaacctgtgagaacaggacgagaagaaccaatggttccgatggatctatattgttatacattgccgctttgattgctgatcttcttctgctgccactacttggatggagaatgccatcaagttaaaggttacaatttgaactgctggcaatggggcctcattgttccttcatcttgatcctactgctatgcttcacccccagctctgctttgactggacataatgatataaatacattgttcaaactgagggacatggtcactgaagggaagggatttctccgtgactggtttgattcagaaaaagccccttgcagttggtcaggtataacttgtgtggaacatgctgtagtggatatagacttgtcatctgtgccaatttatgccccgttcccgttatgtgtcgggtcattccaatcactggctcgtctcaacttcagtggttgtgggttttctggcgagcttccggatgccttggggagcttgcacaatcttgagtaccttgatttgagccataaccagcttacaggggcccttcctgtttcattgtatggactgaagtcattgaaagaagtagtgcttgacaataatttcttttctggtcaattgagccctgctattgcacagcttgagtacctcaagaagttttctgtatcctcaaattctatctctggtgccattcctccagagttgggcagtttgcagaatctggagttcctggaccttcacatgaacgcacttaacgggtcgataccatcagctttgggtaatctgtctcagctcttgcaccttgatgctagccagaataatatctgcggctcgatatttccaggaataactgcaatggcaaacctagttacagttgatctctcttcaaatgctttggtggggccactacctagggagattggtcagctacggaatgctcaactgataatattgggacataatggtttcaatggaagcattccagaagagatcggtgaactaaagctgctggaagagctcgatgtccctggatgcaagctcacaggcatcccttggacagttggtgatcttagaagtttgagaaagcttgatatttcagggaatgatttcaatactgaacttccggcatctattggcaagctgggaaatctgactcgtctatatgcaaggagtgctgggcttactgggaatattccgagagaacttggtaactgcaagaagcttgtctttgttgatctcaatggcaactccttttctggccctatacctggagaacttgcaggtttagaagccattgtcacattagatgtgcaagggaacaatctatctggtcccattccagagtggatccggaattggacgaaccttcgttcaatatatctggcgcagaacatgttcgatggacccctgccagtactgccattgcagcatctagttattttttctgcagaaaccaacatgctatcaggttctattcctgatgagatctgtcaggccaaatcactgcagtcactcttgttgcacaacaacaatctgactgggaatatcatggaggcatttaaagggtgcaagaaccttacggaacttaacctgcaaggaaaccatcttcatggtgagataccacattacttgtctgagctaccactagtaacagtggaattggcccaaaacaacttcacaggaaagctgccagagaaattgtgggaatcatcaactattctggagatcacactcagctacaatcagcttactggccctatacctgaaagcatcggtagactctccagtttgcagaggctacagatcgacagtaactacttagaagggcctattccgcggtcaatcggctctctaaggaatctgacaaatctctctctatggggcaataggctgtctgggaacattccacttgagctcttcaactgcagaaaccttgtcaccttggatctaagttctaacaatttgtctggccacatcccgagtgccatatcacacttgacatttctcaacagcttgaacttgtccaataaccagctgtccagtgctatacctgctgagatctgtgttggatttgggagtgcagctcaccctgactcagagtttatccagcatcatggtttgcttgatctttcatacaacagattgactggtcatataccagcagcgatcaagaattgtgttatggttacagtcctcaacctccaaggaaatatgctaagtggtgccattccaccagagctttcagaactgcctaatgttacatccatctatctttctcataacacattagttggccccatacttccttggtctgtaccgtcggttcaactgcagggcctttttctctctaataaccacttaagtggctccattcctgctgagataggtcaaatacttcccaaaatcgaaaagctagacttatccagtaatgcacttactggaacactacccgactctttactctgcatcaattacttaacctatctggatatcagcaataacagcctctctggacaaatcccattgtcttgtcctaaagaaaaagaggcatcgagctccctgatattgttcaatgggagcagtaaccatttctcagggaacctagatgagtctatttcaaacttcacacaactgtcttttcttgatatccacaacaacagcctcactggaagtttgcccttctcactttctgatctcagttatttaaactatcttgacctctcaagcaatgacttcaatggccccgccccttgtggtatctgcaatatagttggcctcacatttgccgacttctctggtaatcacattggcatgagcggcttagtggattgtgctgcagaaggcttttgtactggaaagggttttgatcggaaggcacttaattcatctgatagagttcgaagagcagcaatcatttgtgttagtatactcactgttgtcattgtcttagtttttctggtggtttatctgaaacggaggctattgagaagcagacccttggctcttgtacctgtcagcaaggccaaggctaccattgaaccaacctcaagtgatgagctcctagggaagaagtttcgagaacccttgagtatcaatcttgcaacatttgagcatgcacttctgagggtcaccgcagatgatatccagaaagccacggagaatttcagtaaggtgcacattattggggatggtgggtttggcactgtctacagggcagcacttcctgaaggtcggagagtagcgatcaaaaggcttcatggtggccatcagttccaaggtgatcgtgaattcctggccgaaatggagacaattggaaaggtgaaacatcctaaccttgttcctctacttggctactgtgtatgtggtgatgaaaggttcctgatatacgagtacatggaaaatgggagccttgagatgtggctcaggaaccgggctgatgccatcgaaacacttggatggccagaccgcctgaagatatgtattggttctgcccgcggtctttcgttcctgcatcacggttttgtgccccatatcatccaccgtgacatgaagtcaagcaacattctattggacgagaactttgagccaagggtctctgattttggccttgcaaggataatcagtgcatgcgagactcatgtcagcactgacattgctggtacatttggctacatacctccagagtatgccctgacaatgaagtcctctacaaaaggcgacgtctacagctttggcgttgtcatgcttgagctgctcactggacggccacctacagggcaagaggaaggggaagggggtggaaaccttgtaggctgggtgcgatggatgatggcacatggcaaggaaggtgagctgtttgatccttgtttgcctgtctcaagcgtgtggcgggtacagatggcccatgtgctcgccattgcccgagactgcactgtggacgagccatggaagaggccaactatgctggaggtggtgaagggcctcaagatggccgaaacgatagaatgtggacctctggttgtgacagtcaccaaggacatgtaatgctgacggcatcaacgctgatgtatggaactgggtgttcagggaatgttgttcttgtgtcgatataataatgtaggctccttgttgctgtagctgtactggtgactgtaatgagaaactaacgctgctcatgttcaggctgtagttattgatgtaaccttttcatctggacccaagcaagcacttatgatatggcagggatcgtttaagcacaaaagatgcagtgactaggtttagctcttgagattttgcattctactacattttctactttgttgttctactgctcatggtcctccccagattcaacccatgccag

SEQ ID NO: 211231 - DNA, 4458 bp, Zea Mays
gtgcactggattggttcggtgcactggttctgtgggtggttcatggccccggcaaccacggggtgccggtggtaccatggcagggcgtgaaattctgccgttctagtcgttcgtggtgtggcggtggcgccgccttcgggcttcatccgggatctatattgttatacattgccgctttgattgctgatcttcttctgctgccactacttggatggagaatgccatcaagttaaaggttacaatttgaactgctggcaatggggcctcattgttccttcatcttgatcctactgctatgcttcacccccagctctgctttgactggacataatgatataaatacattgttcaaactgagggacatggtcactgaagggaagggatttctccgtgactggtttgattcagaaaaagccccttgcagttggtcaggtataacttgtgtggaacatgctgtagtggatatagacttgtcatctgtgccaatttatgccccgttcccgttatgtgtcgggtcattccaatcactggctcgtctcaacttcagtggttgtgggttttctggcgagcttccggatgccttggggagcttgcacaatcttgagtaccttgatttgagccataaccagcttacaggggcccttcctgtttcattgtatggactgaagtcattgaaagaagtagtgcttgacaataatttcttttctggtcaattgagccctgctattgcacagcttgagtacctcaagaagttttctgtatcctcaaattctatctctggtgccattcctccagagttgggcagtttgcagaatctggagttcctggaccttcacatgaacgcacttaacgggtcgataccatcagctttgggtaatctgtctcagctcttgcaccttgatgctagccagaataatatctgcggctcgatatttccaggaataactgcaatggcaaacctagttacagttgatctctcttcaaatgctttggtggggccactacctagggagattggtcagctacggaatgctcaactgataatattgggacataatggtttcaatggaagcattccagaagagatcggtgaactaaagctgctggaagagctcgatgtccctggatgcaagctcacaggcatcccttggacagttggtgatcttagaagtttgagaaagcttgatatttcagggaatgatttcaatactgaacttccggcatctattggcaagctgggaaatctgactcgtctatatgcaaggagtgctgggcttactgggaatattccgagagaacttggtaactgcaagaagcttgtctttgttgatctcaatggcaactccttttctggccctatacctggagaacttgcaggtttagaagccattgtcacattagatgtgcaagggaacaatctatctggtcccattccagagtggatccggaattggacgaaccttcgttcaatatatctggcgcagaacatgttcgatggacccctgccagtactgccattgcagcatctagttattttttctgcagaaaccaacatgctatcaggttctattcctgatgagatctgtcaggccaaatcactgcagtcactcttgttgcacaacaacaatctgactgggaatatcatggaggcatttaaagggtgcaagaaccttacggaacttaacctgcaaggaaaccatcttcatggtgagataccacattacttgtctgagctaccactagtaacagtggaattggcccaaaacaacttcacaggaaagctgccagagaaattgtgggaatcatcaactattctggagatcacactcagctacaatcagcttactggccctatacctgaaagcatcggtagactctccagtttgcagaggctacagatcgacagtaactacttagaagggcctattccgcggtcaatcggctctctaaggaatctgacaaatctctctctatggggcaataggctgtctgggaacattccacttgagctcttcaactgcagaaaccttgtcaccttggatctaagttctaacaatttgtctggccacatcccgagtgccatatcacacttgacatttctcaacagcttgaacttgtccaataaccagctgtccagtgctatacctgctgagatctgtgttggatttgggagtgcagctcaccctgactcagagtttatccagcatcatggtttgcttgatctttcatacaacagattgactggtcatataccagcagcgatcaagaattgtgttatggttacagtcctcaacctccaaggaaatatgctaagtggtgccattccaccagagctttcagaactgcctaatgttacatccatctatctttctcataacacattagttggccccatacttccttggtctgtaccgtcggttcaactgcagggcctttttctctctaataaccacttaagtggctccattcctgctgagataggtcaaatacttcccaaaatcgaaaagctagacttatccagtaatgcacttactggaacactacccgactctttactctgcatcaattacttaacctatctggatatcagcaataacagcctctctggacaaatcccattgtcttgtcctaaagaaaaagaggcatcgagctccctgatattgttcaatgggagcagtaaccatttctcagggaacctagatgagtctatttcaaacttcacacaactgtcttttcttgatatccacaacaacagcctcactggaagtttgcccttctcactttctgatctcagttatttaaactatcttgacctctcaagcaatgacttcaatggccccgccccttgtggtatctgcaatatagttggcctcacatttgccgacttctctggtaatcacattggcatgagcggcttagtggattgtgctgcagaaggcttttgtactggaaagggttttgatcggaaggcacttaattcatctgatagagttcgaagagcagcaatcatttgtgttagtatactcactgttgtcattgtcttagtttttctggtggtttatctgaaacggaggctattgagaagcagacccttggctcttgtacctgtcagcaaggccaaggctaccattgaaccaacctcaagtgatgagctcctagggaagaagtttcgagaacccttgagtatcaatcttgcaacatttgagcatgcacttctgagggtcaccgcagatgatatccagaaagccacggagaatttcagtaaggtgcacattattggggatggtgggtttggcactgtctacagggcagcacttcctgaaggtcggagagtagcgatcaaaaggcttcatggtggccatcagttccaaggtgatcgtgaattcctggccgaaatggagacaattggaaaggtgaaacatcctaaccttgttcctctacttggctactgtgtatgtggtgatgaaaggttcctgatatacgagtacatggaaaatgggagccttgagatgtggctcaggaaccgggctgatgccatcgaaacacttggatggccagaccgcctgaagatatgtattggttctgcccgcggtctttcgttcctgcatcacggttttgtgccccatatcatccaccgtgacatgaagtcaagcaacattctattggacgagaactttgagccaagggtctctgattttggccttgcaaggataatcagtgcatgcgagactcatgtcagcactgacattgctggtacatttggctacatacctccagagtatgccctgacaatgaagtcctctacaaaaggcgacgtctacagctttggcgttgtcatgcttgagctgctcactggacggccacctacagggcaagaggaaggggaagggggtggaaaccttgtaggctgggtgcgatggatgatggcacatggcaaggaaggtgagctgtttgatccttgtttgcctgtctcaagcgtgtggcgggtacagatggcccatgtgctcgccattgcccgagactgcactgtggacgagccatggaagaggccaactatgctggaggtggtgaagggcctcaagatggccgaaacgatagaatgtggacctctggttgtgacagtcaccaaggacatgtaatgctgacggcatcaacgctgatgtatggaactgggtgttcagggaatgttgttcttgtgtcgatataataatgtaggctccttgttgctgtagctgtactggtgactgtaatgagaaactaacgctgctcatgttcaggctgtagttattgatgtaaccttttcatctggacccaagcaagcacttatgatatggcagggatcgtttaagcacaaaagatgcagtgactaggtttagctcttgagattttgcattctactacattttctactttgttgttctactgctcatggtcctccccagattcaacccatgccag

SEQ ID NO: 211232 - DNA, 4451 bp, Zea Mays
cagggtttgagaggggcagatgcgccgcggtgcccgcagtagatgccgcggtgtcggttcggtgttgccttgcgttgctcgtgcttgtggcgcttctgctgctgctgagttctcccgcttcttcgcggcctttccccttgtcggatctatattgttatacattgccgctttgattgctgatcttcttctgctgccactacttggatggagaatgccatcaagttaaaggttacaatttgaactgctggcaatggggcctcattgttccttcatcttgatcctactgctatgcttcacccccagctctgctttgactggacataatgatataaatacattgttcaaactgagggacatggtcactgaagggaagggatttctccgtgactggtttgattcagaaaaagccccttgcagttggtcaggtataacttgtgtggaacatgctgtagtggatatagacttgtcatctgtgccaatttatgccccgttcccgttatgtgtcgggtcattccaatcactggctcgtctcaacttcagtggttgtgggttttctggcgagcttccggatgccttggggagcttgcacaatcttgagtaccttgatttgagccataaccagcttacaggggcccttcctgtttcattgtatggactgaagtcattgaaagaagtagtgcttgacaataatttcttttctggtcaattgagccctgctattgcacagcttgagtacctcaagaagttttctgtatcctcaaattctatctctggtgccattcctccagagttgggcagtttgcagaatctggagttcctggaccttcacatgaacgcacttaacgggtcgataccatcagctttgggtaatctgtctcagctcttgcaccttgatgctagccagaataatatctgcggctcgatatttccaggaataactgcaatggcaaacctagttacagttgatctctcttcaaatgctttggtggggccactacctagggagattggtcagctacggaatgctcaactgataatattgggacataatggtttcaatggaagcattccagaagagatcggtgaactaaagctgctggaagagctcgatgtccctggatgcaagctcacaggcatcccttggacagttggtgatcttagaagtttgagaaagcttgatatttcagggaatgatttcaatactgaacttccggcatctattggcaagctgggaaatctgactcgtctatatgcaaggagtgctgggcttactgggaatattccgagagaacttggtaactgcaagaagcttgtctttgttgatctcaatggcaactccttttctggccctatacctggagaacttgcaggtttagaagccattgtcacattagatgtgcaagggaacaatctatctggtcccattccagagtggatccggaattggacgaaccttcgttcaatatatctggcgcagaacatgttcgatggacccctgccagtactgccattgcagcatctagttattttttctgcagaaaccaacatgctatcaggttctattcctgatgagatctgtcaggccaaatcactgcagtcactcttgttgcacaacaacaatctgactgggaatatcatggaggcatttaaagggtgcaagaaccttacggaacttaacctgcaaggaaaccatcttcatggtgagataccacattacttgtctgagctaccactagtaacagtggaattggcccaaaacaacttcacaggaaagctgccagagaaattgtgggaatcatcaactattctggagatcacactcagctacaatcagcttactggccctatacctgaaagcatcggtagactctccagtttgcagaggctacagatcgacagtaactacttagaagggcctattccgcggtcaatcggctctctaaggaatctgacaaatctctctctatggggcaataggctgtctgggaacattccacttgagctcttcaactgcagaaaccttgtcaccttggatctaagttctaacaatttgtctggccacatcccgagtgccatatcacacttgacatttctcaacagcttgaacttgtccaataaccagctgtccagtgctatacctgctgagatctgtgttggatttgggagtgcagctcaccctgactcagagtttatccagcatcatggtttgcttgatctttcatacaacagattgactggtcatataccagcagcgatcaagaattgtgttatggttacagtcctcaacctccaaggaaatatgctaagtggtgccattccaccagagctttcagaactgcctaatgttacatccatctatctttctcataacacattagttggccccatacttccttggtctgtaccgtcggttcaactgcagggcctttttctctctaataaccacttaagtggctccattcctgctgagataggtcaaatacttcccaaaatcgaaaagctagacttatccagtaatgcacttactggaacactacccgactctttactctgcatcaattacttaacctatctggatatcagcaataacagcctctctggacaaatcccattgtcttgtcctaaagaaaaagaggcatcgagctccctgatattgttcaatgggagcagtaaccatttctcagggaacctagatgagtctatttcaaacttcacacaactgtcttttcttgatatccacaacaacagcctcactggaagtttgcccttctcactttctgatctcagttatttaaactatcttgacctctcaagcaatgacttcaatggccccgccccttgtggtatctgcaatatagttggcctcacatttgccgacttctctggtaatcacattggcatgagcggcttagtggattgtgctgcagaaggcttttgtactggaaagggttttgatcggaaggcacttaattcatctgatagagttcgaagagcagcaatcatttgtgttagtatactcactgttgtcattgtcttagtttttctggtggtttatctgaaacggaggctattgagaagcagacccttggctcttgtacctgtcagcaaggccaaggctaccattgaaccaacctcaagtgatgagctcctagggaagaagtttcgagaacccttgagtatcaatcttgcaacatttgagcatgcacttctgagggtcaccgcagatgatatccagaaagccacggagaatttcagtaaggtgcacattattggggatggtgggtttggcactgtctacagggcagcacttcctgaaggtcggagagtagcgatcaaaaggcttcatggtggccatcagttccaaggtgatcgtgaattcctggccgaaatggagacaattggaaaggtgaaacatcctaaccttgttcctctacttggctactgtgtatgtggtgatgaaaggttcctgatatacgagtacatggaaaatgggagccttgagatgtggctcaggaaccgggctgatgccatcgaaacacttggatggccagaccgcctgaagatatgtattggttctgcccgcggtctttcgttcctgcatcacggttttgtgccccatatcatccaccgtgacatgaagtcaagcaacattctattggacgagaactttgagccaagggtctctgattttggccttgcaaggataatcagtgcatgcgagactcatgtcagcactgacattgctggtacatttggctacatacctccagagtatgccctgacaatgaagtcctctacaaaaggcgacgtctacagctttggcgttgtcatgcttgagctgctcactggacggccacctacagggcaagaggaaggggaagggggtggaaaccttgtaggctgggtgcgatggatgatggcacatggcaaggaaggtgagctgtttgatccttgtttgcctgtctcaagcgtgtggcgggtacagatggcccatgtgctcgccattgcccgagactgcactgtggacgagccatggaagaggccaactatgctggaggtggtgaagggcctcaagatggccgaaacgatagaatgtggacctctggttgtgacagtcaccaaggacatgtaatgctgacggcatcaacgctgatgtatggaactgggtgttcagggaatgttgttcttgtgtcgatataataatgtaggctccttgttgctgtagctgtactggtgactgtaatgagaaactaacgctgctcatgttcaggctgtagttattgatgtaaccttttcatctggacccaagcaagcacttatgatatggcagggatcgtttaagcacaaaagatgcagtgactaggtttagctcttgagattttgcattctactacattttctactttgttgttctactgctcatggtcctccccagattcaacccatgccag

SEQ ID NO: 211233 - DNA, 4581 bp, Zea Mays
ctcgaaggcaggagcccccacggaaaggcaaccgagaagccgagaaaacctcaaaaccccgccgcggccgtttcctcccatttcctgctgcccaacacaacaccgcctccctcccatcgtcgcccctcgcgcacggccaccaccagttcgtgcgtgaactccgcgtcccctctcggctctcgccgctcacgcgttcctcgtgcccgcgccacacaccgcgggggcacggcactgccgagaccggcattgtggagcgcccgcgaccccggcgaggatctatattgttatacattgccgctttgattgctgatcttcttctgctgccactacttggatggagaatgccatcaagttaaaggttacaatttgaactgctggcaatggggcctcattgttccttcatcttgatcctactgctatgcttcacccccagctctgctttgactggacataatgatataaatacattgttcaaactgagggacatggtcactgaagggaagggatttctccgtgactggtttgattcagaaaaagccccttgcagttggtcaggtataacttgtgtggaacatgctgtagtggatatagacttgtcatctgtgccaatttatgccccgttcccgttatgtgtcgggtcattccaatcactggctcgtctcaacttcagtggttgtgggttttctggcgagcttccggatgccttggggagcttgcacaatcttgagtaccttgatttgagccataaccagcttacaggggcccttcctgtttcattgtatggactgaagtcattgaaagaagtagtgcttgacaataatttcttttctggtcaattgagccctgctattgcacagcttgagtacctcaagaagttttctgtatcctcaaattctatctctggtgccattcctccagagttgggcagtttgcagaatctggagttcctggaccttcacatgaacgcacttaacgggtcgataccatcagctttgggtaatctgtctcagctcttgcaccttgatgctagccagaataatatctgcggctcgatatttccaggaataactgcaatggcaaacctagttacagttgatctctcttcaaatgctttggtggggccactacctagggagattggtcagctacggaatgctcaactgataatattgggacataatggtttcaatggaagcattccagaagagatcggtgaactaaagctgctggaagagctcgatgtccctggatgcaagctcacaggcatcccttggacagttggtgatcttagaagtttgagaaagcttgatatttcagggaatgatttcaatactgaacttccggcatctattggcaagctgggaaatctgactcgtctatatgcaaggagtgctgggcttactgggaatattccgagagaacttggtaactgcaagaagcttgtctttgttgatctcaatggcaactccttttctggccctatacctggagaacttgcaggtttagaagccattgtcacattagatgtgcaagggaacaatctatctggtcccattccagagtggatccggaattggacgaaccttcgttcaatatatctggcgcagaacatgttcgatggacccctgccagtactgccattgcagcatctagttattttttctgcagaaaccaacatgctatcaggttctattcctgatgagatctgtcaggccaaatcactgcagtcactcttgttgcacaacaacaatctgactgggaatatcatggaggcatttaaagggtgcaagaaccttacggaacttaacctgcaaggaaaccatcttcatggtgagataccacattacttgtctgagctaccactagtaacagtggaattggcccaaaacaacttcacaggaaagctgccagagaaattgtgggaatcatcaactattctggagatcacactcagctacaatcagcttactggccctatacctgaaagcatcggtagactctccagtttgcagaggctacagatcgacagtaactacttagaagggcctattccgcggtcaatcggctctctaaggaatctgacaaatctctctctatggggcaataggctgtctgggaacattccacttgagctcttcaactgcagaaaccttgtcaccttggatctaagttctaacaatttgtctggccacatcccgagtgccatatcacacttgacatttctcaacagcttgaacttgtccaataaccagctgtccagtgctatacctgctgagatctgtgttggatttgggagtgcagctcaccctgactcagagtttatccagcatcatggtttgcttgatctttcatacaacagattgactggtcatataccagcagcgatcaagaattgtgttatggttacagtcctcaacctccaaggaaatatgctaagtggtgccattccaccagagctttcagaactgcctaatgttacatccatctatctttctcataacacattagttggccccatacttccttggtctgtaccgtcggttcaactgcagggcctttttctctctaataaccacttaagtggctccattcctgctgagataggtcaaatacttcccaaaatcgaaaagctagacttatccagtaatgcacttactggaacactacccgactctttactctgcatcaattacttaacctatctggatatcagcaataacagcctctctggacaaatcccattgtcttgtcctaaagaaaaagaggcatcgagctccctgatattgttcaatgggagcagtaaccatttctcagggaacctagatgagtctatttcaaacttcacacaactgtcttttcttgatatccacaacaacagcctcactggaagtttgcccttctcactttctgatctcagttatttaaactatcttgacctctcaagcaatgacttcaatggccccgccccttgtggtatctgcaatatagttggcctcacatttgccgacttctctggtaatcacattggcatgagcggcttagtggattgtgctgcagaaggcttttgtactggaaagggttttgatcggaaggcacttaattcatctgatagagttcgaagagcagcaatcatttgtgttagtatactcactgttgtcattgtcttagtttttctggtggtttatctgaaacggaggctattgagaagcagacccttggctcttgtacctgtcagcaaggccaaggctaccattgaaccaacctcaagtgatgagctcctagggaagaagtttcgagaacccttgagtatcaatcttgcaacatttgagcatgcacttctgagggtcaccgcagatgatatccagaaagccacggagaatttcagtaaggtgcacattattggggatggtgggtttggcactgtctacagggcagcacttcctgaaggtcggagagtagcgatcaaaaggcttcatggtggccatcagttccaaggtgatcgtgaattcctggccgaaatggagacaattggaaaggtgaaacatcctaaccttgttcctctacttggctactgtgtatgtggtgatgaaaggttcctgatatacgagtacatggaaaatgggagccttgagatgtggctcaggaaccgggctgatgccatcgaaacacttggatggccagaccgcctgaagatatgtattggttctgcccgcggtctttcgttcctgcatcacggttttgtgccccatatcatccaccgtgacatgaagtcaagcaacattctattggacgagaactttgagccaagggtctctgattttggccttgcaaggataatcagtgcatgcgagactcatgtcagcactgacattgctggtacatttggctacatacctccagagtatgccctgacaatgaagtcctctacaaaaggcgacgtctacagctttggcgttgtcatgcttgagctgctcactggacggccacctacagggcaagaggaaggggaagggggtggaaaccttgtaggctgggtgcgatggatgatggcacatggcaaggaaggtgagctgtttgatccttgtttgcctgtctcaagcgtgtggcgggtacagatggcccatgtgctcgccattgcccgagactgcactgtggacgagccatggaagaggccaactatgctggaggtggtgaagggcctcaagatggccgaaacgatagaatgtggacctctggttgtgacagtcaccaaggacatgtaatgctgacggcatcaacgctgatgtatggaactgggtgttcagggaatgttgttcttgtgtcgatataataatgtaggctccttgttgctgtagctgtactggtgactgtaatgagaaactaacgctgctcatgttcaggctgtagttattgatgtaaccttttcatctggacccaagcaagcacttatgatatggcagggatcgtttaagcacaaaagatgcagtgactaggtttagctcttgagattttgcattctactacattttctactttgttgttctactgctcatggtcctccccagattcaacccatgccag

SEQ ID NO: 211234 - DNA, 4170 bp, Zea Mays
gcagaaaagagcatagtagctaaacctaaacccgatccgattattcaacaggcatcctcccccgacttccatttcgccaccccctacccgactccactgggcgctcgcgctcgcgcacgcgcacgcgcacgccgcagcccccctccgcagccgacgacgacgagcggaagggaagagggtcaactctcgatctccgcacggtccgtggggacgcacgcacggcgcgcgtggcggtctacccggtcgggggtcggatcctagctgaatcggggagatttgccggccaggaaggaaaacgacaagtgaaacgaagctgtacgtgttcaggtgatcggataatggctagtgatcggataatggttgacactttgaccgaggacaatggtggtgatgctagatcctcatcatctgaagagatgccaagtgaccaacagagtcatcctggggattctttagctgagtggaggtcaagtgagcaagttgagaatggaacaccatccacttcaccagcatactcagacaatgatgatgatgactgtggacctaggccttctgatctttatgggaagtttacatggagaattgataatttctcccaaatcaacaagagagagctaagaagtaattcctttgatgttggtggatttaagtggtatatcttaatttacccacaaggatgtgatgtatgcaatcacctctcactctttctttgtgttgccaaccatgataagctactcccaggatggagtcactttgcgcaatttacaatagctgtaattaatagagaccctaagaaatctaagtattctgatacactgcatcggttttggaagaaagagcatgattgggggtggaaaaagtttatggaactgtcaaaattacatgatggctttattgttgaggatgttcttaccatcaaagcccaagttcaagttatcagggagaagacagaccgtccatttcgttgccttgatggccattaccgaagggaactaattagggtgtatctatcaaatgttgaacaagtttgccggcgctttattgatgaaagaagaagcaagcttagcaggttgattgaggataaactggggtggtccagtttcagtggattctggctagcaatggatccaagtgtgcgtcgacacatgacaagggaaaagactgaaactatattgaaagttatagtgaaacaattctttatagagaaagaagttacatcaaccttggtaattgactctctatatagtggacttaaggcacttgaataccagagcaagaacaaaaaggcgatacctaaactaacagagacagatgctcggagcactccaatggtacttattgatcaggacatgtttgttttggctgatgatgtaatatttctgcttgaaagagctgcattggacacactgccacaccaacatttgcccacaaaagatgataaaagttcgcaaaaccgcacaaaggatggcaactcaggtcaggagttcagcaaagattctattgagcgtgatgatagacgacttatagagctaggctggaagacattggagcttttttccttagctcatatattcagccgaatacaagtggcacatcaagaggctgtggctttgaagcgccaagaggaacttattcgtgaagaagaagaagctgggctagctgaaattgaactcaaggcaaagcgtagtgccgctgaaaaggaaaaacgtgccaagaaaaaacaggcaaaacagaagaaaaatagtcgaaaaggtaataaggggaaaagtggcaagtccaacatcaataaggaaataattatggaccacagtcattcagatgatagaatattggatgatttttgtggacaaattgaagagatgcccttaaatgctgacaaccctgaagaagtttctgatatatctgacagtagagacgataattcagacatgcttcatgttgatattgaagaccgtgaatctagccctgttaattgggagatagatgcttcagaaactcaaactactattcctggaagtagtgaggtgcaaaatgaccatgcaggaaagaggacctctactgtggatgatagctcatcgtcttgttcatctgactcagtgccttcagttactgtgaatggatcatataaaggaggtgcctggacaagcgtcagatcctcatccaataggggaaacaacaggaggaataaggatactgaagcacgggcaggatttgcacaaggtggatcatgttcatcgcataatggttttataggctctggcagcaatgcctctggccactcaaaggaaagacacgaacctgaggatgataaagttgtcttgcagaggaagcaacatgcacaatggaacattgatatcattagctcctccaagtcaagaatggcagagtcttcattttcttctgtgagctctattaagaagcaacctcaaccaaattttttgctagaaagcaccaatagtttgaatcaccgtggaagcgaagcttctggcactgtgacttccactacaacagcgggtgcctcttcaaccccggccactcagttagttttgaataaaggacctgtatccagtgctgcaacccagaatgagaagccactacctctgcaggtgcttgtaccatccaaatctgaagtgcagaagcaggcttccctaactggcagtgcaactaccgaggccgtttcagtatcaaggcccttgactgccccacaagtccctgcagcaaaacaaagtgcaccagtcacttcaacagctcagaatgcaccttttctttctcgttcaatgagtgctgttgggcggttggggaatgaaccatctgccaatgctcctagtttcgttccccgttcacgaacatatcgcaatgccatgatggagaaaagttctggtggtggaagctgtttcacacatcagcaaggttcatcggagcaagcagttgcaccatggcaatcgatgtttacatcgcaacctttcattcggccatcagagaccttgtcttggaaagaggaaacattattgagatctgggtttacatttggaactgtgaagcccgagtcactgaacccatatcagggcagagaagagaactcacagcaagcgagcagcaacagcagtgattgtgcgccatcgagttcaaacatcagaagcgagatcgagaagctgaatttgagcggaagaccacgaagcaagcaactgttgtcagaaatttcgaccagatttactccctatcagccacaaggcttggtcgctgatgagttcccacacctagacatcatcaacgacttgctggatgaggagcagagtgacagaagaagggttcttcaacctgattttgttcaacagtcctatatgcctcatggtgccagcacacctgattatggtgagccatacttgtttgaccagtccgagcaatacttcgatgaggagcctccaaggttttatagtccattgagcagtgctcctcggaggttgagggacctgagctattcgcactttgatctcccatcacactccagcagcagccagtttgatgatctgatgatgagtcagtggccatacagccgcactgacatctccatgcctagttttgggtcagacacaagtggctacccctatcaggtgtgggatctcgcgaatggatcaagcaggtacccatcgtatcgccctgccaatgggcattgagagttttaatgattgcattgacaataatgtgtggttaagtccatgatgttcgcttctgagctgagtgtaattgtaatagttccccatagcagtgatataaagaattgttcctcagtttccttgttcaatcaatagttatatgacccccctcctccctcttttctctagttcagttttgcccagtggtaataaatctaagtcggctaaaatgatctggctaatcgtgttgtgaaatgtgtatgatgcaagcaaatggtagggtgtttttaagccatgccagtgcttcagctgatactacattaaactgggagtattctttgtttctccctctgacgagtgacgacgtgttattgatcgtctcatgttctctttgtatatttcagagtaaattctggatatagcccatggacataaactaattatttgatgcacactctggacctttggggtatgttttattccattgatggatatataagctataaagtaaaatgcg

SEQ ID NO: 211235 - DNA, 4145 bp, Zea Mays
gctaaacctaaacccgatccgattattcaacaggcatcctcccccgacttccatttcgccaccccctacccgactccactgggcgctcgcgctcgcgcacgcgcacgcgcacgccgcagcccccctccgcagccgacgacgacgagcggaagggaagagggtcaactctcgatctccgcacggtccgtggggacgcacgcacggcgcgcgtggcggtctacccggtcgggggtcggatcctagctgaatcggggagatttgccggccaggaaggaaaacgacaagtgaaacgaagctgtacgtgttcaggtgatcggataatggctagtgatcggataatggttgacactttgaccgaggacaatggtggtgatgctagatcctcatcatctgaagagatgccaagtgaccaacagagtcatcctggggattctttagctgagtggaggtcaagtgagcaagttgagaatggaacaccatccacttcaccagcatactcagacaatgatgatgatgactgtggacctaggccttctgatctttatgggaagtttacatggagaattgataatttctcccaaatcaacaagagagagctaagaagtaattcctttgatgttggtggatttaagtggtatatcttaatttacccacaaggatgtgatgtatgcaatcacctctcactctttctttgtgttgccaaccatgataagctactcccaggatggagtcactttgcgcaatttacaatagctgtaattaatagagaccctaagaaatctaagtattctgatacactgcatcggttttggaagaaagagcatgattgggggtggaaaaagtttatggaactgtcaaaattacatgatggctttattgttgaggatgttcttaccatcaaagcccaagttcaagttatcagacagaccgtccatttcgttgccttgatggccattaccgaagggaactaattagggtgtatctatcaaatgttgaacaagtttgccggcgctttattgatgaaagaagaagcaagcttagcaggttgattgaggataaactggggtggtccagtttcagtggattctggctagcaatggatccaagtgtgcgtcgacacatgacaagggaaaagactgaaactatattgaaagttatagtgaaacaattctttatagagaaagaagttacatcaaccttggtaattgactctctatatagtggacttaaggcacttgaataccagagcaagaacaaaaaggcgatacctaaactaacagagacagatgctcggagcactccaatggtacttattgatcaggacatgtttgttttggctgatgatgtaatatttctgcttgaaagagctgcattggacacactgccacaccaacatttgcccacaaaagatgataaaagttcgcaaaaccgcacaaaggatggcaactcaggtcaggagttcagcaaagattctattgagcgtgatgatagacgacttatagagctaggctggaagacattggagcttttttccttagctcatatattcagccgaatacaagtggcacatcaagaggctgtggctttgaagcgccaagaggaacttattcgtgaagaagaagaagctgggctagctgaaattgaactcaaggcaaagcgtagtgccgctgaaaaggaaaaacgtgccaagaaaaaacaggcaaaacagaagaaaaatagtcgaaaaggtaataaggggaaaagtggcaagtccaacatcaataaggaaataattatggaccacagtcattcagatgatagaatattggatgatttttgtggacaaattgaagagatgcccttaaatgctgacaaccctgaagaagtttctgatatatctgacagtagagacgataattcagacatgcttcatgttgatattgaagaccgtgaatctagccctgttaattgggagatagatgcttcagaaactcaaactactattcctggaagtagtgaggtgcaaaatgaccatgcaggaaagaggacctctactgtggatgatagctcatcgtcttgttcatctgactcagtgccttcagttactgtgaatggatcatataaaggaggtgcctggacaagcgtcagatcctcatccaataggggaaacaacaggaggaataaggatactgaagcacgggcaggatttgcacaaggtggatcatgttcatcgcataatggttttataggctctggcagcaatgcctctggccactcaaaggaaagacacgaacctgaggatgataaagttgtcttgcagaggaagcaacatgcacaatggaacattgatatcattagctcctccaagtcaagaatggcagagtcttcattttcttctgtgagctctattaagaagcaacctcaaccaaattttttgctagaaagcaccaatagtttgaatcaccgtggaagcgaagcttctggcactgtgacttccactacaacagcgggtgcctcttcaaccccggccactcagttagttttgaataaaggacctgtatccagtgctgcaacccagaatgagaagccactacctctgcaggtgcttgtaccatccaaatctgaagtgcagaagcaggcttccctaactggcagtgcaactaccgaggccgtttcagtatcaaggcccttgactgccccacaagtccctgcagcaaaacaaagtgcaccagtcacttcaacagctcagaatgcaccttttctttctcgttcaatgagtgctgttgggcggttggggaatgaaccatctgccaatgctcctagtttcgttccccgttcacgaacatatcgcaatgccatgatggagaaaagttctggtggtggaagctgtttcacacatcagcaaggttcatcggagcaagcagttgcaccatggcaatcgatgtttacatcgcaacctttcattcggccatcagagaccttgtcttggaaagaggaaacattattgagatctgggtttacatttggaactgtgaagcccgagtcactgaacccatatcagggcagagaagagaactcacagcaagcgagcagcaacagcagtgattgtgcgccatcgagttcaaacatcagaagcgagatcgagaagctgaatttgagcggaagaccacgaagcaagcaactgttgtcagaaatttcgaccagatttactccctatcagccacaaggcttggtcgctgatgagttcccacacctagacatcatcaacgacttgctggatgaggagcagagtgacagaagaagggttcttcaacctgattttgttcaacagtcctatatgcctcatggtgccagcacacctgattatggtgagccatacttgtttgaccagtccgagcaatacttcgatgaggagcctccaaggttttatagtccattgagcagtgctcctcggaggttgagggacctgagctattcgcactttgatctcccatcacactccagcagcagccagtttgatgatctgatgatgagtcagtggccatacagccgcactgacatctccatgcctagttttgggtcagacacaagtggctacccctatcaggtgtgggatctcgcgaatggatcaagcaggtacccatcgtatcgccctgccaatgggcattgagagttttaatgattgcattgacaataatgtgtggttaagtccatgatgttcgcttctgagctgagtgtaattgtaatagttccccatagcagtgatataaagaattgttcctcagtttccttgttcaatcaatagttatatgacccccctcctccctcttttctctagttcagttttgcccagtggtaataaatctaagtcggctaaaatgatctggctaatcgtgttgtgaaatgtgtatgatgcaagcaaatggtagggtgtttttaagccatgccagtgcttcagctgatactacattaaactgggagtattctttgtttctccctctgacgagtgacgacgtgttattgatcgtctcatgttctctttgtatatttcagagtaaattctggatatagcccatggacataaactaattatttgatgcacactctggacctttggggtatgttttattccattgatggatatataagctataaagtaaaatgcg

SEQ ID NO: 211236 - DNA, 3994 bp, Zea Mays
caggcatcctcccccgacttccatttcgccaccccctacccgactccactgggcgctcgcgctcgcgcacgcgcacgcgcacgccgcagcccccctccgcagccgacgacgacgagcggaagggaagagggtcaactctcgatctccgcacggtccgtggggacgcacgcacggcgcgcgtggcggtctacccggtcgggggtcggatcctagctgaatcggggagatttgccggccaggtgatcggataatggctagtgatcggataatggttgacactttgaccgaggacaatggtggtgatgctagatcctcatcatctgaagagatgccaagtgaccaacagagtcatcctggggattctttagctgagtggaggtcaagtgagcaagttgagaatggaacaccatccacttcaccagcatactcagacaatgatgatgatgactgtggacctaggccttctgatctttatgggaagtttacatggagaattgataatttctcccaaatcaacaagagagagctaagaagtaattcctttgatgttggtggatttaagtggtatatcttaatttacccacaaggatgtgatgtatgcaatcacctctcactctttctttgtgttgccaaccatgataagctactcccaggatggagtcactttgcgcaatttacaatagctgtaattaatagagaccctaagaaatctaagtattctgatacactgcatcggttttggaagaaagagcatgattgggggtggaaaaagtttatggaactgtcaaaattacatgatggctttattgttgaggatgttcttaccatcaaagcccaagttcaagttatcagggagaagacagaccgtccatttcgttgccttgatggccattaccgaagggaactaattagggtgtatctatcaaatgttgaacaagtttgccggcgctttattgatgaaagaagaagcaagcttagcaggttgattgaggataaactggggtggtccagtttcagtggattctggctagcaatggatccaagtgtgcgtcgacacatgacaagggaaaagactgaaactatattgaaagttatagtgaaacaattctttatagagaaagaagttacatcaaccttggtaattgactctctatatagtggacttaaggcacttgaataccagagcaagaacaaaaaggcgatacctaaactaacagagacagatgctcggagcactccaatggtacttattgatcaggacatgtttgttttggctgatgatgtaatatttctgcttgaaagagctgcattggacacactgccacaccaacatttgcccacaaaagatgataaaagttcgcaaaaccgcacaaaggatggcaactcaggtcaggagttcagcaaagattctattgagcgtgatgatagacgacttatagagctaggctggaagacattggagcttttttccttagctcatatattcagccgaatacaagtggcacatcaagaggctgtggctttgaagcgccaagaggaacttattcgtgaagaagaagaagctgggctagctgaaattgaactcaaggcaaagcgtagtgccgctgaaaaggaaaaacgtgccaagaaaaaacaggcaaaacagaagaaaaatagtcgaaaaggtaataaggggaaaagtggcaagtccaacatcaataaggaaataattatggaccacagtcattcagatgatagaatattggatgatttttgtggacaaattgaagagatgcccttaaatgctgacaaccctgaagaagtttctgatatatctgacagtagagacgataattcagacatgcttcatgttgatattgaagaccgtgaatctagccctctactgtggatgatagctcatcgtcttgttcatctgactcagtgccttcagttactgtgaatggatcatataaaggaggtgcctggacaagcgtcagatcctcatccaataggggaaacaacaggaggaataaggatactgaagcacgggcaggatttgcacaaggtggatcatgttcatcgcataatggttttataggctctggcagcaatgcctctggccactcaaaggaaagacacgaacctgaggatgataaagttgtcttgcagaggaagcaacatgcacaatggaacattgatatcattagctcctccaagtcaagaatggcagagtcttcattttcttctgtgagctctattaagaagcaacctcaaccaaattttttgctagaaagcaccaatagtttgaatcaccgtggaagcgaagcttctggcactgtgacttccactacaacagcgggtgcctcttcaaccccggccactcagttagttttgaataaaggacctgtatccagtgctgcaacccagaatgagaagccactacctctgcaggtgcttgtaccatccaaatctgaagtgcagaagcaggcttccctaactggcagtgcaactaccgaggccgtttcagtatcaaggcccttgactgccccacaagtccctgcagcaaaacaaagtgcaccagtcacttcaacagctcagaatgcaccttttctttctcgttcaatgagtgctgttgggcggttggggaatgaaccatctgccaatgctcctagtttcgttccccgttcacgaacatatcgcaatgccatgatggagaaaagttctggtggtggaagctgtttcacacatcagcaaggttcatcggagcaagcagttgcaccatggcaatcgatgtttacatcgcaacctttcattcggccatcagagaccttgtcttggaaagaggaaacattattgagatctgggtttacatttggaactgtgaagcccgagtcactgaacccatatcagggcagagaagagaactcacagcaagcgagcagcaacagcagtgattgtgcgccatcgagttcaaacatcagaagcgagatcgagaagctgaatttgagcggaagaccacgaagcaagcaactgttgtcagaaatttcgaccagatttactccctatcagccacaaggcttggtcgctgatgagttcccacacctagacatcatcaacgacttgctggatgaggagcagagtgacagaagaagggttcttcaacctgattttgttcaacagtcctatatgcctcatggtgccagcacacctgattatggtgagccatacttgtttgaccagtccgagcaatacttcgatgaggagcctccaaggttttatagtccattgagcagtgctcctcggaggttgagggacctgagctattcgcactttgatctcccatcacactccagcagcagccagtttgatgatctgatgatgagtcagtggccatacagccgcactgacatctccatgcctagttttgggtcagacacaagtggctacccctatcaggtgtgggatctcgcgaatggatcaagcaggtacccatcgtatcgccctgccaatgggcattgagagttttaatgattgcattgacaataatgtgtggttaagtccatgatgttcgcttctgagctgagtgtaattgtaatagttccccatagcagtgatataaagaattgttcctcagtttccttgttcaatcaatagttatatgacccccctcctccctcttttctctagttcagttttgcccagtggtaataaatctaagtcggctaaaatgatctggctaatcgtgttgtgaaatgtgtatgatgcaagcaaatggtagggtgtttttaagccatgccagtgcttcagctgatactacattaaactgggagtattctttgtttctccctctgacgagtgacgacgtgttattgatcgtctcatgttctctttgtatatttcagagtaaattctggatatagcccatggacataaactaattatttgatgcacactctggacctttggggtatgttttattccattgatggatatataagctataaagtaaaatgcg

SEQ ID NO: 211237 - DNA, 4125 bp, Zea Mays
gcatcctcccccgacttccatttcgccaccccctacccgactccactgggcgctcgcgctcgcgcacgcgcacgcgcacgccgcagcccccctccgcagccgacgacgacgagcggaagggaagagggtcaactctcgatctccgcacggtccgtggggacgcacgcacggcgcgcgtggcggtctacccggtcgggggtcggatcctagctgaatcggggagatttgccggccagctgcaggaaggaaaacgacaagtgaaacgaagctgtacgtgttcaggtgatcggataatggctagtgatcggataatggttgacactttgaccgaggacaatggtggtgatgctagatcctcatcatctgaagagatgccaagtgaccaacagagtcatcctggggattctttagctgagtggaggtcaagtgagcaagttgagaatggaacaccatccacttcaccagcatactcagacaatgatgatgatgactgtggacctaggccttctgatctttatgggaagtttacatggagaattgataatttctcccaaatcaacaagagagagctaagaagtaattcctttgatgttggtggatttaagtggtatatcttaatttacccacaaggatgtgatgtatgcaatcacctctcactctttctttgtgttgccaaccatgataagctactcccaggatggagtcactttgcgcaatttacaatagctgtaattaatagagaccctaagaaatctaagtattctgatacactgcatcggttttggaagaaagagcatgattgggggtggaaaaagtttatggaactgtcaaaattacatgatggctttattgttgaggatgttcttaccatcaaagcccaagttcaagttatcagggagaagacagaccgtccatttcgttgccttgatggccattaccgaagggaactaattagggtgtatctatcaaatgttgaacaagtttgccggcgctttattgatgaaagaagaagcaagcttagcaggttgattgaggataaactggggtggtccagtttcagtggattctggctagcaatggatccaagtgtgcgtcgacacatgacaagggaaaagactgaaactatattgaaagttatagtgaaacaattctttatagagaaagaagttacatcaaccttggtaattgactctctatatagtggacttaaggcacttgaataccagagcaagaacaaaaaggcgatacctaaactaacagagacagatgctcggagcactccaatggtacttattgatcaggacatgtttgttttggctgatgatgtaatatttctgcttgaaagagctgcattggacacactgccacaccaacatttgcccacaaaagatgataaaagttcgcaaaaccgcacaaaggatggcaactcaggtcaggagttcagcaaagattctattgagcgtgatgatagacgacttatagagctaggctggaagacattggagcttttttccttagctcatatattcagccgaatacaagtggcacatcaagaggctgtggctttgaagcgccaagaggaacttattcgtgaagaagaagaagctgggctagctgaaattgaactcaaggcaaagcgtagtgccgctgaaaaggaaaaacgtgccaagaaaaaacaggcaaaacagaagaaaaatagtcgaaaaggtaataaggggaaaagtggcaagtccaacatcaataaggaaataattatggaccacagtcattcagatgatagaatattggatgatttttgtggacaaattgaagagatgcccttaaatgctgacaaccctgaagaagtttctgatatatctgacagtagagacgataattcagacatgcttcatgttgatattgaagaccgtgaatctagccctgttaattgggagatagatgcttcagaaactcaaactactattcctggaagtagtgaggtgcaaaatgaccatgcaggaaagaggacctctactgtggatgatagctcatcgtcttgttcatctgactcagtgccttcagttactgtgaatggatcatataaaggaggtgcctggacaagcgtcagatcctcatccaataggggaaacaacaggaggaataaggatactgaagcacgggcaggatttgcacaaggtggatcatgttcatcgcataatggttttataggctctggcagcaatgcctctggccactcaaaggaaagacacgaacctgaggatgataaagttgtcttgcagaggaagcaacatgcacaatggaacattgatatcattagctcctccaagtcaagaatggcagagtcttcattttcttctgtgagctctattaagaagcaacctcaaccaaattttttgctagaaagcaccaatagtttgaatcaccgtggaagcgaagcttctggcactgtgacttccactacaacagcgggtgcctcttcaaccccggccactcagttagttttgaataaaggacctgtatccagtgctgcaacccagaatgagaagccactacctctgcaggtgcttgtaccatccaaatctgaagtgcagaagcaggcttccctaactggcagtgcaactaccgaggccgtttcagtatcaaggcccttgactgccccacaagtccctgcagcaaaacaaagtgcaccagtcacttcaacagctcagaatgcaccttttctttctcgttcaatgagtgctgttgggcggttggggaatgaaccatctgccaatgctcctagtttcgttccccgttcacgaacatatcgcaatgccatgatggagaaaagttctggtggtggaagctgtttcacacatcagcaaggttcatcggagcaagcagttgcaccatggcaatcgatgtttacatcgcaacctttcattcggccatcagagaccttgtcttggaaagaggaaacattattgagatctgggtttacatttggaactgtgaagcccgagtcactgaacccatatcagggcagagaagagaactcacagcaagcgagcagcaacagcagtgattgtgcgccatcgagttcaaacatcagaagcgagatcgagaagctgaatttgagcggaagaccacgaagcaagcaactgttgtcagaaatttcgaccagatttactccctatcagccacaaggcttggtcgctgatgagttcccacacctagacatcatcaacgacttgctggatgaggagcagagtgacagaagaagggttcttcaacctgattttgttcaacagtcctatatgcctcatggtgccagcacacctgattatggtgagccatacttgtttgaccagtccgagcaatacttcgatgaggagcctccaaggttttatagtccattgagcagtgctcctcggaggttgagggacctgagctattcgcactttgatctcccatcacactccagcagcagccagtttgatgatctgatgatgagtcagtggccatacagccgcactgacatctccatgcctagttttgggtcagacacaagtggctacccctatcaggtgtgggatctcgcgaatggatcaagcaggtacccatcgtatcgccctgccaatgggcattgagagttttaatgattgcattgacaataatgtgtggttaagtccatgatgttcgcttctgagctgagtgtaattgtaatagttccccatagcagtgatataaagaattgttcctcagtttccttgttcaatcaatagttatatgacccccctcctccctcttttctctagttcagttttgcccagtggtaataaatctaagtcggctaaaatgatctggctaatcgtgttgtgaaatgtgtatgatgcaagcaaatggtagggtgtttttaagccatgccagtgcttcagctgatactacattaaactgggagtattctttgtttctccctctgacgagtgacgacgtgttattgatcgtctcatgttctctttgtatatttcagagtaaattctggatatagcccatggacataaactaattatttgatgcacactctggacctttggggtatgttttattccattgatggatatataagctataaagtaaaatgcg

SEQ ID NO: 211238 - DNA, 4123 bp, Zea Mays
cctcccccgacttccatttcgccaccccctacccgactccactgggcgctcgcgctcgcgcacgcgcacgcgcacgccgcagcccccctccgcagccgacgacgacgagcggaagggaagagggtcaactctcgatctccgcacggtccgtggggacgcacgcacggcgcgcgtggcggtctacccggtcgggggtcggatcctagctgaatcggggagatttgccggccaggaaggaaaacgacaagtgaaacgaagctgtacgtgttcaggtgatcggataatggctagtgatcggataatggttgacactttgaccgaggacaatggtggtgatgctagatcctcatcatctgaagagatgccaagtgaccaacagagtcatcctggggattctttagctgagtggaggtcaagtgagcaagttgagaatggaacaccatccacttcaccagcatactcagacaatgatgatgatgactgtggacctaggccttctgatctttatgggaagtttacatggagaattgataatttctcccaaatcaacaagagagagctaagaagtaattcctttgatgttggtggatttaagtggtatatcttaatttacccacaaggatgtgatgtatgcaatcacctctcactctttctttgtgttgccaaccatgataagctactcccaggatggagtcactttgcgcaatttacaatagctgtaattaatagagaccctaagaaatctaagtattctgcatttcagatacactgcatcggttttggaagaaagagcatgattgggggtggaaaaagtttatggaactgtcaaaattacatgatggctttattgttgaggatgttcttaccatcaaagcccaagttcaagttatcagggagaagacagaccgtccatttcgttgccttgatggccattaccgaagggaactaattagggtgtatctatcaaatgttgaacaagtttgccggcgctttattgatgaaagaagaagcaagcttagcaggttgattgaggataaactggggtggtccagtttcagtggattctggctagcaatggatccaagtgtgcgtcgacacatgacaagggaaaagactgaaactatattgaaagttatagtgaaacaattctttatagagaaagaagttacatcaaccttggtaattgactctctatatagtggacttaaggcacttgaataccagagcaagaacaaaaaggcgatacctaaactaacagagacagatgctcggagcactccaatggtacttattgatcaggacatgtttgttttggctgatgatgtaatatttctgcttgaaagagctgcattggacacactgccacaccaacatttgcccacaaaagatgataaaagttcgcaaaaccgcacaaaggatggcaactcaggtcaggagttcagcaaagattctattgagcgtgatgatagacgacttatagagctaggctggaagacattggagcttttttccttagctcatatattcagccgaatacaagtggcacatcaagaggctgtggctttgaagcgccaagaggaacttattcgtgaagaagaagaagctgggctagctgaaattgaactcaaggcaaagcgtagtgccgctgaaaaggaaaaacgtgccaagaaaaaacaggcaaaacagaagaaaaatagtcgaaaaggtaataaggggaaaagtggcaagtccaacatcaataaggaaataattatggaccacagtcattcagatgatagaatattggatgatttttgtggacaaattgaagagatgcccttaaatgctgacaaccctgaagaagtttctgatatatctgacagtagagacgataattcagacatgcttcatgttgatattgaagaccgtgaatctagccctgttaattgggagatagatgcttcagaaactcaaactactattcctggaagtagtgaggtgcaaaatgaccatgcaggaaagaggacctctactgtggatgatagctcatcgtcttgttcatctgactcagtgccttcagttactgtgaatggatcatataaaggaggtgcctggacaagcgtcagatcctcatccaataggggaaacaacaggaggaataaggatactgaagcacgggcaggatttgcacaaggtggatcatgttcatcgcataatggttttataggctctggcagcaatgcctctggccactcaaaggaaagacacgaacctgaggatgataaagttgtcttgcagaggaagcaacatgcacaatggaacattgatatcattagctcctccaagtcaagaatggcagagtcttcattttcttctgtgagctctattaagaagcaacctcaaccaaattttttgctagaaagcaccaatagtttgaatcaccgtggaagcgaagcttctggcactgtgacttccactacaacagcgggtgcctcttcaaccccggccactcagttagttttgaataaaggacctgtatccagtgctgcaacccagaatgagaagccactacctctgcaggtgcttgtaccatccaaatctgaagtgcagaagcaggcttccctaactggcagtgcaactaccgaggccgtttcagtatcaaggcccttgactgccccacaagtccctgcagcaaaacaaagtgcaccagtcacttcaacagctcagaatgcaccttttctttctcgttcaatgagtgctgttgggcggttggggaatgaaccatctgccaatgctcctagtttcgttccccgttcacgaacatatcgcaatgccatgatggagaaaagttctggtggtggaagctgtttcacacatcagcaaggttcatcggagcaagcagttgcaccatggcaatcgatgtttacatcgcaacctttcattcggccatcagagaccttgtcttggaaagaggaaacattattgagatctgggtttacatttggaactgtgaagcccgagtcactgaacccatatcagggcagagaagagaactcacagcaagcgagcagcaacagcagtgattgtgcgccatcgagttcaaacatcagaagcgagatcgagaagctgaatttgagcggaagaccacgaagcaagcaactgttgtcagaaatttcgaccagatttactccctatcagccacaaggcttggtcgctgatgagttcccacacctagacatcatcaacgacttgctggatgaggagcagagtgacagaagaagggttcttcaacctgattttgttcaacagtcctatatgcctcatggtgccagcacacctgattatggtgagccatacttgtttgaccagtccgagcaatacttcgatgaggagcctccaaggttttatagtccattgagcagtgctcctcggaggttgagggacctgagctattcgcactttgatctcccatcacactccagcagcagccagtttgatgatctgatgatgagtcagtggccatacagccgcactgacatctccatgcctagttttgggtcagacacaagtggctacccctatcaggtgtgggatctcgcgaatggatcaagcaggtacccatcgtatcgccctgccaatgggcattgagagttttaatgattgcattgacaataatgtgtggttaagtccatgatgttcgcttctgagctgagtgtaattgtaatagttccccatagcagtgatataaagaattgttcctcagtttccttgttcaatcaatagttatatgacccccctcctccctcttttctctagttcagttttgcccagtggtaataaatctaagtcggctaaaatgatctggctaatcgtgttgtgaaatgtgtatgatgcaagcaaatggtagggtgtttttaagccatgccagtgcttcagctgatactacattaaactgggagtattctttgtttctccctctgacgagtgacgacgtgttattgatcgtctcatgttctctttgtatatttcagagtaaattctggatatagcccatggacataaactaattatttgatgcacactctggacctttggggtatgttttattccattgatggatatataagctataaagtaaaatgcg

SEQ ID NO: 211239 - DNA, 4199 bp, Zea Mays
ctcccccgacttccatttcgccaccccctacccgactccactgggcgctcgcgctcgcgcacgcgcacgcgcacgccgcagcccccctccgcagccgacgacgacgagcggaagggaagagggtcaactctcgatctccgcacggtccgtggggacgcacgcacggcgcgcgtggcggtctacccggtcgggggtcggatcctagctgaatcggggagatttgccggccaggaaggaaaacgacaagtgaaacgaagctgtacgtgttcaggtgatcggataatggctagtgatcggataatggttgacactttgaccgaggacaatggtggtgatgctagatcctcatcatctgaagagatgccaagtgaccaacagagtcatcctggggattctttagctgagtggaggtcaagtgagcaagttgagaatggaacaccatccacttcaccagcatactcagacaatgatgatgatgactgtggacctaggccttctgatctttatgggaagtttacatggagaattgataatttctcccaaatcaacaagagagagctaagaagtaattcctttgatgttggtggatttaagtggtatatcttaatttacccacaaggatgtgatgtatgcaatcacctctcactctttctttgtgttgccaaccatgataagctactcccaggatggagtcactttgcgcaatttacaatagctgtaattaatagagaccctaagaaatctaagtattctgatacactgcatcggttttggaagaaagagcatgattgggggtggaaaaagtttatggaactgtcaaaattacatgatggctttattgttgaggatgttcttaccatcaaagcccaagttcaagttatcagggagaagacagaccgtccatttcgttgccttgatggccattaccgaagggaactaattagggtgtatctatcaaatgttgaacaagtttgccggcgctttattgatgaaagaagaagcaagcttagcaggttgattgaggataaactggggtggtccagtttcagtggattctggctagcaatggatccaagtgtgcgtcgacacatgacaagggaaaagactgaaactatattgaaagttatagtgaaacaattctttatagagaaagaagttacatcaaccttggtaattgactctctatatagtggacttaaggcacttgaataccagagcaagaacaaaaaggcgatacctaaactaacagagacagatgctcggagcactccaatggtacttattgatcaggacatgtttgttttggctgatgatgtaatatttctgcttgaaagagctgcattggacacactgccacaccaacatttgcccacaaaagatgataaaagttcgcaaaaccgcacaaagtattgctctgaaatggggccatgacttgggaaatcgtctatgatttgtatcttaacgagttatgaactgaaaaagaagagtacacgatggcaactcaggtcaggagttcagcaaagattctattgagcgtgatgatagacgacttatagagctaggctggaagacattggagcttttttccttagctcatatattcagccgaatacaagtggcacatcaagaggctgtggctttgaagcgccaagaggaacttattcgtgaagaagaagaagctgggctagctgaaattgaactcaaggcaaagcgtagtgccgctgaaaaggaaaaacgtgccaagaaaaaacaggcaaaacagaagaaaaatagtcgaaaaggtaataaggggaaaagtggcaagtccaacatcaataaggaaataattatggaccacagtcattcagatgatagaatattggatgatttttgtggacaaattgaagagatgcccttaaatgctgacaaccctgaagaagtttctgatatatctgacagtagagacgataattcagacatgcttcatgttgatattgaagaccgtgaatctagccctgttaattgggagatagatgcttcagaaactcaaactactattcctggaagtagtgaggtgcaaaatgaccatgcaggaaagaggacctctactgtggatgatagctcatcgtcttgttcatctgactcagtgccttcagttactgtgaatggatcatataaaggaggtgcctggacaagcgtcagatcctcatccaataggggaaacaacaggaggaataaggatactgaagcacgggcaggatttgcacaaggtggatcatgttcatcgcataatggttttataggctctggcagcaatgcctctggccactcaaaggaaagacacgaacctgaggatgataaagttgtcttgcagaggaagcaacatgcacaatggaacattgatatcattagctcctccaagtcaagaatggcagagtcttcattttcttctgtgagctctattaagaagcaacctcaaccaaattttttgctagaaagcaccaatagtttgaatcaccgtggaagcgaagcttctggcactgtgacttccactacaacagcgggtgcctcttcaaccccggccactcagttagttttgaataaaggacctgtatccagtgctgcaacccagaatgagaagccactacctctgcaggtgcttgtaccatccaaatctgaagtgcagaagcaggcttccctaactggcagtgcaactaccgaggccgtttcagtatcaaggcccttgactgccccacaagtccctgcagcaaaacaaagtgcaccagtcacttcaacagctcagaatgcaccttttctttctcgttcaatgagtgctgttgggcggttggggaatgaaccatctgccaatgctcctagtttcgttccccgttcacgaacatatcgcaatgccatgatggagaaaagttctggtggtggaagctgtttcacacatcagcaaggttcatcggagcaagcagttgcaccatggcaatcgatgtttacatcgcaacctttcattcggccatcagagaccttgtcttggaaagaggaaacattattgagatctgggtttacatttggaactgtgaagcccgagtcactgaacccatatcagggcagagaagagaactcacagcaagcgagcagcaacagcagtgattgtgcgccatcgagttcaaacatcagaagcgagatcgagaagctgaatttgagcggaagaccacgaagcaagcaactgttgtcagaaatttcgaccagatttactccctatcagccacaaggcttggtcgctgatgagttcccacacctagacatcatcaacgacttgctggatgaggagcagagtgacagaagaagggttcttcaacctgattttgttcaacagtcctatatgcctcatggtgccagcacacctgattatggtgagccatacttgtttgaccagtccgagcaatacttcgatgaggagcctccaaggttttatagtccattgagcagtgctcctcggaggttgagggacctgagctattcgcactttgatctcccatcacactccagcagcagccagtttgatgatctgatgatgagtcagtggccatacagccgcactgacatctccatgcctagttttgggtcagacacaagtggctacccctatcaggtgtgggatctcgcgaatggatcaagcaggtacccatcgtatcgccctgccaatgggcattgagagttttaatgattgcattgacaataatgtgtggttaagtccatgatgttcgcttctgagctgagtgtaattgtaatagttccccatagcagtgatataaagaattgttcctcagtttccttgttcaatcaatagttatatgacccccctcctccctcttttctctagttcagttttgcccagtggtaataaatctaagtcggctaaaatgatctggctaatcgtgttgtgaaatgtgtatgatgcaagcaaatggtagggtgtttttaagccatgccagtgcttcagctgatactacattaaactgggagtattctttgtttctccctctgacgagtgacgacgtgttattgatcgtctcatgttctctttgtatatttcagagtaaattctggatatagcccatggacataaactaattatttgatgcacactctggacctttggggtatgttttattccattgatggatatataagctataaagtaaaatgcg

SEQ ID NO: 211240 - DNA, 3928 bp, Zea Mays
ccatttcgccaccccctacccgactccactgggcgctcgcgctcgcgcacgcgcacgcgcacgccgcagcccccctccgcagccgacgacgacgagcggaagggaagagggtcaactctcgatctccgcacggtccgtggggacgcacgcacggcgcgcgtggcggtctacccggtcgggggtcggatcctagctgaatcggggagatttgccggccaggaaggaaaacgacaagtgaaacgaagctgtacgtgttcaggtgatcggataatggctagtgatcggataatggttgacactttgaccgaggacaatggtggtgatgctagatcctcatcatctgaagagatgccaagtgaccaacagagtcatcctggggattctttagctgagtggaggtcaagtgagcaagttgagaatggaacaccatccacttcaccagcatactcagacaatgatgatgatgactgtggacctaggccttctgatctttatgggaagtttacatggagaattgataatttctcccaaatcaacaagagagagctaagaagtaattcctttgatgttggtggatttaagtggtatatcttaatttacccacaaggatgtgatgtatgcaatcacctctcactctttctttgtgttgccaaccatgataagctactcccaggatggagtcactttgcgcaatttacaatagctgtaattaatagagaccctaagaaatctaagtattctgatacactgcatcggttttggaagaaagagcatgattgggggtggaaaaagtttatggaactgtcaaaattacatgatggctttattgttgaggatgttcttaccatcaaagcccaagttcaagttatcagtttgccggcgctttattgatgaaagaagaagcaagcttagcaggttgattgaggataaactggggtggtccagtttcagtggattctggctagcaatggatccaagtgtgcgtcgacacatgacaagggaaaagactgaaactatattgaaagttatagtgaaacaattctttatagagaaagaagttacatcaaccttggtaattgactctctatatagtggacttaaggcacttgaataccagagcaagaacaaaaaggcgatacctaaactaacagagacagatgctcggagcactccaatggtacttattgatcaggacatgtttgttttggctgatgatgtaatatttctgcttgaaagagctgcattggacacactgccacaccaacatttgcccacaaaagatgataaaagttcgcaaaaccgcacaaaggatggcaactcaggtcaggagttcagcaaagattctattgagcgtgatgatagacgacttatagagctaggctggaagacattggagcttttttccttagctcatatattcagccgaatacaagtggcacatcaagaggctgtggctttgaagcgccaagaggaacttattcgtgaagaagaagaagctgggctagctgaaattgaactcaaggcaaagcgtagtgccgctgaaaaggaaaaacgtgccaagaaaaaacaggcaaaacagaagaaaaatagtcgaaaaggtaataaggggaaaagtggcaagtccaacatcaataaggaaataattatggaccacagtcattcagatgatagaatattggatgatttttgtggacaaattgaagagatgcccttaaatgctgacaaccctgaagaagtttctgatatatctgacagtagagacgataattcagacatgcttcatgttgatattgaagaccgtgaatctagccctctactgtggatgatagctcatcgtcttgttcatctgactcagtgccttcagttactgtgaatggatcatataaaggaggtgcctggacaagcgtcagatcctcatccaataggggaaacaacaggaggaataaggatactgaagcacgggcaggatttgcacaaggtggatcatgttcatcgcataatggttttataggctctggcagcaatgcctctggccactcaaaggaaagacacgaacctgaggatgataaagttgtcttgcagaggaagcaacatgcacaatggaacattgatatcattagctcctccaagtcaagaatggcagagtcttcattttcttctgtgagctctattaagaagcaacctcaaccaaattttttgctagaaagcaccaatagtttgaatcaccgtggaagcgaagcttctggcactgtgacttccactacaacagcgggtgcctcttcaaccccggccactcagttagttttgaataaaggacctgtatccagtgctgcaacccagaatgagaagccactacctctgcaggtgcttgtaccatccaaatctgaagtgcagaagcaggcttccctaactggcagtgcaactaccgaggccgtttcagtatcaaggcccttgactgccccacaagtccctgcagcaaaacaaagtgcaccagtcacttcaacagctcagaatgcaccttttctttctcgttcaatgagtgctgttgggcggttggggaatgaaccatctgccaatgctcctagtttcgttccccgttcacgaacatatcgcaatgccatgatggagaaaagttctggtggtggaagctgtttcacacatcagcaaggttcatcggagcaagcagttgcaccatggcaatcgatgtttacatcgcaacctttcattcggccatcagagaccttgtcttggaaagaggaaacattattgagatctgggtttacatttggaactgtgaagcccgagtcactgaacccatatcagggcagagaagagaactcacagcaagcgagcagcaacagcagtgattgtgcgccatcgagttcaaacatcagaagcgagatcgagaagctgaatttgagcggaagaccacgaagcaagcaactgttgtcagaaatttcgaccagatttactccctatcagccacaaggcttggtcgctgatgagttcccacacctagacatcatcaacgacttgctggatgaggagcagagtgacagaagaagggttcttcaacctgattttgttcaacagtcctatatgcctcatggtgccagcacacctgattatggtgagccatacttgtttgaccagtccgagcaatacttcgatgaggagcctccaaggttttatagtccattgagcagtgctcctcggaggttgagggacctgagctattcgcactttgatctcccatcacactccagcagcagccagtttgatgatctgatgatgagtcagtggccatacagccgcactgacatctccatgcctagttttgggtcagacacaagtggctacccctatcaggtgtgggatctcgcgaatggatcaagcaggtacccatcgtatcgccctgccaatgggcattgagagttttaatgattgcattgacaataatgtgtggttaagtccatgatgttcgcttctgagctgagtgtaattgtaatagttccccatagcagtgatataaagaattgttcctcagtttccttgttcaatcaatagttatatgacccccctcctccctcttttctctagttcagttttgcccagtggtaataaatctaagtcggctaaaatgatctggctaatcgtgttgtgaaatgtgtatgatgcaagcaaatggtagggtgtttttaagccatgccagtgcttcagctgatactacattaaactgggagtattctttgtttctccctctgacgagtgacgacgtgttattgatcgtctcatgttctctttgtatatttcagagtaaattctggatatagcccatggacataaactaattatttgatgcacactctggacctttggggtatgttttattccattgatggatatataagctataaagtaaaatgcg

SEQ ID NO: 211241 - DNA, 4650 bp, Zea Mays
ccaccccctacccgactccactgggcgctcgcgctcgcgcacgcgcacgcgcacgccgcagcccccctccgcagccgacgacgacgagcggaagggaagagggtcaactctcgatctccgcacggtccgtggggacgcacgcacggcgcgcgtggcggtctacccggtcgggggtcggatcctagctgaatcggggagatttgccggccaggaaggaaaacgacaagtgaaacgaagctgtacgtgttcaggtgatcggataatggctagtgatcggataatggttgacactttgaccgaggacaatggtggtgatgctagatcctcatcatctgaagagatgccaagtgaccaacagagtcatcctggggattctttagctgagtggaggtcaagtgagcaagttgagaatggaacaccatccacttcaccagcatactcagacaatgatgatgatgactgtggacctaggccttctgatctttatgggaagtttacatggagaattgataatttctcccaaatcaacaagagagagctaagaagtaattcctttgatgttggtggatttaagtggtatatcttaatttacccacaaggatgtgatgtatgcaatcacctctcactctttctttgtgttgccaaccatgataagctactcccaggatggagtcactttgcgcaatttacaatagctgtaattaatagagaccctaagaaatctaagtattctgatacactgcatcggttttggaagaaagagcatgattgggggtggaaaaagtttatggaactgtcaaaattacatgatggctttattgttgaggatgttcttaccatcaaagcccaagttcaagttatcagggagaagacagaccgtccatttcgttgccttgatggccattaccgaagggaactaattagggtgtatctatcaaatgttgaacaagtttgccggcgctttattgatgaaagaagaagcaagcttagcaggttgattgaggataaactggggtggtccagtttcagtggattctggctagcaatggatccaagtgtgcgtcgacacatgacaagggaaaagactgaaactatattgaaagttatagtgaaacaattctttatagagaaagaagttacatcaaccttggtaattgactctctatatagtggacttaaggcacttgaataccagagcaagaacaaaaaggcgatacctaaactaacagagacagatgctcggagcactccaatggtacttattgatcaggacatgtttgttttggctgatgatgtaatatttctgcttgaaagagctgcattggacacactgccacaccaacatttgcccacaaaagatgataaaagttcgcaaaaccgcacaaaggtaggcacgtttccttgaccccttacacattggtttataaggtattaaggttaatggccatcctaggtgtttccaacttgtaagcggtggactagaacagctatttactgatgtacccttttacatgttcaatatcaaaattgaaagcatttttatcacggtgtgcattttatgttgtgcagactgcaaaggcccacagtttttcagatgttgttcaaattaaattgaaatttactttcaaaaaaatgaacttaacattcccacacctttcagccctggcatgtatctgcgtttactgatcgagttactgctgctgttgttgtgtgtgttttcctgctttctttttgtattggtgttttcttctgcctattcaaggaaaaaaacactactatgcagtattgctctgaaatggggccatgacttgggaaatcgtctatgatttgtatcttaacgagttatgaactgaaaaagaagagtacacgtaatctccatttccttatccaatttatctctccatgaattttatcctactgacatggagccctaacagatgctcttgttataggatggcaactcaggtcaggagttcagcaaagattctattgagcgtgatgatagacgacttatagagctaggctggaagacattggagcttttttccttagctcatatattcagccgaatacaagtggcacatcaagaggctgtggctttgaagcgccaagaggaacttattcgtgaagaagaagaagctgggctagctgaaattgaactcaaggcaaagcgtagtgccgctgaaaaggaaaaacgtgccaagaaaaaacagaagaaaaatagtcgaaaaggtaataaggggaaaagtggcaagtccaacatcaataaggaaataattatggaccacagtcattcagatgatagaatattggatgatttttgtggacaaattgaagagatgcccttaaatgctgacaaccctgaagaagtttctgatatatctgacagtagagacgataattcagacatgcttcatgttgatattgaagaccgtgaatctagccctgttaattgggagatagatgcttcagaaactcaaactactattcctggaagtagtgaggtgcaaaatgaccatgcaggaaagaggacctctactgtggatgatagctcatcgtcttgttcatctgactcagtgccttcagttactgtgaatggatcatataaaggaggtgcctggacaagcgtcagatcctcatccaataggggaaacaacaggaggaataaggatactgaagcacgggcaggatttgcacaaggtggatcatgttcatcgcataatggttttataggctctggcagcaatgcctctggccactcaaaggaaagacacgaacctgaggatgataaagttgtcttgcagaggaagcaacatgcacaatggaacattgatatcattagctcctccaagtcaagaatggcagagtcttcattttcttctgtgagctctattaagaagcaacctcaaccaaattttttgctagaaagcaccaatagtttgaatcaccgtggaagcgaagcttctggcactgtgacttccactacaacagcgggtgcctcttcaaccccggccactcagttagttttgaataaaggacctgtatccagtgctgcaacccagaatgagaagccactacctctgcaggtgcttgtaccatccaaatctgaagtgcagaagcaggcttccctaactggcagtgcaactaccgaggccgtttcagtatcaaggcccttgactgccccacaagtccctgcagcaaaacaaagtgcaccagtcacttcaacagctcagaatgcaccttttctttctcgttcaatgagtgctgttgggcggttggggaatgaaccatctgccaatgctcctagtttcgttccccgttcacgaacatatcgcaatgccatgatggagaaaagttctggtggtggaagctgtttcacacatcagcaaggttcatcggagcaagcagttgcaccatggcaatcgatgtttacatcgcaacctttcattcggccatcagagaccttgtcttggaaagaggaaacattattgagatctgggtttacatttggaactgtgaagcccgagtcactgaacccatatcagggcagagaagagaactcacagcaagcgagcagcaacagcagtgattgtgcgccatcgagttcaaacatcagaagcgagatcgagaagctgaatttgagcggaagaccacgaagcaagcaactgttgtcagaaatttcgaccagatttactccctatcagccacaaggcttggtcgctgatgagttcccacacctagacatcatcaacgacttgctggatgaggagcagagtgacagaagaagggttcttcaacctgattttgttcaacagtcctatatgcctcatggtgccagcacacctgattatggtgagccatacttgtttgaccagtccgagcaatacttcgatgaggagcctccaaggttttatagtccattgagcagtgctcctcggaggttgagggacctgagctattcgcactttgatctcccatcacactccagcagcagccagtttgatgatctgatgatgagtcagtggccatacagccgcactgacatctccatgcctagttttgggtcagacacaagtggctacccctatcaggtgtgggatctcgcgaatggatcaagcaggtacccatcgtatcgccctgccaatgggcattgagagttttaatgattgcattgacaataatgtgtggttaagtccatgatgttcgcttctgagctgagtgtaattgtaatagttccccatagcagtgatataaagaattgttcctcagtttccttgttcaatcaatagttatatgacccccctcctccctcttttctctagttcagttttgcccagtggtaataaatctaagtcggctaaaatgatctggctaatcgtgttgtgaaatgtgtatgatgcaagcaaatggtagggtgtttttaagccatgccagtgcttcagctgatactacattaaactgggagtattctttgtttctccctctgacgagtgacgacgtgttattgatcgtctcatgttctctttgtatatttcagagtaaattctggatatagcccatggacataaactaattatttgatgcacactctggacctttggggtatgttttattccattgatggatatataagctataaagtaaaatgcg

SEQ ID NO: 211242 - DNA, 1421 bp, Zea Mays
cccctacccgactccactgggcgctcgcgctcgcgcacgcgcacgcgcacgccgcagcccccctccgcagccgacgacgacgagcggaagggaagagggtcaactctcgatctccgcacggtccgtggggacgcacgcacggcgcgcgtggcggtctacccggtcgggggtcggatcctagctgaatcggggagatttgccggccaggaaggaaaacgacaagtgaaacgaagctgtacgtgttcaggtgatcggataatggctagtgatcggataatggttgacactttgaccgaggacaatggtggtgatgctagatcctcatcatctgaagagatgccaagtgaccaacagagtcatcctggggattctttagctgagtggaggtcaagtgagcaagttgagaatggaacaccatccacttcaccagcatactcagacaatgatgatgatgactgtggacctaggccttctgatctttatgggaagtttacatggagaattgataatttctcccaaatcaacaagagagagctaagaagtaattcctttgatgttggtggatttaagtggtatatcttaatttacccacaaggatgtgatgtatgcaatcacctctcactctttctttgtgttgccaaccatgataagctactcccaggatggagtcactttgcgcaatttacaatagctgtaattaatagagaccctaagaaatctaagtattctgcatttcagatacactgcatcggttttggaagaaagagcatgattgggggtggaaaaagtttatggaactgtcaaaattacatgatggctttattgttgaggatgttcttaccatcaaagcccaagttcaagttatcagggagaagacagaccgtccatttcgttgccttgatggccattaccgaagggaactaattagggtgtatctatcaaatgttgaacaagtttgccggcgctttattgatgaaagaagaagcaagcttagcaggttgattgaggataaactggggtggtccagtttcagtggattctggctagcaatggatccaagtgtgcgtcgacacatgacaagggaaaagactgaaactatattgaaagttatagtgaaacaattctttatagagaaagaagttacatcaaccttggtaattgactctctatatagtggacttaaggcacttgaataccagagcaagaacaaaaaggcgatacctaaactaacagagacagatgctcggagcactccaatggtacttattgatcaggacatgtttgttttggctgatgatgtaatatttctgcttgaaagagctgcattggacacactgccacaccaacatttgcccacaaaagatgataaaagttcgcaaaaccgcacaaagtattgctctgaaatggggccatgacttggg

SEQ ID NO: 211243 - DNA, 3502 bp, Zea Mays
ctccactgggcgctcgcgctcgcgcacgcgcacgcgcacgccgcagcccccctccgcagccgacgacgacgagcggaagggaagagggtcaactctcgatctccgcacggtccgtggggacgcacgcacggcgcgcgtggcggtctacccggtcgggggtcggatcctagctgaatcggggagatttgccggccaggtgatcggataatggctagtgatcggataatggttgacactttgaccgaggacaatggtggtgatgctagatcctcatcatctgaagagatgccaagtgaccaacagagtcatcctggggattctttagctgagtggaggtcaagtgagcaagttgagaatggaacaccatccacttcaccagcatactcagacaatgatgatgatgactgtggacctaggccttctgatctttatgggaagtttacatggagaattgataatttctcccaaatcaacaagagagagctaagaagtaattcctttgatgttggtggatttaagtggtatatcttaatttacccacaaggatgtgatgtatgcaatcacctctcactctttctttgtgttgccaaccatgataagctactcccaggatggagtcactttgcgcaatttacaatagctgtaattaatagagaccctaagaaatctaagtattctgatacactgcatcggttttggaagaaagagcatgattgggggtggaaaaagtttatggaactgtcaaaattacatgatggctttattgttgaggatgttcttaccatcaaagcccaagttcaagttatcagacagaccgtccatttcgttgccttgatggccattaccgaagggaactaattagggtgtatctatcaaatgttgaacaagtttgccggcgctttattgatgaaagaagaagcaagcttagcaggttgattgaggataaactggggtggtccagtttcagtggattctggctagcaatggatccaagtgtgcgtcgacacatgacaagggaaaagactgaaactatattgaaagttatagtgaaacaattctttatagagaaagaagttacatcaaccttggtaattgactctctatatagtggacttaaggcacttgaataccagagcaagaacaaaaaggcgatacctaaactaacagagacagatgctcggagcactccaatggtacttattgatcaggacatgtttgttttggctgatgatgtaatatttctgcttgaaagagctgcattggacacactgccacaccaacatttgcccacaaaagatgataaaagttcgcaaaaccgcacaaagccgaatacaagtggcacatcaagaggctgtggctttgaagcgccaagaggaacttattcgtgaagaagaagaagctgggctagctgaaattgaactcaaggcaaagcgtagtgccgctgaaaaggaaaaacgtgccaagaaaaaacaggcaaaacagaagaaaaatagtcgaaaaggtaataaggggaaaagtggcaagtccaacatcaataaggaaataattatggaccacagtcattcagatgatagaatattggatgatttttgtggacaaattgaagagatgcccttaaatgctgacaaccctgaagaagtttctgatatatctgacagtagagacgataattcagacatgcttcatgttgatattgaagaccgtgaatctagccctgttaattgggagatagatgcttcagaaactcaaactactattcctggaagtagtgaggtgcaaaatgaccatgcaggaaagaggacctctactgtggatgatagctcatcgtcttgttcatctgactcagtgccttcagttactgtgaatggatcatataaaggaggtgcctggacaagcgtcagatcctcatccaataggggaaacaacaggaggaataaggatactgaagcacgggcaggatttgcacaaggtggatcatgttcatcgcataatggttttataggctctggcagcaatgcctctggccactcaaaggaaagacacgaacctgaggatgataaagttgtcttgcagaggaagcaacatgcacaatggaacattgatatcattagctcctccaagtcaagaatggcagagtcttcattttcttctgtgagctctattaagaagcaacctcaaccaaattttttgctagaaagcaccaatagtttgaatcaccgtggaagcgaagcttctggcactgtgacttccactacaacagcgggtgcctcttcaaccccggccactcagttagttttgaataaaggacctgtatccagtgctgcaacccagaatgagaagccactacctctgcaggtgcttgtaccatccaaatctgaagtgcagaagcaggcttccctaactggcagtgcaactaccgaggccgtttcagtatcaaggcccttgactgccccacaagtccctgcagcaaaacaaagtgcaccagtcacttcaacagctcagaatgcaccttttctttctcgttcaatgagtgctgttgggcggttggggaatgaaccatctgccaatgctcctagtttcgttccccgttcacgaacatatcgcaatgccatgatggagaaaagttctggtggtggaagctgtttcacacatcagcaaggttcatcggagcaagcagttgcaccatggcaatcgatgtttacatcgcaacctttcattcggccatcagagaccttgtcttggaaagaggaaacattattgagatctgggtttacatttggaactgtgaagcccgagtcactgaacccatatcagggcagagaagagaactcacagcaagcgagcagcaacagcagtgattgtgcgccatcgagttcaaacatcagaagcgagatcgagaagctgaatttgagcggaagaccacgaagcaagcaactgttgtcagaaatttcgaccagatttactccctatcagccacaaggcttggtcgctgatgagttcccacacctagacatcatcaacgacttgctggatgaggagcagagtgacagaagaagggttcttcaacctgattttgttcaacagtcctatatgcctcatggtgccagcacacctgattatggtgagccatacttgtttgaccagtccgagcaatacttcgatgaggagcctccaaggttttatagtccattgagcagtgctcctcggaggttgagggacctgagctattcgcactttgatctcccatcacactccagcagcagccagtttgatgatctgatgatgagtcagtggccatacagccgcactgacatctccatgcctagttttgggtcagacacaagtggctacccctatcaggtgtgggatctcgcgaatggatcaagcagagtaaattctggatatagcccatggacataaactaattatttgatgcacactctggacctttggggtatgttttattccattgatggatatataagctataaagtaaaatgcg

SEQ ID NO: 211244 - DNA, 4047 bp, Zea Mays
cgcagccgacgacgacgagcggaagggaagagggtcaactctcgatctccgcacggtccgtggggacgcacgcacggcgcgcgtggcggtctacccggtcgggggtcggatcctagctgaatcggggagatttgccggccaggtgatcggataatggctagtgatcggataatggttgacactttgaccgaggacaatggtggtgatgctagatcctcatcatctgaagagatgccaagtgaccaacagagtcatcctggggattctttagctgagtggaggtcaagtgagcaagttgagaatggaacaccatccacttcaccagcatactcagacaatgatgatgatgactgtggacctaggccttctgatctttatgggaagtttacatggagaattgataatttctcccaaatcaacaagagagagctaagaagtaattcctttgatgttggtggatttaagtggtatatcttaatttacccacaaggatgtgatgtatgcaatcacctctcactctttctttgtgttgccaaccatgataagctactcccaggatggagtcactttgcgcaatttacaatagctgtaattaatagagaccctaagaaatctaagtattctgatacactgcatcggttttggaagaaagagcatgattgggggtggaaaaagtttatggaactgtcaaaattacatgatggctttattgttgaggatgttcttaccatcaaagcccaagttcaagttatcagtttgccggcgctttattgatgaaagaagaagcaagcttagcaggttgattgaggataaactggggtggtccagtttcagtggattctggctagcaatggatccaagtgtgcgtcgacacatgacaagggaaaagactgaaactatattgaaagttatagtgaaacaattctttatagagaaagaagttacatcaaccttggtaattgactctctatatagtggacttaaggcacttgaataccagagcaagaacaaaaaggcgatacctaaactaacagagacagatgctcggagcactccaatggtacttattgatcaggacatgtttgttttggctgatgatgtaatatttctgcttgaaagagctgcattggacacactgccacaccaacatttgcccacaaaagatgataaaagttcgcaaaaccgcacaaaggtaggcacgtttccttgaccccttacacattggtttataaggtattaaggttaatggccatcctaggtgtttccaacttgtaagcggtggactagaacagctatttactgatgtacccttttacatgttcaatatcaaaattgaaagcatttttatcacggtgtgcattttatgttgtgcagactgcaaaggcccacagtttttcagatgttgttcaaattaaattgaaatttactttcaaaaaaatgaacttaacattcccacacctttcagccctggcatgtatctgcgtttactgatcgagttactgctgctgttgttgtgtgtgttttcctgctttctttttgtattggtgttttcttctgcctattcaaggaaaaaaacactactatgcagtattgctctgaaatggggccatgacttgggaaatcgtctatgatttgtatcttaacgagttatgaactgaaaaagaagagtacacgtaatctccatttccttatccaatttatctctccatgaattttatcctactgacatggagccctaacagatgctcttgttataggatggcaactcaggtcaggagttcagcaaagattctattgagcgtgatgatagacgacttatagagctaggctggaagacattggagcttttttccttagctcatatattcagccgaatacaagtggcacatcaagaggctgtggctttgaagcgccaagaggaacttattcgtgaagaagaagaagctgggctagctgaaattgaactcaaggcaaagcgtagtgccgctgaaaaggaaaaacgtgccaagaaaaaacaggcaaaacagaagaaaaatagtcgaaaaggtaataaggggaaaagtggcaagtccaacatcaataaggaaataattatggaccacagtcattcagatgatagaatattggatgatttttgtggacaaattgaagagatgcccttaaatgctgacaaccctgaagaagtttctgatatatctgacagtagagacgataattcagacatgcttcatgttgatattgaagaccgtgaatctagccctgttaattgggagatagatgcttcagaaactcaaactactattcctggaagtagtgaggtgcaaaatgaccatgcaggaaagaggacctctactgtggatgatagctcatcgtcttgttcatctgactcagtgccttcagttactgtgaatggatcatataaaggaggtgcctggacaagcgtcagatcctcatccaataggggaaacaacaggaggaataaggatactgaagcacgggcaggatttgcacaaggtggatcatgttcatcgcataatggttttataggctctggcagcaatgcctctggccactcaaaggaaagacacgaacctgaggatgataaagttgtcttgcagaggaagcaacatgcacaatggaacattgatatcattagctcctccaagtcaagaatggcagagtcttcattttcttctgtgagctctattaagaagcaacctcaaccaaattttttgctagaaagcaccaatagtttgaatcaccgtggaagcgaagcttctggcactgtgacttccactacaacagcgggtgcctcttcaaccccggccactcagttagttttgaataaaggacctgtatccagtgctgcaacccagaatgagaagccactacctctgcaggtgcttgtaccatccaaatctgaagtgcagaagcaggcttccctaactggcagtgcaactaccgaggccgtttcagtatcaaggcccttgactgccccacaagtccctgcagcaaaacaaagtgcaccagtcacttcaacagctcagaatgcaccttttctttctcgttcaatgagtgctgttgggcggttggggaatgaaccatctgccaatgctcctagtttcgttccccgttcacgaacatatcgcaatgccatgatggagaaaagttctggtggtggaagctgtttcacacatcagcaaggttcatcggagcaagcagttgcaccatggcaatcgatgtttacatcgcaacctttcattcggccatcagagaccttgtcttggaaagaggaaacattattgagatctgggtttacatttggaactgtgaagcccgagtcactgaacccatatcagggcagagaagagaactcacagcaagcgagcagcaacagcagtgattgtgcgccatcgagttcaaacatcagaagcgagatcgagaagctgaatttgagcggaagaccacgaagcaagcaactgttgtcagaaatttcgaccagatttactccctatcagccacaaggcttggtcgctgatgagttcccacacctagacatcatcaacgacttgctggatgaggagcagagtgacagaagaagggttcttcaacctgattttgttcaacagtcctatatgcctcatggtgccagcacacctgattatggtgagccatacttgtttgaccagtccgagcaatacttcgatgaggagcctccaaggttttatagtccattgagcagtgctcctcggaggttgagggacctgagctattcgcactttgatctcccatcacactccagcagcagccagtttgatgatctgatgatgagtcagtggccatacagccgcactgacatctccatgcctagttttgggtcagacacaagtggctacccctatcaggtgtgggatctcgcgaatggatcaagcagagtaaattctggatatagcccatggacataaactaattatttgatgcacactctggacctttggggtatgttttattccattgatggatatataagctataaagtaaaatgcg

SEQ ID NO: 211245 - DNA, 4044 bp, Zea Mays
cgcagccgacgacgacgagcggaagggaagagggtcaactctcgatctccgcacggtccgtggggacgcacgcacggcgcgcgtggcggtctacccggtcgggggtcggatcctagctgaatcggggagatttgccggccaggaaggaaaacgacaagtgaaacgaagctgtacgtgttcaggtgatcggataatggctagtgatcggataatggttgacactttgaccgaggacaatggtggtgatgctagatcctcatcatctgaagagatgccaagtgaccaacagagtcatcctggggattctttagctgagtggaggtcaagtgagcaagttgagaatggaacaccatccacttcaccagcatactcagacaatgatgatgatgactgtggacctaggccttctgatctttatgggaagtttacatggagaattgataatttctcccaaatcaacaagagagagctaagaagtaattcctttgatgttggtggatttaagtggtatatcttaatttacccacaaggatgtgatgtatgcaatcacctctcactctttctttgtgttgccaaccatgataagctactcccaggatggagtcactttgcgcaatttacaatagctgtaattaatagagaccctaagaaatctaagtattctgtttatggatagcatttcagatacactgcatcggttttggaagaaagagcatgattgggggtggaaaaagtttatggaactgtcaaaattacatgatggctttattgttgaggatgttcttaccatcaaagcccaagttcaagttatcagggagaagacagaccgtccatttcgttgccttgatggccattaccgaagggaactaattagggtgtatctatcaaatgttgaacaagtttgccggcgctttattgatgaaagaagaagcaagcttagcaggttgattgaggataaactggggtggtccagtttcagtggattctggctagcaatggatccaagtgtgcgtcgacacatgacaagggaaaagactgaaactatattgaaagttatagtgaaacaattctttatagagaaagaagttacatcaaccttggtaattgactctctatatagtggacttaaggcacttgaataccagagcaagaacaaaaaggcgatacctaaactaacagagacagatgctcggagcactccaatggtacttattgatcaggacatgtttgttttggctgatgatgtaatatttctgcttgaaagagctgcattggacacactgccacaccaacatttgcccacaaaagatgataaaagttcgcaaaaccgcacaaaggatggcaactcaggtcaggagttcagcaaagattctattgagcgtgatgatagacgacttatagagctaggctggaagacattggagcttttttccttagctcatatattcagccgaatacaagtggcacatcaagaggctgtggctttgaagcgccaagaggaacttattcgtgaagaagaagaagctgggctagctgaaattgaactcaaggcaaagcgtagtgccgctgaaaaggaaaaacgtgccaagaaaaaacaggcaaaacagaagaaaaatagtcgaaaaggtaataaggggaaaagtggcaagtccaacatcaataaggaaataattatggaccacagtcattcagatgatagaatattggatgatttttgtggacaaattgaagagatgcccttaaatgctgacaaccctgaagaagtttctgatatatctgacagtagagacgataattcagacatgcttcatgttgatattgaagaccgtgaatctagccctgttaattgggagatagatgcttcagaaactcaaactactattcctggaagtagtgaggtgcaaaatgaccatgcaggaaagaggacctctactgtggatgatagctcatcgtcttgttcatctgactcagtgccttcagttactgtgaatggatcatataaaggaggtgcctggacaagcgtcagatcctcatccaataggggaaacaacaggaggaataaggatactgaagcacgggcaggatttgcacaaggtggatcatgttcatcgcataatggttttataggctctggcagcaatgcctctggccactcaaaggaaagacacgaacctgaggatgataaagttgtcttgcagaggaagcaacatgcacaatggaacattgatatcattagctcctccaagtcaagaatggcagagtcttcattttcttctgtgagctctattaagaagcaacctcaaccaaattttttgctagaaagcaccaatagtttgaatcaccgtggaagcgaagcttctggcactgtgacttccactacaacagcgggtgcctcttcaaccccggccactcagttagttttgaataaaggacctgtatccagtgctgcaacccagaatgagaagccactacctctgcaggtgcttgtaccatccaaatctgaagtgcagaagcaggcttccctaactggcagtgcaactaccgaggccgtttcagtatcaaggcccttgactgccccacaagtccctgcagcaaaacaaagtgcaccagtcacttcaacagctcagaatgcaccttttctttctcgttcaatgagtgctgttgggcggttggggaatgaaccatctgccaatgctcctagtttcgttccccgttcacgaacatatcgcaatgccatgatggagaaaagttctggtggtggaagctgtttcacacatcagcaaggttcatcggagcaagcagttgcaccatggcaatcgatgtttacatcgcaacctttcattcggccatcagagaccttgtcttggaaagaggaaacattattgagatctgggtttacatttggaactgtgaagcccgagtcactgaacccatatcagggcagagaagagaactcacagcaagcgagcagcaacagcagtgattgtgcgccatcgagttcaaacatcagaagcgagatcgagaagctgaatttgagcggaagaccacgaagcaagcaactgttgtcagaaatttcgaccagatttactccctatcagccacaaggcttggtcgctgatgagttcccacacctagacatcatcaacgacttgctggatgaggagcagagtgacagaagaagggttcttcaacctgattttgttcaacagtcctatatgcctcatggtgccagcacacctgattatggtgagccatacttgtttgaccagtccgagcaatacttcgatgaggagcctccaaggttttatagtccattgagcagtgctcctcggaggttgagggacctgagctattcgcactttgatctcccatcacactccagcagcagccagtttgatgatctgatgatgagtcagtggccatacagccgcactgacatctccatgcctagttttgggtcagacacaagtggctacccctatcaggtgtgggatctcgcgaatggatcaagcaggtacccatcgtatcgccctgccaatgggcattgagagttttaatgattgcattgacaataatgtgtggttaagtccatgatgttcgcttctgagctgagtgtaattgtaatagttccccatagcagtgatataaagaattgttcctcagtttccttgttcaatcaatagttatatgacccccctcctccctcttttctctagttcagttttgcccagtggtaataaatctaagtcggctaaaatgatctggctaatcgtgttgtgaaatgtgtatgatgcaagcaaatggtagggtgtttttaagccatgccagtgcttcagctgatactacattaaactgggagtattctttgtttctccctctgacgagtgacgacgtgttattgatcgtctcatgttctctttgtatatttcagagtaaattctggatatagcccatggacataaactaattatttgatgcacactctggacctttggggtatgttttattccattgatggatatataagctataaagtaaaatgcg

SEQ ID NO: 211246 - DNA, 3951 bp, Zea Mays
cgcagccgacgacgacgagcggaagggaagagggtcaactctcgatctccgcacggtccgtggggacgcacgcacggcgcgcgtggcggtctacccggtcgggggtcggatcctagctgaatcggggagatttgccggccaggaaggaaaacgacaagtgaaacgaagctgtacgtgttcagatcctcatcatctgaagagatgccaagtgaccaacagagtcatcctggggattctttagctgagtggaggtcaagtgagcaagttgagaatggaacaccatccacttcaccagcatactcagacaatgatgatgatgactgtggacctaggccttctgatctttatgggaagtttacatggagaattgataatttctcccaaatcaacaagagagagctaagaagtaattcctttgatgttggtggatttaagtggtatatcttaatttacccacaaggatgtgatgtatgcaatcacctctcactctttctttgtgttgccaaccatgataagctactcccaggatggagtcactttgcgcaatttacaatagctgtaattaatagagaccctaagaaatctaagtattctgatacactgcatcggttttggaagaaagagcatgattgggggtggaaaaagtttatggaactgtcaaaattacatgatggctttattgttgaggatgttcttaccatcaaagcccaagttcaagttatcagaagacagaccgtccatttcgttgccttgatggccattaccgaagggaactaattagggtgtatctatcaaatgttgaacaagtttgccggcgctttattgatgaaagaagaagcaagcttagcaggttgattgaggataaactggggtggtccagtttcagtggattctggctagcaatggatccaagtgtgcgtcgacacatgacaagggaaaagactgaaactatattgaaagttatagtgaaacaattctttatagagaaagaagttacatcaaccttggtaattgactctctatatagtggacttaaggcacttgaataccagagcaagaacaaaaaggcgatacctaaactaacagagacagatgctcggagcactccaatggtacttattgatcaggacatgtttgttttggctgatgatgtaatatttctgcttgaaagagctgcattggacacactgccacaccaacatttgcccacaaaagatgataaaagttcgcaaaaccgcacaaaggatggcaactcaggtcaggagttcagcaaagattctattgagcgtgatgatagacgacttatagagctaggctggaagacattggagcttttttccttagctcatatattcagccgaatacaagtggcacatcaagaggctgtggctttgaagcgccaagaggaacttattcgtgaagaagaagaagctgggctagctgaaattgaactcaaggcaaagcgtagtgccgctgaaaaggaaaaacgtgccaagaaaaaacaggcaaaacagaagaaaaatagtcgaaaaggtaataaggggaaaagtggcaagtccaacatcaataaggaaataattatggaccacagtcattcagatgatagaatattggatgatttttgtggacaaattgaagagatgcccttaaatgctgacaaccctgaagaagtttctgatatatctgacagtagagacgataattcagacatgcttcatgttgatattgaagaccgtgaatctagccctgttaattgggagatagatgcttcagaaactcaaactactattcctggaagtagtgaggtgcaaaatgaccatgcaggaaagaggacctctactgtggatgatagctcatcgtcttgttcatctgactcagtgccttcagttactgtgaatggatcatataaaggaggtgcctggacaagcgtcagatcctcatccaataggggaaacaacaggaggaataaggatactgaagcacgggcaggatttgcacaaggtggatcatgttcatcgcataatggttttataggctctggcagcaatgcctctggccactcaaaggaaagacacgaacctgaggatgataaagttgtcttgcagaggaagcaacatgcacaatggaacattgatatcattagctcctccaagtcaagaatggcagagtcttcattttcttctgtgagctctattaagaagcaacctcaaccaaattttttgctagaaagcaccaatagtttgaatcaccgtggaagcgaagcttctggcactgtgacttccactacaacagcgggtgcctcttcaaccccggccactcagttagttttgaataaaggacctgtatccagtgctgcaacccagaatgagaagccactacctctgcaggtgcttgtaccatccaaatctgaagtgcagaagcaggcttccctaactggcagtgcaactaccgaggccgtttcagtatcaaggcccttgactgccccacaagtccctgcagcaaaacaaagtgcaccagtcacttcaacagctcagaatgcaccttttctttctcgttcaatgagtgctgttgggcggttggggaatgaaccatctgccaatgctcctagtttcgttccccgttcacgaacatatcgcaatgccatgatggagaaaagttctggtggtggaagctgtttcacacatcagcaaggttcatcggagcaagcagttgcaccatggcaatcgatgtttacatcgcaacctttcattcggccatcagagaccttgtcttggaaagaggaaacattattgagatctgggtttacatttggaactgtgaagcccgagtcactgaacccatatcagggcagagaagagaactcacagcaagcgagcagcaacagcagtgattgtgcgccatcgagttcaaacatcagaagcgagatcgagaagctgaatttgagcggaagaccacgaagcaagcaactgttgtcagaaatttcgaccagatttactccctatcagccacaaggcttggtcgctgatgagttcccacacctagacatcatcaacgacttgctggatgaggagcagagtgacagaagaagggttcttcaacctgattttgttcaacagtcctatatgcctcatggtgccagcacacctgattatggtgagccatacttgtttgaccagtccgagcaatacttcgatgaggagcctccaaggttttatagtccattgagcagtgctcctcggaggttgagggacctgagctattcgcactttgatctcccatcacactccagcagcagccagtttgatgatctgatgatgagtcagtggccatacagccgcactgacatctccatgcctagttttgggtcagacacaagtggctacccctatcaggtgtgggatctcgcgaatggatcaagcaggtacccatcgtatcgccctgccaatgggcattgagagttttaatgattgcattgacaataatgtgtggttaagtccatgatgttcgcttctgagctgagtgtaattgtaatagttccccatagcagtgatataaagaattgttcctcagtttccttgttcaatcaatagttatatgacccccctcctccctcttttctctagttcagttttgcccagtggtaataaatctaagtcggctaaaatgatctggctaatcgtgttgtgaaatgtgtatgatgcaagcaaatggtagggtgtttttaagccatgccagtgcttcagctgatactacattaaactgggagtattctttgtttctccctctgacgagtgacgacgtgttattgatcgtctcatgttctctttgtatatttcagagtaaattctggatatagcccatggacataaactaattatttgatgcacactctggacctttggggtatgttttattccattgatggatatataagctataaagtaaaatgcg

SEQ ID NO: 211247 - DNA, 981 bp, Zea Mays
tcaggggcacctagctgcctgttgtaaggacctaggccttctgatctttatgggaagtttacatggagaattgataatttctcccaaatcaacaagagagagctaagaagtaattcctttgatgttggtggatttaagtggtatatcttaatttacccacaaggatgtgatgtatgcaatcacctctcactctttctttgtgttgccaaccatgataagctactcccaggatggagtcactttgcgcaatttacaatagctgtaattaatagagaccctaagaaatctaagtattctgatacactgcatcggttttggaagaaagagcatgattgggggtggaaaaagtttatggaactgtcaaaattacatgatggctttattgttgaggatgttcttaccatcaaagcccaagttcaagttatcagggagaagacagaccgtccatttcgttgccttgatggccattaccgaagggaactaattagggtgtatctatcaaatgttgaacaagtttgccggcgctttattgatgaaagaagaagcaagcttagcaggttgattgaggataaactggggtggtccagtttcagtggattctggctagcaatggatccaagtgtgcgtcgacacatgacaagggaaaagactgaaactatattgaaagttatagtgaaacaattctttatagagaaagaagttacatcaaccttggtaattgactctctatatagtggacttaaggcacttgaataccagagcaagaacaaaaaggcgatacctaaactaacagagacagatgctcggagcactccaatggtacttattgatcaggacatgtttgttttggctgatgatgtaatatttctgcttgaaagagctgcattggacacactgccacaccaacatttgcccacaaaagatgataaaagttcgcaaaaccgcacaaagtattgctctgaaatggggccatgacttggg

SEQ ID NO: 211248 - DNA, 3763 bp, Zea Mays
caggggcacctagctgcctgttgtaaggacctaggccttctgatctttatgggaagtttacatggagaattgataatttctcccaaatcaacaagagagagctaagaagtaattcctttgatgttggtggatttaagtggtatatcttaatttacccacaaggatgtgatgtatgcaatcacctctcactctttctttgtgttgccaaccatgataagctactcccaggatggagtcactttgcgcaatttacaatagctgtaattaatagagaccctaagaaatctaagtattctgatacactgcatcggttttggaagaaagagcatgattgggggtggaaaaagtttatggaactgtcaaaattacatgatggctttattgttgaggatgttcttaccatcaaagcccaagttcaagttatcagggagaagacagaccgtccatttcgttgccttgatggccattaccgaagggaactaattagggtgtatctatcaaatgttgaacaagtttgccggcgctttattgatgaaagaagaagcaagcttagcaggttgattgaggataaactggggtggtccagtttcagtggattctggctagcaatggatccaagtgtgcgtcgacacatgacaagggaaaagactgaaactatattgaaagttatagtgaaacaattctttatagagaaagaagttacatcaaccttggtaattgactctctatatagtggacttaaggcacttgaataccagagcaagaacaaaaaggcgatacctaaactaacagagacagatgctcggagcactccaatggtacttattgatcaggacatgtttgttttggctgatgatgtaatatttctgcttgaaagagctgcattggacacactgccacaccaacatttgcccacaaaagatgataaaagttcgcaaaaccgcacaaaggaaaaaaacactactatgcagtattgctctgaaatggggccatgacttgggaaatcgtctatgatttgtatcttaacgagttatgaactgaaaaagaagagtacacgatggcaactcaggtcaggagttcagcaaagattctattgagcgtgatgatagacgacttatagagctaggctggaagacattggagcttttttccttagctcatatattcagccgaatacaagtggcacatcaagaggctgtggctttgaagcgccaagaggaacttattcgtgaagaagaagaagctgggctagctgaaattgaactcaaggcaaagcgtagtgccgctgaaaaggaaaaacgtgccaagaaaaaacaggcaaaacagaagaaaaatagtcgaaaaggtaataaggggaaaagtggcaagtccaacatcaataaggaaataattatggaccacagtcattcagatgatagaatattggatgatttttgtggacaaattgaagagatgcccttaaatgctgacaaccctgaagaagtttctgatatatctgacagtagagacgataattcagacatgcttcatgttgatattgaagaccgtgaatctagccctgttaattgggagatagatgcttcagaaactcaaactactattcctggaagtagtgaggtgcaaaatgaccatgcaggaaagaggacctctactgtggatgatagctcatcgtcttgttcatctgactcagtgccttcagttactgtgaatggatcatataaaggaggtgcctggacaagcgtcagatcctcatccaataggggaaacaacaggaggaataaggatactgaagcacgggcaggatttgcacaaggtggatcatgttcatcgcataatggttttataggctctggcagcaatgcctctggccactcaaaggaaagacacgaacctgaggatgataaagttgtcttgcagaggaagcaacatgcacaatggaacattgatatcattagctcctccaagtcaagaatggcagagtcttcattttcttctgtgagctctattaagaagcaacctcaaccaaattttttgctagaaagcaccaatagtttgaatcaccgtggaagcgaagcttctggcactgtgacttccactacaacagcgggtgcctcttcaaccccggccactcagttagttttgaataaaggacctgtatccagtgctgcaacccagaatgagaagccactacctctgcaggtgcttgtaccatccaaatctgaagtgcagaagcaggcttccctaactggcagtgcaactaccgaggccgtttcagtatcaaggcccttgactgccccacaagtccctgcagcaaaacaaagtgcaccagtcacttcaacagctcagaatgcaccttttctttctcgttcaatgagtgctgttgggcggttggggaatgaaccatctgccaatgctcctagtttcgttccccgttcacgaacatatcgcaatgccatgatggagaaaagttctggtggtggaagctgtttcacacatcagcaaggttcatcggagcaagcagttgcaccatggcaatcgatgtttacatcgcaacctttcattcggccatcagagaccttgtcttggaaagaggaaacattattgagatctgggtttacatttggaactgtgaagcccgagtcactgaacccatatcagggcagagaagagaactcacagcaagcgagcagcaacagcagtgattgtgcgccatcgagttcaaacatcagaagcgagatcgagaagctgaatttgagcggaagaccacgaagcaagcaactgttgtcagaaatttcgaccagatttactccctatcagccacaaggcttggtcgctgatgagttcccacacctagacatcatcaacgacttgctggatgaggagcagagtgacagaagaagggttcttcaacctgattttgttcaacagtcctatatgcctcatggtgccagcacacctgattatggtgagccatacttgtttgaccagtccgagcaatacttcgatgaggagcctccaaggttttatagtccattgagcagtgctcctcggaggttgagggacctgagctattcgcactttgatctcccatcacactccagcagcagccagtttgatgatctgatgatgagtcagtggccatacagccgcactgacatctccatgcctagttttgggtcagacacaagtggctacccctatcaggtgtgggatctcgcgaatggatcaagcaggtacccatcgtatcgccctgccaatgggcattgagagttttaatgattgcattgacaataatgtgtggttaagtccatgatgttcgcttctgagctgagtgtaattgtaatagttccccatagcagtgatataaagaattgttcctcagtttccttgttcaatcaatagttatatgacccccctcctccctcttttctctagttcagttttgcccagtggtaataaatctaagtcggctaaaatgatctggctaatcgtgttgtgaaatgtgtatgatgcaagcaaatggtagggtgtttttaagccatgccagtgcttcagctgatactacattaaactgggagtattctttgtttctccctctgacgagtgacgacgtgttattgatcgtctcatgttctctttgtatatttcagagtaaattctggatatagcccatggacataaactaattatttgatgcacactctggacctttggggtatgttttattccattgatggatatataagctataaagtaaaatgcg

SEQ ID NO: 211249 - DNA, 1094 bp, Zea Mays
accgtagacgcgtattcgaggccgagaggtcgtcaggtcgactggtcgagcaggccgctaggcgtgaaacggcatctacatcatcaaccttgggaagacatgggagaagctccagctcgcggcaagagttatcgttgccatcgagaacccgcaagacatgatcgttcagtctgcccgcccctacggccagcgtgctgtcctcaagtttgcacagtacactggcgcccatgccatcgctgggaggcacacccctggtaccttcaccaatcagctccagacctccttcagtgagcctcgcctgctcatccttactgacccaaggactgaccaccagccaatcaaggagtctgctctggggaacatcccgaccattgctttctgcgacactgactctcccatgcggtatgttgatatcggcatcccagccaacaacaaagggaggaacagcattggatgcctgttttggcttttggccaggatggttttgcagatgaggggcactatcctccctgggcacaagtgggaagtcatggttgatctattcttctacagagatccagaggaagcaaaggaacaggaggaggaagctgccgtggcccctgagtttgccgcaatcactgattaccaaggggctgatcagtgggtgggtggtgaccagtggaccgctgatgtggctgcgccatctgttgctcctactggtgctgaatggggtgctgctccagctccggttcctaccggtgatggctgggatcaaactggggcccctgtacctgctgatggcgctgttcctcctgtgattgctcctactggttgggatcaagcagcccagcccactgcccaaggctgggagtaggcgtagagtcatcactcagacgttttttctggggcttcagttcagtattattccaaagtacgtgtgtccgaagtcagacaacatttttgtagctaactagctatgctttgaacacttctgttttagggctttttagttgaactggcgcccctgttttgttttttaaaattgctgctgtgaaagagcttgtgaagatgtggtataagtagcccttctgttttgtgttgatcgcgtttcatgg

SEQ ID NO: 211250 - DNA, 1616 bp, Zea Mays
aaatattggtaatatattgtataaatctagtcaaatttaagaatgttttactaacatttatgcacggaacgagtgatttttataaaaataacaaaggaaaacattttttatataataaataaataaaaacggaaaagaaaatcacagcgaaggagtaggcagtcagcggccagcgccagcgaggtcgaggcatcggcgcatcgcatcgcccactttgctttgctcgctcgtctcttcgctttccgccgtggtgcatggccagtgaattccaattcgttctccctctccggctctccccaccaaaaacgtgaggcccgccggaacgagcaagcatattcacggaggcgtggatccagaggctcccccgcagcgcttgtccagaagcagccgacgcggcgtctgtccgcgggccgacggtcggtcgggcggcctgtcgtgtataaatggcggacgaggaggggggcagcggcgttgcgggagggagaggaggagaagcgctggcggcatctgctcccaacggggaccgctcagggaatagccccctcgccgtgccgtcgttctctgcagatgacagaggcttccatagatcaagcaccatgccgttgccggtggtgattaagaatgatgaaattgccaatgaaactgctggaccatcaagttcggaaaggtccagaactgagcgtcgtcggcaaaataatccagctgatgatcctgctaaacagttacttgatgaaaggattccaataaaaaagaaggcatctgaaatacacatctgtttatgaactgggaattgaatcattgaaaattgcactaactaatgtataatagtgttcaaagtatgactttctttgaattaccagtatatttgcttaataaaaaattaaaaataattgaaccattgaatattgagtgtggaatgaatattaatgttgaccgtagctgtaagttactgatttaatgaatgttgagtaatttacatgaagatatgcctttacatgtatttgagtttttgtgtttatgaaatcttccttaggtaaatgttatcgtgcataattagttaagaattttcatgttttctttaaaaaacactaaattaaatagcctcctataacttttagaggaggatgtcgctaaatgtcatagcccgctatttacaacaatgacccccaatcaaaggaagaaaatgttcctgtgacagattctttatgtggcaggcagttttacattttgacttaagatgatttgaccatagattgattattttctttcatctttatcatactgatgactggtctttcctctagacataatttagcaacaaactgtcatccaatctattggaatagtaaaccctcaccctaacaggggttgggtggtgtattaatagacttgagtactgggccaggcccattacagaggggtgagacagtaattacatagggaacaatcccaaaccctaaacgggtattctaacacccccccccggcagtcacaactctatcctgtacagatgttgagactggagcgaaagtctaaaaatacactcgacggtaaccctttggtgaagatgtcagcgaattgcagcgtggtggggacgctgagaacccgaacgtcac

SEQ ID NO: 211251 - DNA, 4297 bp, Zea Mays
ccgcgattcgtttcggtgcctccgcggtggaggtggagcggagccagcctcttgccgtgccgcgcgcggccgtggccgaccgagcgagagagtggcaaggcaagcggggatttgcgggaaggaaggaaaaccccgcgcgagactcacgtcgcgcctccggcctcccccctcccccctcccccagcgcgcctttcggattctgttgcgccctcgccaggggcctcggcgaacaagcggtgcgcgcgagcggcgggaaccctaggcggcggtgatggcgagcaggggagccgtggcgccggcggtggaccctagcagcccgagctcgagggcgtggggcggggaggacgagacgcctggggcggggaaggtgaagctgatgtgcagctacgggggccggattgcgccgaggcccggggacggggcgctgcggtacgtgggcggccagacgcggctcatctccgtaccgcgcgccgcctccttcggggagctcctgcggaaggtggaggcggtggacgaggcctccgcctcctctggcggggtgctactcaggtaccagctccctggggaggacctcgattcgctgatctccgtctcaggcccggaggactacgacaacatgatggaggagtacgagaagctggccgctgccgcgcccgacggctccgccaagctgcgggtcttcctcttcccggcctccgggagcgatgcggccggctctggctccgggtcccacctcgtcgccgcggtggacgagtctgggcagcggtacatcgacaccatcaactgcgtctccgcggaggctatggccgtggccatgcgtccgaaggacagtgtcgccagtgccggttcctccgcacacaactccgaggcatccgagtacagcggcctagtggaagagccatcaacgttaccgcctcatcaggttgctcctgcttatgcaacaccgcatcagccgcctcaagtaaccacttatgtgcagcagcagcctcaagtcacccattatgtacaacaccagcatcctcagtctgctgcttatgtgcagcaggtgccgcagtcgtacatagagccacagcaggtacaatacatcaacacccaacaatttggtgggcatggggtgccgcaatctgtcaattacgtgcctgtgcatatgaaccaattcatgcccagcattcctgtgacgggttctttggccaccactgctgctcaaggcagtacgttcaggcctgcttccgcaggtgcagaaccagttctggagaccacacagttcacaaggccagtgcaagctcaggttgatcatagttaccgggtggtgcaaactccgctatcacagcttcctcctttgtcttctgtgcatcagcaggcaaatgatgcgcagaggcagaggtttggtgttcaacaagcgatgataagtgcagtaagcatgccagtggtgaccagttcaggcacaattcctgtggtggttagctcggccactgttccatcattgagatatgatgattgcacaatgtgccaaaaagcattgccacatgctcattcagataatattatccgggagcagggaaattctcgtgcaacaggcaaccttgaggcagctccaatgttttatagcccccatcaagacagtggatccaacaaatctagtctaggtgcaagttcaggaactcctacaaactatgtggcggaaccaagagctgggaacacagcagtgatgacacaatttaattcgactcttcctgccagaaaacctgcagttcaggcaactgcatctccggatacaggtgtgccggttcaacccaccgtgattcctttaccagtgtccagtgcacctgctccagatggagtatttgtcggtcattctcctcaggctggggctgaagatcctgtcaggtaccagcagcaactattctcttatagcatgcagccagcacaagttctagtgaatggcccacaaggcattgatgccagtgcatacaaggattcaaatcatccagcagcggaaccgctgagagaatatgcacacaatcttcttcatgactatgccagagctatcgatgttcatacgcaagcagttcatttgggtcctattgcaccaccagaatctactgtgcatgggaagccttctacttatggtatcattgatcatgccaaagttggaaagctacctttaaatattgatggtagttctatctacaaatctcaagctggagggtatcatatagggattacaaatgcctttgctgctcctgcattcaaccaagaggaaaacatttccaggcacagtgagaagccacgttatgcttttgatattggtacacaaaatgtccatcctgacataatccagcaaccacccaatctggctgtccagagcaaccttatagctcccattgaaccacctggttctaatgaaaaggttactgtgctaccatctaactctggtgctcaggttccttctggatcacctgtacagcgtcctaaagaaatggccaatcacttggtttcaattccccccaatggcagtaacaaatttccattgcagtctactgttggtattgatcgtgttgaaggtacacaggaaccggcttatgcagattcacttttctcaaatcaggatccttggaaagcagtgggcaatgcatctttagtgcctccaagaccaaacaagctaactaaggagtctgttgtttctggaggtcaatatattgatggccatatgcctgatatgaacatgcatgctgccataccctcagaagaagactcatgttttaaggatatgcacacagttaaattgaacaaaggacctggagaagatagtatcaagcgacaattacaagctgttgctgaaggggtagccgcatcagttcttcagccaccctttcctgaaaaaacagtggtgttctctggggatcacatcgattcgcatggagcagaagttgatgtcaagttccaggatgaagggaacaatcagtcagacaaaataagtcaaggggttcaagttttagatgacaacgataaccttcagataataaagaacagtgaccttgaagaattgcgtgaacttggttctggaacctttggtactgtttaccatggaaagtggagaggttcagatgttgctataaagagaatcaacgatcgatgctttgctgggaaggcttctgagcaagagcgtatggactgatttctggaacgaggcagacaagcttgcatctttgcaccatccaaacgtagtagccttctatggtgttgttgtagatggacctggtggatctgttgcaacggtaacagaatacatggctaatggctcactccgacaagcattacaaagacatgaaaagatctttgatcggcgtaggcgtctactaattgcaatggatgttgcatttggaatggaatatctccatgggaagaatatagtgcattttgacttgaagagtgacaatctgcttgtcaacctaagggatcctcaacggcctatatgcaaggttggtgatttgggattatcaaaggtcaaatgccagacactaatctctggcggagtaagaggaacacttccttggatggcccctgagttgttgaatggcagcagcagccttgtctcggaaaaggttgacgtcttctcgtttggcattgtgatgtgggagctacttacaggtgaagagccttacgccgagctgcactatggggccattataggtggaatcgtgaataacacgctgcgacctccggtgcccgagtcctgtgatccccagtggaggtcactgatggagcggtgctggtcagccgaaccgtcagagaggccgagcttcaccgaggtcggcaagagcctgcgcgccatggcttctcctaccaaggcacaacaatcgaaatagatgctttagccttgcctctcgcgtccttctgttcagcagattgtttcagtcttcaaaccgaggaggtgccaccatggctggcctgccttttgtacatgaataagttgaagaaaaatacgagaatgtggcatgcttatagagtcggtggatgcttgatgcttcctgtcttgcttttgacatggatcgtggatatatatggtagtacagcgtagtgtaagagtggcccctcgttctcacgtccattaggagttcaggacgaggtgagagcatctttagcagcgctcaaattagggcctcacttttgatctgaagacttattttggcgggcctagcttttgacatgtgctctaacaaagttctccaatctatcgcaacagacaatgggcctgtttggttcagcttttttctgaccaacttttctaaaaatc

SEQ ID NO: 211252 - DNA, 4351 bp, Zea Mays
cgtttcggtgcctccgcggtggaggtggagcggagccagcctcttgccgtgccgcgcgcggccgtggccgaccgagcgagagagtggcaaggcaagcggggatttgcgggaaggaaggaaaaccccgcgcgagactcacgtcgcgcctccggcctcccccctcccccctcccccagcgcgcctttcggattctgttgcgccctcgccaggggcctcggcgaacaagcggtgcgcgcgagcggcgggaaccctaggcggcggtgatggcgagcaggggagccgtggcgccggcggtggaccctagcagcccgagctcgagggcgtggggcggggaggacgagacgcctggggcggggaaggtgaagctgatgtgcagctacgggggccggattgcgccgaggcccggggacggggcgctgcggtacgtgggcggccagacgcggctcatctccgtaccgcgcgccgcctccttcggggagctcctgcggaaggtggaggcggtggacgaggcctccgcctcctctggcggggtgctactcaggtaccagctccctggggaggacctcgattcgctgatctccgtctcaggcccggaggactacgacaacatgatggaggagtacgagaagctggccgctgccgcgcccgacggctccgccaagctgcgggtcttcctcttcccggcctccgggagcgatgcggccggctctggctccgggtcccacctcgtcgccgcggtggacgagtctgggcagcggtacatcgacaccatcaactgcgtctccgcggaggctatggccgtggccatgcgtccgaaggacagtgtcgccagtgccggttcctccgcacacaactccgaggcatccgagtacagcggcctagtggaaggtatgtcaccgcgggcggtgccgccgcctgcgtccgctgcaactgagtattcatattcagagccatcaacgttaccgcctcatcaggttgctcctgcttatgcaacaccgcatcagccgcctcaagtaaccacttatgtgcagcagcagcctcaagtcacccattatgtacaacaccagcatcctcagtctgctgcttatgtgcagcaggtgccgcagtcgtacatagagccacagcaggtacaatacatcaacacccaacaatttggtgggcatggggtgccgcaatctgtcaattacgtgcctgtgcatatgaaccaattcatgcccagcattcctgtgacgggttctttggccaccactgctgctcaaggcagtacgttcaggcctgcttccgcaggtgcagaaccagttctggagaccacacagttcacaaggccagtgcaagctcaggttgatcatagttaccgggtggtgcaaactccgctatcacagcttcctcctttgtcttctgtgcatcagcaggcaaatgatgcgcagaggcagaggtttggtgttcaacaagcgatgataagtgcagtaagcatgccagtggtgaccagttcaggcacaattcctgtggtggttagctcggccactgttccatcattgagatatgatgattgcacaatgtgccaaaaagcattgccacatgctcattcagataatattatccgggagcagggaaattctcgtgcaacaggcaaccttgaggcagctccaatgttttatagcccccatcaagacagtggatccaacaaatctagtctaggtgcaagttcaggaactcctacaaactatgtggcggaaccaagagctgggaacacagcagtgatgacacaatttaattcgactcttcctgccagaaaacctgcagttcaggcaactgcatctccggatacaggtgtgccggttcaacccaccgtgattcctttaccagtgtccagtgcacctgctccagatggagtatttgtcggtcattctcctcaggctggggctgaagatcctgtcaggtaccagcagcaactattctcttatagcatgcagccagcacaagttctagtgaatggcccacaaggcattgatgccagtgcatacaaggattcaaatcatccagcagcggaaccgctgagagaatatgcacacaatcttcttcatgactatgccagagctatcgatgttcatacgcaagcagttcatttgggtcctattgcaccaccagaatctactgtgcatgggaagccttctacttatggtatcattgatcatgccaaagttggaaagctacctttaaatattgatggtagttctatctacaaatctcaagctggagggtatcatatagggattacaaatgcctttgctgctcctgcattcaaccaagaggaaaacatttccaggcacagtgagaagccacgttatgcttttgatattggtacacaaaatgtccatcctgacataatccagcaaccacccaatctggctgtccagagcaaccttatagctcccattgaaccacctggttctaatgaaaaggttactgtgctaccatctaactctggtgctcaggttccttctggatcacctgtacagcgtcctaaagaaatggccaatcacttggtttcaattccccccaatggcagtaacaaatttccattgcagtctactgttggtattgatcgtgttgaaggtacacaggaaccggcttatgcagattcacttttctcaaatcaggatccttggaaagcagtgggcaatgcatctttagtgcctccaagaccaaacaagctaactaaggagtctgttgtttctggaggtcaatatattgatggccatatgcctgatatgaacatgcatgctgccataccctcagaagaagactcatgttttaaggatatgcacacagttaaattgaacaaaggacctggagaagatagtatcaagcgacaattacaagctgttgctgaaggggtagccgcatcagttcttcagccaccctttcctgaaaaaacagtggtgttctctggggatcacatcgattcgcatggagcagaagttgatgtcaagttccaggatgaagggaacaatcagtcagacaaaataagtcaaggggttcaagttttagatgacaacgataaccttcagataataaagaacagtgaccttgaagaattgcgtgaacttggttctggaacctttggtactgtttaccatggaaagtggagaggttcagatgttgctataaagagaatcaacgatcgatgctttgctgggaaggcttctgagcaagagcgtatgaggactgatttctggaacgaggcagacaagcttgcatctttgcaccatccaaacgtagtagccttctatggtgttgttgtagatggacctggtggatctgttgcaacggtaacagaatacatggctaatggctcactccgacaagcattacaaagacatgaaaagatctttgatcggcgtaggcgtctactaattgcaatggatgttgcatttggaatggaatatctccatgggaagaatatagtgcattttgacttgaagagtgacaatctgcttgtcaacctaagggatcctcaacggcctatatgcaaggttggtgatttgggattatcaaaggtcaaatgccagacactaatctctggcggagtaagaggaacacttccttggatggcccctgagttgttgaatggcagcagcagccttgtctcggaaaaggttgacgtcttctcgtttggcattgtgatgtgggagctacttacaggtgaagagccttacgccgagctgcactatggggccattataggtggaatcgtgaataacacgctgcgacctccggtgcccgagtcctgtgatccccagtggaggtcactgatggagcggtgctggtcagccgaaccgtcagagaggccgagcttcaccgaggtcggcaagagcctgcgcgccatggcttctcctaccaaggcacaacaatcgaaatagatgctttagccttgcctctcgcgtccttctgttcagcagattgtttcagtcttcaaaccgaggaggtgccaccatggctggcctgccttttgtacatgaataagttgaagaaaaatacgagaatgtggcatgcttatagagtcggtggatgcttgatgcttcctgtcttgcttttgacatggatcgtggatatatatggtagtacagcgtagtgtaagagtggcccctcgttctcacgtccattaggagttcaggacgaggtgagagcatctttagcagcgctcaaattagggcctcacttttgatctgaagacttattttggcgggcctagcttttgacatgtgctctaacaaagttctccaatctatcgcaacagacaatgggcctgtttggttcagcttttttctgaccaacttttctaaaaatc

SEQ ID NO: 211253 - DNA, 1853 bp, Zea Mays
gagaacggacgcagcactaacacccagcccaacccaacagcagccagcaacctcgcaggctcgcaccaccacctcgtccgtcgcagcatcaggccagcagccggcggcgccgggcgccgtcgtgaattaccccaggacttgtcccctccagcaaacggagcgttcagtagagcacgcctcggcgatatcgcggcgacatctgctgcagcccgtggagcccaacgagagcagcatcagcagcagctcccgatcgctcctgctacccacggcctcgcccacgcctgcgtgcgcagcagcagaagcaaagtgattaaccatgattggcagtatagtatcagattcagagttcttcgtggcattctactctgcagctcatttgtagatatatggaattccttccctgagaaatgccgtcctctacaccaccatcagtacaacccacaccaagccttcaaccgttaccatctcctgcagtaagccagagtactcgtattgatgttcgtgagatcaagtccaagatttttaagacgattgggcctgaacgagcaaagaaatactttcagcacctggaaaggttcttatcttcaaaactgagcaagaatgaatttgagaagctttgtcttgttgcacttggccgtgataacctcccattgcacaaccaccttatccgttccatcctacataatgccagtcgagcttgtggcccacctgtaattaatgatcctaggctggtcagaggtgccaccacttctggccatgtgattgttcctcctgtctgggacaatggtggtccgttgaacctaaatgtcaaagagaacagaccattaagcagaagggaaaatctactaacccaaaagccatcactgaatcattgtgacgctattatgctggagaatggtgttcatcatttgagtgatctgaagagatgtacacaatttcaaaacagtgaccatgtggagccacttttcaagcgaccgcgaatggagaaggaaccattcagtttacataattctctgcagagcaatgggtctgctaaggcttcaagagaaaacctgggacaagaaattatacaccaacccgaaggtccagtgcaagcaccacttggcattcagttacgtcctggcaattttggtgtggcccgaatacccctttcttctgtgagttcaaaggatacctctgacacttgtatcgaagttggtgaactctgtgatactttgtcagtgaagaagaggttggacaaaatggcaggagcatctgggttggaaggggtctcgatagagtgtgccaatttgttgaataatggcattgatgttttcatgaagcagttgattggatcttgtgttgaattagttagagcaaggtctcgacatggcaaactaagacatgatgcattgaagcagcagatgtgccgaaaactaataaatggtgtatcagtacatacccatgtttctgggcagagttctattatacctccagagacaaattccatctccatgcaggacttaaaggcagtgatagagttaaacccttgtttgcttgggattaatgcatcactgttactagaaaagatcaattcatatgactagttggatggagctagttgtattcatctcatcacaagatcctatgaccttgatggtctgtcttgtttcatggctgttgtaatcaggccataattttactgacgggtagtggtgaaggcaggtgcattctgtgcagtaccctgattgtttttcatctcatctctggaccactattgggctaaagtgcttcagagataactatgttgctggactccaaacaaattgagccatatcacagatttgatctataaagatgcaggaacactacat

SEQ ID NO: 211254 - DNA, 1849 bp, Zea Mays
gagaacggacgcagcactaacacccagcccaacccaacagcagccagcaacctcgcaggctcgcaccaccacctcgtccgtcgcagcatcaggccagcagccggcggcgccgggcgccgtcgtgaattaccccaggacttgtcccctccagcaaacggagcgttcagtagagcacgcctcggcgatatcgcggcgacatctgctgcagcccgtggagcccaacgagagcagcatcagcagcagctcccgatcgctcctgctacccacggcctcgcccacgcctgcgtgcgcagcagcagaagcaaagtgattaaccatgattggcagtatagtatcagattcagagttcttcgtggcattctactctgcagctcatttgtagatatatggaattccttccctgagaaatgccgtcctctacaccaccatcagtacaacccacaccaagccttcaaccgttaccatctcctgcagtaagccagagtactcgtattgatgttcgtgagatcaagtccaagatttttaagacgattgggcctgaacgagcaaagaaatactttcagcacctggaaaggttcttatcttcaaaactgagcaagaatgaatttgagaagctttgtcttgttgcacttggccgtgataacctcccattgcacaaccaccttatccgttccatcctacataatgccagtcgagcttgtggcccacctgtaattaatgatcctaggctggtcagaggtgccaccacttctggccatgtgattgttcctcctgtctgggacaatggtggtccgttgaacctaaatgtcaaagagaacagaccattaagcagaagggaaaatctactaacccaaaagccatcactgaatcattgtgacgctattatgctggagaatggtgttcatcatttgagtgatctgaagagatgtacacaatttcaaaacagtgaccatgtggagccacttttcaagcgaccgcgaatggagaaggaaccattcagtttacataattctctgcagagcaatgggtctgctaaggcttcaagagaaaacctgggacaagaaattatacaccaacccgaaggtccagtgcaagcaccacttggcattcagttacgtcctggcaattttggtgtggcccgaatacccctttcttctgtgagttcaaaggatacctctgacacttgtatcgaagttggtgaactctgtgatactttgtcagtgaagaagaggttggacaaaatggcaggagcatctgggttggaaggggtctcgatagagtgtgccaatttgttgaataatggcattgatgttttcatgaagcagttgattggatcttgtgttgaattagttagagcaaggtctcgacatggcaaactaagacatgatgcattgaagcagcagatgtgccgaaaactaataaatggtgtatcagtacatacccatgtttctgggcagagttctattatacctccagagacaaattccatctccatgcaggacttaaaggcagtgatagagttaaacccttgtttgcttgggattaatgcatcactgttactagaaaagatcaattcatatgactagttggatggagctagttgtattcatctcatcacaagatcctatgaccttgatggtctgtcttgtttcatggctgttgtaatcaggccataattttactgacgggtagtggtgaaggcaggtgcattctgtgcagtaccctgattgtttttcatctcatctctggaccactattgggctaaagtgcttcagagataactatgttgctggactccaaacaaattgagccatatcacagatttgatctagaacgatccggtcgaaga

SEQ ID NO: 211255 - DNA, 1927 bp, Zea Mays
gacggaacggagaacggacgcagcactaacacccagcccaacccaacagcagccagcaacctcgcaggctcgcaccaccacctcgtccgtcgcagcatcaggccagcagccggcggcgccgggcgccgtcgtgaattaccccaggacttgtcccctccagcaaacggagcgttcagtagagcacgcctcggcgatatcgcggcgacatctgctgcagcccgtggagcccaacgagagcagcatcagcagcagctcccgatcgctcctgctacccacggcctcgcccacgcctgcgtgcgcagcagcagaagcaaagtgattaaccatgattggcagtatagtatcagattcagagttcttcgtggcattctactctgcagctcatttgtagatatatggaattccttccctgagaaatgccgtcctctacaccaccatcagtacaacccacaccaagccttcaaccgttaccatctcctgcagtaagccagagtactcgtattgatgttcgtgagatcaagtccaagatttttaagacgattgggcctgaacgagcaaagaaatactttcagcacctggaaaggttcttatcttcaaaactgagcaagaatgaatttgagaagctttgtcttgttgcacttggccgtgataacctcccattgcacaaccaccttatccgttccatcctacataatgccagtcgagcttgtggcccacctgtaattaatgatcctaggctggtcagaggtgccaccacttctggccatgtgattgttcctcctgtctgggacaatggtggtccgttgaacctaaatgtcaaagagaacagaccattaagcagaagggaaaatctactaacccaaaagccatcactgaatcattgtgacgctattatgctggagaatggtgttcatcatttgagtgatctgaagagatgtacacaatttcaaaacagtgaccatgtggagccacttttcaagcgaccgcgaatggagaaggaaccattcagtttacataattctctgcagagcaatgggtctgctaaggcttcaagagaaaacctgggacaagaaattatacaccaacccgaaggtccagtgcaagcaccacttggcattcagttacgtcctggcaattttggtgtggcccgaatacccctttcttctgtgagttcaaaggatacctctgacacttgtatcgaagttggtgaactctgtgatactttgtcagtgaagaagaggttggacaaaatggcaggagcatctgggttggaaggggtctcgatagagtgtgccaatttgttgaataatggcattgatgttttcatgaagcagttgattggatcttgtgttgaattagttagagcaaggtctcgacatggcaaactaagacatgatgcattgaagcagcagatgtgccgaaaactaataaatggtgtatcagtacatacccatgtttctgggcagagttctattatacctccagagacaaattccatctccatgcaggacttaaaggcagtgatagagttaaacccttgtttgcttgggattaatgcatcactgttactagaaaagatcaattcatatgactagttggatggagctagttgtattcatctcatcacaagatcctatgaccttgatggtctgtcttgtttcatggctgttgtaatcaggccataattttactgacgggtagtggtgaaggcaggtgcattctgtgcagtaccctgattgtttttcatctcatctctggtacaatcttccagaataaacaaatatctgtattttctgggtgcagtactaaactcatttatttcctgcacctaaggaccactattgggctaaagtgcttcagagataactatgttgctggactccaaacaaattgagccatatcacagatttgatctagaacgatccgg

SEQ ID NO: 211256 - DNA, 1949 bp, Zea Mays
ggacacagacggaacggagaacggacgcagcactaacacccagcccaacccaacagcagccagcaacctcgcaggctcgcaccaccacctcgtccgtcgcagcatcaggccagcagccggcggcgccgggcgccgtcgtgaattaccccaggacttgtcccctccagcaaacggagcgttcagtagagcacgcctcggcgatatcgcggcgacatctgctgcagcccgtggagcccaacgagagcagcatcagcagcagctcccgatcgctcctgctacccacggcctcgcccacgcctgcgtgcgcagcagcagaagcaaagtgattaaccatgattggcagtatagtatcagattcagagttcttcgtggcattctactctgcagctcatttgtagatatatggaattccttccctgagaaatgccgtcctctacaccaccatcagtacaacccacaccaagccttcaaccgttaccatctcctgcagtaagccagagtactcgtattgatgttcgtgagatcaagtccaagatttttaagacgattgggcctgaacgagcaaagaaatactttcagcacctggaaaggttcttatcttcaaaactgagcaagaatgaatttgagaagctttgtcttgttgcacttggccgtgataacctcccattgcacaaccaccttatccgttccatcctacataatgccagtcgagcttgtggcccacctgtaattaatgatcctaggctggtcagaggtgccaccacttctggccatgtgattgttcctcctgtctgggacaatggtggtccgttgaacctaaatgtcaaagagaacagaccattaagcagaagggaaaatctactaacccaaaagccatcactgaatcattgtgacgctattatgctggagaatggtgttcatcatttgagtgatctgaagagatgtacacaatttcaaaacagtgaccatgtggagccacttttcaagcgaccgcgaatggagaaggaaccattcagtttacataattctctgcagagcaatgggtctgctaaggcttcaagagaaaacctgggacaagaaattatacaccaacccgaaggtccagtgcaagcaccacttggcattcagttacgtcctggcaattttggtgtggcccgaatacccctttcttctgtgagttcaaaggatacctctgacacttgtatcgaagttggtgaactctgtgatactttgtcagtgaagaagaggttggacaaaatggcaggagcatctgggttggaaggggtctcgatagagtgtgccaatttgttgaataatggcattgatgttttcatgaagcagttgattggatcttgtgttgaattagttagagcaaggtctcgacatggcaaactaagacatgatgcattgaagcagcagatgtgccgaaaactaataaatggtgtatcagtacatacccatgtttctgggcagagttctattatacctccagagacaaattccatctccatgcaggacttaaaggcagtgatagagttaaacccttgtttgcttgggattaatgcatcactgttactagaaaagatcaattcatatgactagttggatggagctagttgtattcatctcatcacaagatcctatgaccttgatggtctgtcttgtttcatggctgttgtaatcaggccataattttactgacgggtagtggtgaaggcaggtgcattctgtgcagtaccctgattgtttttcatctcatctctggtacaatcttccagaataaacaaatatctgtattttctgggtgcagtactaaactcatttatttcctgcacctaaggaccactattgggctaaagtgcttcagagataactatgttgctggactccaaacaaattgagccatatcacagatttgatctgttattaaggcgccgctcaagcgaagc

SEQ ID NO: 211257 - DNA, 2021 bp, Zea Mays
cgcagcactaacacccagcccaacccaacagcagccagcaacctcgcaggctcgcaccaccacctcgtccgtcgcagcatcaggccagcagccggcggcgccgggcgccgtcgtgaattaccccaggacttgtcccctccagcaaacggagcgttcagtagagcacgcctcggcgatatcgcggcgacatctgctgcagcccgtggagcccaacgagagcagcatcagcagcagctcccgatcgctcctgctacccacggcctcgcccacgcctgcgtgcgcagcagcagaagcaaagtgattaaccatgattggcagtatagtatcagattcagagttcttcgtggcattctactctgcagctcatttgtagatatatggaattccttccctgagaaatgccgtcctctacaccaccatcagtacaacccacaccaagccttcaaccgttaccatctcctgcagtaagccagagtactcgtattgatgttcgtgagatcaagtccaagatttttaagacgattgggcctgaacgagcaaagaaatactttcagcacctggaaaggttcttatcttcaaaactgagcaagaatgaatttgagaagctttgtcttgttgcacttggccgtgataacctcccattgcacaaccaccttatccgttccatcctacataatgccagtcgagcttgtggcccacctgtaattaatgatcctaggctggtcagaggtgccaccacttctggccatgtgattgttcctcctgtctgggacaatggtggtccgttgaacctaaatgtcaaagagaacagaccattaagcagaagggaaaatctactaacccaaaagccatcactgaatcattgtgacgctattatgctggagaatggtgttcatcatttgagtgatctgaagagatgtacacaatttcaaaacagtgaccatgtggagccacttttcaagcgaccgcgaatggagaaggaaccattcagtttacataattctctgcagagcaatgggtctgctaaggcttcaagagaaaacctgggacaagaaattatacaccaacccgaaggtccagtgcaagcaccacttggcattcagttacgtcctggcaattttggtgtggcccgaatacccctttcttctgtgagttcaaaggatacctctgacacttgtatcgaagttggtgaactctgtgatactttgtcagtgaagaagaggttggacaaaatggcaggagcatctgggttggaaggggtctcgatagagtgtgccaatttgttgaataatggcattgatgttttcatgaagcagttgattggatcttgtgttgaattagttagagcaaggtctcgacatggcaaactaagacatgatgcattgaagcagcagatgtgccgaaaactaataaatggtgtatcagtacatacccatgtttctgggcagagttctattatacctccagagacaaattccatctccatgcaggacttaaaggcagtgatagagttaaacccttgtttgcttgggattaatgcatcactgttactagaaaagatcaattcatatgactagttggatggagctagttgtattcatctcatcacaagatcctatgaccttgatggtctgtcttgtttcatggctgttgtaatcaggccataattttactgacgggtagtggtgaaggcagtactaaactcatttatttcctgcacctaaggaccactattgggctaaagtgcttcagagataactatgttgctggactccaaacaaattgagccatatcacagatttgatctgtaagtttatcacaactaatatgtgcttgcacatttcaacttttttacatttgtagcatagatacagctgttggtagttatttatttgcagtcatttttgtttcaatgtcacaagaaatagaaactatttataaggcatttatcgaggactctagtagtgttgttgtatgagtatattttcagcagaactggtgataacaaggactaaactgac

SEQ ID NO: 211258 - DNA, 704 bp, Zea Mays
cggcagccgcgtcctccacgcgtgctccaagtcaaaatagtccatccttgtgcagcaaaaatgacggctggctacattgttggctcactggtcggatcctttgccattgcatacctgtgtgacacatttatctctgacaagaaggcatttggaggtagcacccccaagactgtttctgagaaggagtggtggcaagccacagacaccaagttccaggcctggcctcgcactgctgggccaccggttgtcatgaaccccatcagccgccagaacttcatcgtcaagtccactgagtaggtttgggctggagaagctggttctgcgacttggtgccgccatgaagccagagttccttttctaaggtcttaatcaattgtaataaaacgaaatacagtcaggatttttttgtgatttttacttgatctgtgagcgaacactgggtctttcaccttgtcatccaatgggttctgctccttggtgaaatctcccaccagccagtaaagaactgggttgttttcataatatatgcttttgctacgcagcctctgctgttgtaaggaattgcattgttatcttatatcactgtatggtgatgtttaactagtttgttgatgtgccgcttgtggttgtggtttcctgtaggctgttatgccaatctaactcttggctcatttagtactatactggtcaaattcttatgaatc

SEQ ID NO: 211259 - DNA, 1934 bp, Zea Mays
gttagagcttcactcccatcttacatatacatggatctcgtctcgtgtgaactgctgcggatcagtcgggggccataagacccttgcgcgctgcgcagcggtgggcggtggccggtggcaatggcgcccacgacttgcctccggatccccttcctccccgcccgaggccgctccgctaacgtcaacgcccctccgtcctggctcccccgccgcctttctctcaaatccagcgcgaccaacggtgacaattccctccccaatcccatctccacctctcccacctcgccgccttggttaacggtggtggacgttaacgggttgcgtcgcccgcccgcgcctgtttccgcccctaccatccccggcgaccgcggtccccggtggctgcctcggccgttcactagcgcggacgtcatgggggcggattggaaggggctcaaggttgcttaccagggttgcgctggggcgtacagcgaagcggcagcaaagaaggcatacccaaattgtgaggctgtgccctgtgagcactttgacactgcatttcaggctgttcaaaactgggtagttgatagggcagtgctgccacttgagaattcattgggaggtagcatacatcggaactatgatctattggttcagcatagtttgcacattgtcggagaagttcgccttgaggttcaccattgcttgttagccaatcctggtgtgaagattgaaaatctgaaaagtgttatgagccatccccaggctcttgcgcaatgtgaacacacattaacaggactaggaattgaacatagagaggctgttgacgacactgctggtgcagcaaagaacatatggtccaggatactggtgctattgctagttcattggctgctaaactctatggattggatgttcttgctgagaatattcaggatggcaaaaataatgtcacccgttttatgatgctagctcgaaaacccaacattcttcgcaatgatagaccatttaagacaagcatagtcttttcactagaagaaggacatggacaactctttagggcgcttggtgtattcgcacagaggaaaatcaacctcacaaagatcgaaagtcgtccacacaaggagaggcctcttcgagtatctgatgactgttcctcactcttaaagaattttgattacctcttttacgttgaccttgaagcatcaatggctgatccaaagattcagaatgctcttggaaatctgaaggagtttgcaacctttttaagagtcctcggaagctatcctacaaatgtgaatgaaccttagaaaacactgcagattacatgatggattagcaggaatggacgaaatggtttgagttggttctctgagcaggttgacaagtgaggacctctatgaagctgatgctaacatttacagagcaaaaggatctatattagagcagtatagaagggtggatgtgaggcttacattggttgtgagcttgaaagggaatttgttgtttggctggtgaggttcttttgacttctgatgcaacgaggatagctgaaatagcaatcttcttcaatgtcttattatgcgggagcttgaaaatacttcaatttataagtttataggttttcatgttggagcatctttgtcatggtagcatgtaggttgctaaaatagtcagtggaataatgagacaatgtctaagaacacttgtcttttttttaggacagtataataagaactgacgtttccatgtccatatggacgttccacaaaaatcttatttgctgtcatgatgggctctattcatctggtggtggccaaacctctgccaaactttacttctgtaggagaaaataatttgttgctccttgtacttttctattgatgaaacggaatttggtgccccttgtttgccttgatctgtgccaggtcaaattgggctgttcaagttgccga

SEQ ID NO: 211260 - DNA, 1907 bp, Zea Mays
gttagagcttcactcccatcttacatatacatggatctcgtctcgtgtgaactgctgcggatcagtcgggggccataagacccttgcgcgctgcgcagcggtgggcggtggccggtggcaatggcgcccacgacttgcctccggatccccttcctccccgcccgaggccgctccgctaacgtcaacgcccctccgtcctggctcccccgccgcctttctctcaaatccagcgcgaccaacggtgacaattccctccccaatcccatctccacctctcccacctcgccgccttggttaacggtggtggacgttaacgggttgcgtcgcccgcccgcgcctgtttccgcccctaccatccccggcgaccgcggtccccggtggctgcctcggccgttcactagcgcggacgtcatgggggcggattggaaggggctcaaggttgcttaccagggttgcgctggggcgtacagcgaagcggcagcaaagaaggcatacccaaattgtgaggctgtgccctgtgagcactttgacactgcatttcaggctgttcaaaactgggtagttgatagggcagtgctgccacttgagaattcattgggaggtagcatacatcggaactatgatctattggttcagcatagtttgcacattgtcggagaagttcgccttgaggttcaccattgcttgttagccaatcctggtgtgaagattgaaaatctgaaaagtgttatgagccatccccaggactaggaattgaacatagagaggctgttgacgacactgctggtgcagcaaagattgttgcagaacatatggtccaggatactggtgctattgctagttcattggctgctaaactctatggattggatgttcttgctgagaatattcaggatggcaaaaataatgtcacccgttttatgatgctagctcgaaaacccaacattcttcgcaatgatagaccatttaagacaagcatagtcttttcactagaagaaggacatggacaactctttagggcgcttggtgtattcgcacagaggaaaatcaacctcacaaagatcgaaagtcgtccacacaaggagaggcctcttcgagtatctgatgactgttcctcactcttaaagaattttgattacctcttttacgttgaccttgaagcatcaatggctgatccaaagattcagaatgctcttggaaatctgaaggagtttgcaacctttttaagagtcctcggaagctatcctacaaatgtgaatgaaccttagaaaacactgcagattacatgatgcaggaatggacgaaatggtttgagttggttctctgagcaggttgacaagtgaggacctctatgaagctgatgctaacatttacagagcaaaaggatctatattagagcagtatagaagggtggatgtgaggcttacattggttgtgagcttgaaagggaatttgttgtttggctggtgaggttcttttgacttctgatgcaacgaggatagctgaaatagcaatcttcttcaatgtcttattatgcgggagcttgaaaatacttcaatttataagtttataggttttcatgttggagcatctttgtcatggtagcatgtaggttgctaaaatagtcagtggaataatgagacaatgtctaagaacacttgtcttttttttaggacagtataataagaactgacgtttccatgtccatatggacgttccacaaaaatcttatttgctgtcatgatgggctctattcatctggtggtggccaaacctctgccaaactttacttctgtaggagaaaataatttgttgctccttgtacttttctattgatgaaacggaatttggtgccccttgtttgccttgatctgtgccaggtcaaattgggctgttcaagttgccga

SEQ ID NO: 211261 - DNA, 1383 bp, Zea Mays
gttagagcttcactcccatcttacatatacatggatctcgtctcgtgtgaactgctgcggatcagtcgggggccataagacccttgcgcgctgcgcagcggtgggcggtggccggtggcaatggcgcccacgacttgcctccggatccccttcctccccgcccgaggccgctccgctaacgtcaacgcccctccgtcctggctcccccgccgcctttctctcaaatccagcgcgaccaacgggccgttcactagcgcggacgtcatgggggcggattggaaggggctcaaggttgcttaccagggttgcgctggggcgtacagcgaagcggcagcaaagaaggcatacccaaattgtgaggctgtgccctgtgagcactttgacactgcatttcaggctgttcaaaactgggtagttgatagggcagtgctgccacttgagaattcattgggaggtagcatacatcggaactatgatctattggttcagcatagtttgcacattgtcggagaagttcgccttgaggttcaccattgcttgttagccaatcctggtgtgaagattgaaaatctgaaaagtgttatgagccatccccaggctcttgcgcaatgtgaacacacattaacaggactaggaattgaacatagagaggctgttgacgacactgctggtgcagcaaagattgttgcagaacatatggtccaggatactggtgctattgctagttcattggctgctaaactctatggattggatgttcttgctgagaatattcaggatggcaaaaataatgtcacccgttttatgatgctagctcgaaaacccaacattcttcgcaatgatagaccatttaagacaagcatagtcttttcactagaagaaggacatggacaactctttagggcgcttggtgtattcgcacagaggaaaatcaacctcacaaagatcgaaagtcgtccacacaaggagaggcctcttcgagtatctgatgactgttcctcactcttaaagaattttgattacctcttttacgttgaccttgaagcatcaatggctgatccaaagattcagaatgctcttggaaatctgaaggagtttgcaacctttttaagagtcctcggaagctatcctacaaatgtgaatgaaccttagaaaacactgcagattacatgatggattagcaggaatggacgaaatggtttgagttggttctctgagcaggttgacaagtgaggacctctatgaagctgatgctaacatttacagagcaaaaggatctatattagagcagtatagaagggtggatgtgaggcttacattggttgtgagcttgaaagggaatttgttgtttggctggtcaaattgggctgttcaagttgccga

SEQ ID NO: 211262 - DNA, 476 bp, Zea Mays
cctaaaacattttctttttgccctgcgtggcgttctccactctcctctccctctcccgagcacctctccttcctccactttctccccaactccggtgagcgagagtgtggtcacgacacaatcatggcgctgcccgtggggccaatcgtcggtgcgcgagctccccttcggggtgagcatgtcaccgtcgagcgacctcttggcggtgccctagtgtcctgtgcgtggcgttatgtaccggtggctgcgttgtttctacccagtcgtctgcaaacaagaatggacgaaatggtttgagttggttctctgagcaggttgacaagtgaggacctctatgaagctgatgctaacatttacagagcaaaaggatctatattagagcagtatagaagggtggatgtgaggcttacattggttgtgagcttgaaagggaatttgttgtttggctggtcaaattgggctgttcaagttgccga

SEQ ID NO: 211263 - DNA, 1959 bp, Zea Mays
agatccttctgttccgtgcgcgcttctgcctattcagaggcagggtgagggggggagacgagttcttgtcggtttcattcttggccgccgacttcacatgccaacaaccccaaggagcagaagccaggctaggaccactaggccttggatcttgtcagggatggactttgctgattcgagacggaagcctaatttcacggggaagattgccgtggctgctgccctcacggtcatgtgcataatcgtgttgaaacagtcccctagtttcagcggcaccagcgtgttctctcgccatgaaactggggtgacccatgtgttagtaacaggcggtgctggttatattggctcacatgctactcttcgtctccttagtgacaagtacagggttaccattgtggataacctatccagagggaacatgggagctgtcagagttcttcaacggctatttccagaacccggaaggcttcagtttatttatgctgacttaggcgatgccaaagctgtatccttcctctgaattttaataacctagtgctccccgctccccttatattcatgtgttgatgacaattttgttttgcacttaaccaataatcaggtgaagaaaatattttcggagaatgcatttgacgctgttatgcactttgctgctgttgcttatgttggtgagagcacaatggagccactcaggtactaccacaacataacatcaaacacattgacagttcttgaggcaatggcagcatataatgtaaatactctgatttactcgagtacgtgtgcaacctatggtgaacctgatacgatgcctattgtagaaacaactcctcagaatcctatcaatccatacggtaaggcaaagaagatggcagaggacatcatcctagattttacaaaatcaaagaagcaatcagacatggctgtaatgatcttaagatacttcaatgtgattggatcggacccagaggggcgactaggagaagctccaaggccagagctacgcgagcatggacggatatccggtgcttgctttgatgcggctttgggaatcattccagggctaaaggttcgtggaactgattactccactgcagatggaacttgtattagggactacatcgatgtcacagaccttgtagatgcccatgtcaaagctcttggtaaagctcagccaggcaaagttggaatctacaacgtcggaacaggccaaggtagatcggtgaccgagtttgtagaagcttgcaagaaggcaacgggagcttccatcaaggtcgaatatcttgcccgtagacctggagattacgccgaggtatacagcgacccgtcgaaaatcctcagggacctcaactggacagcccaatacacggatcttggccaaagccttgcccaggcgtggaaatggcagaaggcgcacccgaacggatatgcatcggcctgattcagagctcaaaaggttgagagactcatcactcagattcatccaaggggtccgtccatgtgcagtcaatatagccttcagacaattggttcttcaccatagaaaaaacgtagcaacagcaacagaagagtcgtgattcttttattgcagagctggaagaagacaagagtatcgcagggagaatacactacctgttccttgattagtttcatttatatgtataggtcctcttttcgttggtggcattttagtacaatttggtgtaataacacaaggaaatcgtgttgtagacagggtagatcgaatctcgtgtatcgaccttcgtcttcttcgtggtggtagaatgaaaggatatatataaataagttgatgtatgtttctgttcccgtacttgtttcaagtctacacaaacacaaggctgcttgcctgcttctgccaggtccagcgagctgagctcctcagcttctcgtattatgagataacagtgagtcagtggcacaagcatttctttgaaaatg

SEQ ID NO: 211264 - DNA, 908 bp, Zea Mays
gtcgatggccctcatgaaaatcacaaattgagagagggagaagggggtgggggttacgtaacacggcgattcaggaggggatagcatcgtcatcgcaaaatgcaggctctcctgctccccgcgcgggccgcgccgccgacgccggcgatgcttcggcagcgtgcggtttctgcctccgcgtgtgcgtcgcaggtctgccgccccctattcggtgccgccagttgcatctcctgtggggtccacggaagcgttcggcggcacctcacagtggcggtggcggcggccccgccctcgccttcgtcctcaccttcgtcgggaccgctctacccgacgcctccacccaccgagcaggaggtggagagggtcaagctcgagcaggttatgaggagactagagaaaacagcaaggtatttcaagaatttgggtaccctggggttctggtcccaattggtgtgcacaattatttctgctggaattttggcattctctacagttgtaacggggaaggtgacatcaccctttacattctatgcaactgctgctggtattgctgctgcttttatttcagtcttctggtcatttggttacatccgtctctctgaaaggcttagaaaaacatccaaagaacctgctaaggctcctccacgtgctgatgttgttaagagccttaaaaatggcatcgtggttaatattcttgggatgggcgctgctgttctcggcatgcaagctactgttggtgctttggtagcaaaagctctcacaacctctgcagtaccctattatcaggctgctggccaaagccctgtcttggctttagatgttttcctagttcaggttaaatccgtttgactcgtcgaaacgacccttgttttggaacggatggagcagaaaataaaaataaaatgcac

SEQ ID NO: 211265 - DNA, 833 bp, Zea Mays
acaattctaaactccaattcagtgacatccaaacaatagaattgaaattatatctcatttcaatactatggctgatttggtattgaactcaattcaatttcatgccttccaatatcgacatccaaacggagcataagggaaattctagtatcatgagctggttatgaggagactagagaaaacagcaaggtatttcaagaatttgggtaccctggggttctggtcccaattggtgtgcacaattatttctgctggaattttggcattctctacagttgtaacggggaaggtgacatcaccctttacattctatgcaactgctgctggtattgctgctgcttttatttcagtcttctggtcatttggttacatccgtctctctgaaaggcttagaaaaacatccaaagaacctgctaaggcttcagcgaacaccatcctgtcgcatttccttggggtggcgagctccctggagctgctgcgctcggtgtcactgcctccagcagaagccgccgtcccggccccggcccctgcacgggcctgagccatggcccgttgggcaggtcaagaaaaaccttcaatccttggctttggctctagacagttgctatttcttgattgcatgtacaacttgcatcaagaatacatacacatcgatgccttccagttcacctggacgcaacatgttcgcgtaattcccgccgagtgtgagctcttgcatgagcactcgcgaaccacatgtggcgcttgtttgctgtgcaagtgcaagtgagtgcagtgaccggctctcgctcgttcttaatcattgtacccgtttcgctggtctcaactctcac

SEQ ID NO: 211266 - DNA, 399 bp, Zea Mays
attgaactcaattcaatttcatgccttccaatatcgacatccaaacggagcataagggaaattctagtatcatgagctggttatgaggagactagagaaaacagcaagtcttctggtcatttggttacatccgtctctctgaaaggcttagaaaaacatccaaagaacctgctaaggctcctccacgtgctgatgttgttaagagccttaaaaatggcatcgtggttaatattcttgggatgggcgctgctgttctcggcatgcaagctactgttggtgctttggtagcaaaagctctcacaacctctgcagtaccctattatcaggctgctggccaaagccctgtcttggctttagatgttttcctagttcaggttgtatgagtggtggggggtagag

SEQ ID NO: 211267 - DNA, 747 bp, Zea Mays
aactcaaactggatgttggcccagccagcccatctcattccgcccacatgcagcctcaaaaggcccagagcccaatcttatcctctccatcgtcgtccaacgaacggcggcgcgagtgggcgtgcagaagccgagagaaggcactcggcagatggaggggctgacgtccagtgagatcgccggattcgtggtgggtgccctgctgctcggcgccaccatcgctgcccccaaggtcgacggcttcatcgcctcctcccagagaaggtcactagggatgtgtaagaggtgcggtgaccttcggattgtagcatgctcgcagtgcaaaggaacaggatcagctcggagcggagggatgctcagtttgggaatgctggatgacctctacgagtctcttggagccgaagccaagactgagaatctggttccctgcacaaagtgcaggtcgagaggccgtctcctgtgtccagaatgctccaaggtcgcatgaccctggaaccaaggccgtctcctgtgtccagaatactctcaatgcagttgttctcagtgcttttggttgggctggttgggtgttttgtatcttgttcttttttattctctcgtctaataaaaattatggtaaatatattgtcatccttccccaaaaagtaaagtatcccaatgcaatctcacctcaacttgcaactctagccactacagatgatagaacaaagagtatacattcgtcattttaaagttgatttatcgtgg

SEQ ID NO: 211268 - DNA, 669 bp, Zea Mays
taggtctgtcgttcggtttgtgtacaagtgcacagtgccaatgcaaaaaattagcattgctttggatgggcagatggaggggctgacgtccagtgagatcgccggattcgtggtgggtgccctgctgctcggcgccaccatcgctgcccccaaggtcgacggcttcatcgcctcctcccagagaaggtcactagggatgtgtaagaggtgcggtgaccttcggattgtagcatgctcgcagtgcaaaggaacaggatcagctcggagcggagggatgctcagtttgggaatgctggatgacctctacgagtctcttggagccgaagccaagactgagaatctggttccctgcacaaagtgcaggtcgagaggccgtctcctgtgtccagaatgctccaaggtcgcatgaccctggaaccaaggccgtctcctgtgtccagaatactctcaatgcagttgttctcagtgcttttggttgggctggttgggtgttttgtatcttgttcttttttattctctcgtctaataaaaattatggtaaatatattgtcatccttccccaaaaagtaaagtatcccaatgcaatctcacctcaacttgcaactctagccactacagatgatagaacaaagagtatacattcgtcattttaaagttgatttatcgtgg

SEQ ID NO: 211269 - DNA, 1013 bp, Zea Mays
caattgctcgccgcgcgcctccctttccgccattgcaatctttgtttccgggaggggaggggatggaagggaaggttccgtccagcgcaggccgcagagacagagagcgcgaggaacagggagctagctagcagagctaataagaaagaaacgagcagcagcagggtcggtggccaagcatggagcgcaggaggagccggcacgccttgttgctcctctcggccgtcatggcgtccctcgtcaccggctcgaccgccgggatataccacatcgtcggcgccggcaaagggtggcggatgccccccaacaggacgtactacgaggactgggcgcgcaccaggcagatcagcatagtgttcctgtaccggagcggggtgcacaacatcgtggaggtgccgacgcgggagctgttcgacgcgtgcagcatgcgcaacatcaccagccggtaccagagcgggcccaccatcatcgagctcaccgaccccggcgagcgcttctacttctgcggcgtcggcgagcactgcgaggccggccagaagctcgccatcaacgtgctcctcgtcccgccgccgccgccggacacggacgacgactgctccagcgccgcccgcctcccgggccacgcgggcgcggggctcgccgccgcctgcatgtgcctcgtgtccgcgctgctgacaatggcggtgtgaatcggcacgctgccgccgtagattattggcgattgctggctgacggcgttgcttgctgctgcgtgtaaatcagtaacagtttaggcgtgtccattgagccattgtcttccccagctaatggaaggcggaaagccgtgtcgaggtactccctccgtttcgttttagttgtcgctggataatgcaaaattgaactatcgagcgacaactaaaaagaaactgagggagtaactgtttgtcagcacaggaaggaggataggaggacgacagcgggaaatcggaagtaaaatcagaggaggcagggacagaggagaaatgggaagagcc

SEQ ID NO: 211270 - DNA, 2151 bp, Zea Mays
cttgcacgcttttgcaccccaataaaaaaacaaaacatgaataaatcaaaagggagctgctgattgcgactgggagcttgagacccaccgctgaaaagctcaatcctctccgccctttccacactaaactcccagcagactcccccactccccatgtcttctggagtaagaagtggcggcggaggagatcaccatggcgtccaccaccagcatggccacggccacctcgccggagccgacgacggcgccgagtacgcgttctacagcaacgacatggagagcttcttcttcaatcagccggcgtcggcggacgtcaataatggaggcagcagaactggcgccgacgagctcaccatgccgccgtactccagcgtcacggactacctacaggggttcatggacatggacccctctgggctagctcggcacctcgacgcgccgtgcctgctggcggaggacgccccgctcaagcatgagctgtccgtcgatgtgagctacgacagccagggcaccagcggcgcgcccggagatggggcggcggcgatgcacacgccgaactcgtcggtgtctctctcgtcgagcgaccgggagggggagggccagcttcgtcggtgcaggaagggcaggccgaaggcggaggatgatgcggagggggatgagaaagatcaagaagacggggagaattccaccaaagcgaacagatccaagaagaaggccgagaagaggcagccccgcgttgccttcctcaccaagagcgaggtggatcaccttgaggacggctaccggtggcgcaagtacggccagaaggcggtcaagaacagtccttacccaaggtctccacagtttcacttgttcgttccccacatccatggccattataattgcatgctatgcatcacacaacacacatctagctatcttatcgtatacatgctaattaattaagagcacacaagtaaccaatgcacccaaatacccaatgcatagtacaacttgtatgtaaattctatcccaccaagagcacataaatggccaaacgcatgcaggagctactaccggtgcacggcgcccaagtgcggcgtgaagaagcgcgtggagcggtcgtaccaggacccgtcgacggtggtcaccacgtacgagggacagcacacgcaccacagccccgccagcttccgcgccggcggcgcgcacctcttcatgcccaacgcgcacgcgctgccgccgcagcacctgatgctgccgtccagcttccgcccggcggacctgatgggcatggtgcaccccgtcagcatgggcgcaaaccttagcatgttcctgccaactatgcctcctcatatgccatcgccggcgtctcgtgctcatcctcttcagcagcagcagcaccagttcactgactacgcgctcttgcaagaccttttcccttccacaatgcccaacaacccataactaactgctacacaattagctagcctagctagaatcgacatgagagatgctgtccaagtactctgcgccatatgtgatcacctgatggccttgcgctttgggcttggtctaatggggagggaactgcagttattattgattgattaatctgctagctttcatcttaaacattggtttacagttcttacccttccatttgtcaactctccgctgcgcggattgcatgggaggtactagagatggaaccgagtactttttatagctatcactataacggcaactaatttatgtacggcgcctctagacttcttgtacgtgtacatatcatgtgttcctcattgaatcatttgggagaaaaaaactggaagaggagtatttcatttcattctctacttgccgtttggaattcaaaaataagttttctcttacgccccgtttggatcattaaaattaaattccattctaaaaatagtaatttagacatatatcaattaagttaattcgattctatacaaaatatatttgtatactattattataagtcggagatatttatgtgctacatttttactatagaggagtgagtcgaagagcgtcatctaagttacagagtagaaacaaattctactaatatatatatactaggtgagtgcccgtgcgttgccacggaagttaaaaattagtataaagcataggtacaatacg

SEQ ID NO: 211271 - DNA, 3963 bp, Zea Mays
cgggagggggtcgggggctcgtggcggcgctgcgctgtgcgcgaggatgcgccgcgcgggcggctcgctgctggtctgttgcgcgcgcccgccgcgagggtaggtttggtgccatggaagggacggcggcggaggtgggcggcgctggcgctgacgcggccggggatgtgcagattaagggtgccaaggagaatgcgcagcccacggcggcgcagcagcagcagccgtccggcagcgaggcgctggagatgccggccacgccactccagcgggacatagactggtccgagcatttctccttcttcacctcgctgggtgggttcgggggcagctcggacggcgcgaggggcctcaccagcgtcggcctgtccaattccgagtccaggccagacagtgtggcacagcgtggcttggaccacgacactgaagagagggtggaggagctcacattgaagaattgcatcaatactggtatccagcctgaggtttctgctggtgggagcacaagcagcagggataggcctacccgtattaagggcctgtggggtaattttacacggatcgcccggagaactagcgatttggccagcagggaaaacaccgcactgagttctggcgacattgcaaacttgagggctggtgatgcttctagcatggaaaagctggcgacgagccttgccagcaatatcatctcaaggaacaacaatgcgtctggcaatgaggcacctatgagtcatgttggatatgtcaataatgagttcatgatgtgcagccagcagattctcttgtctccatggtctaatcaggataatgctcttaaagtaagcagcttctcaaataggattcttaaccggatgagaagtaagactgtggcaccctcatctagggttctacgatcaccacttcaaatcaaatcaaaaggtaaaggggttgtgtgccaaggtgcacgggaggagatccaagtgcaagctaatgcaagacccagagaccctttggacaagattccgactattcctagctcaattcatgattgtatggccagagtggaccatatgcttttcagtactggtggaaatgttacaaaatcccactctgagggatctagcctgagggaactgattaagcctgggtggcaaacaatgactaagtttgagaaaatgcatttgtttaagcagatcattgatcttgtggataagtgtcatgcacagggttttactttgcagcatttgcgaccatcatattttatggtcctttcttcaaatcaagttaaatatatcggctcttataccacacaagatttgccaacatcaatcaaacaagaggttgctagagaagatcttgtgaatagaaaaagaacttttggacagagaattgatcaccaagagtctaatgaccatggaaatttgacgctgaagtatcaaaaggttgatgagcaaggctcagtcgctatcaggcaaccagcaaatacattttggaccgacaaaatatgtgacaatcaaaatgaagatgtcaatcgaggtgttttgaggcaagaaaattttagccacactgccagagaaggttttaagttggtcgaaccatatggcagtaatatatcttgtgctcagcatgtatctagttctgccacccaacaaccagcatttgaattgaggaatcttgaggaaagctggtacaaaagcccagaggagctcagtcaatttaaaggcacattcccatcaaacatctacagccttggggttcttctatttgagctcttttgctgttctgagacatgggaggtgcactgtgctgcaatgtcaaatcttcgtcaacgcatcctgcctccaaattttctttcagaaagtcccaaggaggctggcttctgcctttggttgctgcatccagatccttgttcaagaccaaaagcaaaagagattcttggatgtgacttgataaatgggggtcaggatttgtcgttgttagatgaggcaccagtttccatcggtgaagatgacactgaatctagtttgctacttaacttcctttctcaattgaaagaagaaaaggcgatgcagtctgccaagttatcggcagagcttggaagcttacaaacagatatcacagaggttgacaaaagacactcagcaagaatgagattgagtttagatgatacagatgtactgccaagttctagtgctttgtcaggagcttctgtgagtgcccttcaaggtgcattgctgtcaggtttgttaccagcgtcatacaagtcgagcatatatgaggagagggtaatgaggaatttggtgcagcttgaaaatgcatactactccatgaggtcctcgctggacacctgtgaaacaaatgtaatcaaacggccagataacgaggctttgagggcccgtgaaaatttccatcaacttcatagtgattctgatgccaaggacgagaaaacagatcgtcttggatgcttttttgatggtttatgcaaatatgcccggcacaataggtttgaggtacgaggaattttgaagaatgcagatatacttaactctccgaatgtcatctgttcgttgagttttgatagggatgaagaatattttgctgctgctggagtttcaaagaaaataaaaatatttgaatttgatgcactcttaaatgatcgtgttgatattcattacccactgatagagatgcctagcaagtccaagcttagctgtgtctgttggaacaactatataaagaactacctggcttcaacagactatgatggcactgttcagctatgggatgccagctctggtcaaggattcacacagtttacagagcaccggaaaaggacttggtctgtgagtttttcagatgtcgaccctactaagttggcaagtggtagtgatgattgttgcgtgaaagtatggagtattaatcagaaaaattgtgttgatacaatcagaaatgtggccaatgtatgctgtgtacaattctctccatactcctcccgcatgctagcttttggttcagctgattacaagatatactgttatgatctgaggaacacaaggataccttggtgtactattttgggacatgggaaagctgtcagttatgtgaggttcttggatccatacacacttgtctctgcatcaaccgacaacacattgaagatatgggatcttaaccagactaattgcagtggattatctaccgattcttgcagcctgactctgaatggtcataccaatgagaagaattttgtagggctatctgttcatgatggatacataacttgtggctctgaaaccaatgaagtgttttcttactacaaaactttccccatgccaataacttctcataggtttggttctattgacccgataactggacaagtgacaaatgaagacaaccagcaatttgtgtccagtgtttgctggagagggaagtcaaacatggtagtggctgccaactccagtggtagcatcaaagtgcttgagcttgtgtgaatgaacgagagtcatattggagaagaaggttctagtgttgccatgcgggcctgcgatgctttcgtgcccttgggcactaaaagactcgactgctctatgcaagcatcctacaacaccgatcattggttattggaagctttgcttgaaactcacaagcaaactaaagtttttttttttccaagaaggtgcgcgggacttgctatgactgttaagagcaaacgatggaaagaaagggaaaaaaatgatcatgtagctcgaagaagttaatcgtgctgtgtgaatgtttcaaggagaatgtctcaaatagttttatacccccttcattattgtacatatatctagggctgcctaatgaaaggccttgtaagttgtaactagagtagaatgctgatcatgagttaagtataatgaatggtcttcacaaaagattaatcaatggaagattcatacaaagtataatgaatgattatccttttggctggaacaa

SEQ ID NO: 211272 - DNA, 1640 bp, Zea Mays
cgatcccgccgcgacccccgcccgccgccaatcgcccgccgcgaaccccgtccgccgccaaccgcaaggcgcgaacgcccgcccgccgcgaccgctcggcaaacgccgtgaacagcccgccaccaaccgcgatacgcccgtcgcgaccttccgcgaaccctgcccgccgccacgaatgcccgcctctgcgaaccctgcaagccacgatacgcccgccgcgacccgccgcgaattccctcccgcaacgcccgcacgaccgcccgcacaacccgcatgcccgccgcgagcccgccgcaaaccccgcccgcacgcccgccagccatgccgcgacagacctaccacaatttcacaaagatgttttctgctatttacagatgaatagttattgtcagggacaacaaggttccatcatttccagggaggaaaatgttcgtgtaatgattattggtagtccacccgctcttgttcgttgcagtcggcagcacaccacaaggaagtgaagttaggttgaaacagactcttgacttgtgaaaataattgatgaagatttcttctctttctccagatacttttgaagaggtgaagagcaagcgtgataggaaaaaaactcggtggcaaggcaatctttatcaaggtcaaatgtggctggctgggcaacagatggaggatttggctccaaaccttttcttgatggtctcgaagtgtataataaacaaaagaacaattctggaagccttgacagattcaagatggattcaagaccttcggggtgttttatcttgggaggtgttcatggaaatcacacttctttggaagctttcgaaggggttaacctgcagcccggcattgccggatagacacttttagaggttgtccagttccagaaaatatttagcaacctcggcttatgcagccatcttctaaggatccttgcagtaggaggcttttgatcgtgtctagaagatttgggctcctcctaggtgcactttcttcatctgccttgtgatccacaatcgatgttggacattggatcgattggctaagagaaatctccctcgaccgagctgttgtcccctttgtgaacaggaagatgagacaattaatcatatcttagtaatctgtgttttcagcaggcagttctggttctttattctccaaagaatggggctcattgctcacgacctgtgaaaataattaatcaagatttcttatctttctccggatacttttcaagagatgaagagcaagtgtgataggaaaaaagactcggtggtaaggcaaggtacgccgaggtcaaatgtaatattgttctgtacttcgatttggtgtattttgcttttttagtccctacaaaatgactgggatttagcaaagcggcttatctgttgtgcatcatttctattgtccctccgaattgcatattataaactatttctgaaatttcagtatattttttgtcgtttctatggtagatatatgttgaccggtaacatgtgtcacacataataaggggattaacaatgagggttcaacttgtttatacagctggtaacatgtttttctgaccggtaacatgtgtcacgcataataaggggattaacagtgagggtaacatgtgccaatgctcttggtaatttcag

SEQ ID NO: 211273 - DNA, 1641 bp, Zea Mays
cgatcccgccgcgacccccgcccgccgccaatcgcccgccgcgaaccccgtccgccgccaaccgcaaggcgcgaacgcccgcccgccgcgaccgctcggcaaacgccgtgaacagcccgccaccaaccgcgatacgcccgtcgcgaccttccgcgaaccctgcccgccgccacgaatgcccgcctctgcgaaccctgcaagccacgatacgcccgccgcgacccgccgcgaattccctcccgcaacgcccgcacgaccgcccgcacaacccgcatgcccgccgcgagcccgccgcaaaccccgcccgcacgcccgccagccatgccgcgacagacctaccacaatttcacaaagatgttttctgctatttacagatgaatagttattgtcagggacaacaaggttccatcatttccagggaggaaaatgttcgtgtaatgattattgatacttttgaagaggtgaagagcaagcgtgataggaaaaaaactcggtggcaaggcaatctttatcaaggtcaaatgtggctggctgggcaacagatggaggatttggctccaaaccttttcttgatggtctcgaagtgtataataaacaaaagaacaattctggaagccttgacagattcaagatggattcaagaccttcggggtgttttatcttgggaggtgttcatggaaatcacacttctttggaagctttcgaaggggttaacctgcagcccggcattgccggatagacacttttagaggttgtccagttccagaaaatatttagcaacctcggcttatgcagccatcttctaaggatccttgcagtaggaggcttttgatcgtgtctagaagatttgggctcctcctaggtgcactttcttcatctgccttgtgatccacaatcgatgttggacattggatcgattggctaagagaaatctccctcgaccgagctgttgtcccctttgtgaacaggaagatgagacaattaatcatatcttagtaatctgtgttttcagcaggcagttctggttctttattctccaaagaatggggctcattgctcacgacctgtgaaaataattaatcaagatttcttatctttctccggatacttttcaagagatgaagagcaagtgtgataggaaaaaagactcggtggtaaggcaagcaattcaaaaggctttggtggcgcggaacgatcgtcagtttgccgttagatatcttgacgaccaaatgtgtagatagagtctaaaacttttgcaaatctgaattttaggatggaataaatgtactattattgatgcaacttacatgtgtcaagatttgtaaaacattttgttctactgggaaatattaatgaataagtggaacatcaaatcgtttagcccgtacgttttccatttagaacaatattggtttaatgttgtgtcatgtttgacattgaaatcgtaacttcgctcgtgaaattatgtcaaatatgcaaatcaaatccggaacaaatttaatgtacattcggtataccgaagcccatctacaggagctaggcgtgctccatgaagatgttccacatcaccagagttatgaaaacaattactcgtcgcgtcacccatatccatctatgcagttcaagcttggaatataattt

SEQ ID NO: 211274 - DNA, 1163 bp, Zea Mays
ctgatccaacggctagcaagcgttgacgtgtgagctccgccggtacgcgcaccagatcgagtgtacccgtgcacgaggcgccggcctggagtcgcggtcgctgccgcatggccctggcctccctcgcggcctcgctcccagtcgccgccaccgccgccgcggtgagattcccattccgtttccgcatcggtcgcgccatggcctccgccgccgcaggggcctcgccggcgagggtggccgtggtacagatgacctccgtgggggacgtcgacgccaactacgccacctgctcccgcctcaccaagctgcttctggagtgaaatttctttgcttccctgaggtcttctcattcattggatccaaggatggcgaggctatgaagctagctgaaccattagatgggccaataatgcagagatactgctcacttgcaaaagaatcaagcatgtggctatctcttgggggttttcaagaaaagggacctgatgattctcaccagtacaatactcatgtattaattgatgacactggaaaagttaggagctcatatcgaaaaatacatttgtttgatgttgatgtacctggcaatatggtgtacaaggaaagtcgtttcacagccgcaggtgatactattgttgctgtggatagcccttttggacggttggggcttactgtttgctatgatttgagattcccagagctttatcaaattttgcgttttaagcatcaagcacaggtattactagtgccatctgcattcacaaagataacgggagaggcacactgggaaattctcctccgagctcgtgcaattgagacacaatgttatgttattgctgctgctcaagctggaaagcacaatgaaaaaagagaaagttacggtgattctataattattgacccatgggggacagtgatagctcgacttccagatcggctctccactggatttgcagttgcagatcttgatttgtcaaaagttgaggctgtgagaactcgaatgccaatttcagagcaccggaagttcgacagcgattggaaacccacgcctctttagtagctgagggtttattttgtgtttcctatgtttaatgtgcgtatacacatatagttgatatattcatctatgcataattattaccacaggtttggtcaaaaaaaca

SEQ ID NO: 211275 - DNA, 1268 bp, Zea Mays
ctctgatccaacggctagcaagcgttgacgtgtgagctccgccggtacgcgcaccagatcgagtgtacccgtgcacgaggcgccggcctggagtcgcggtcgctgccgcatggccctggcctccctcgcggcctcgctcccagtcgccgccaccgccgccgcggtgagattcccattccgtttccgcatcggtcgcgccatggcctccgccgccgcaggggcctcgccggcgagggtggccgtggtacagatgacctccgtgggggacgtcgacgccaactacgccacctgctcccgcctcaccaagagaatcaagcatgtggctatctcttgggggttttcaagaaaagggacctgatgattctcaccagtacaatactcatgtattaattgatgacactggaaaagttaggagctcatatcgaaaaatacatttgtttgatgttgatgtacctggcaatatggtgtacaaggaaagtcgtttcacagccgcaggtgatactattgttgctgtggatagcccttttggacggttggggcttactgtttgctatgatttgagattcccagagctttatcaaattttgcgttttaagcatcaagcacaggtattactagtgccatctgcattcacaaagataacgggagaggcacactgggaaattctcctccgagctcgtgcaattgagacacaatgttatgttattgctgctgctcaagctggaaagcacaatgaaaaaagagaaagttacggtgattctataattattgacccatgggggacagtgatagctcgacttccagatcggctctccactggatttgcagttgcagatcttgatttgtcaaaagttgaggctgtgagaactcgaatgccaatttcagagcaccggaagttcgacagcgattggaaacccacgcctctttagtagctgagggtttattttgtgtttcctatgtttaatgttagcgtgggctacaaagctttgaataggtgtaaacgctcagaaaaaggtgaattggtctaaacgcccccaaaaaagatatatagtggaaggatcaaaatgtataagaggtgaattgtataagagggaggtgatgagttagtctaaatttattttgcacaaatgacaccgaatattcattatacatgtgacatgatagaaatcacatgtatagcttcatcgtacattgtattgttatagaaccaatgttcatgataaatctttccttgaagccgactggttcattacatgcttaaaccttat

SEQ ID NO: 211276 - DNA, 2026 bp, Zea Mays
caccagtccagccagcctactgcatcgatggtacatgtacagttgccagtgtcgtctcaaagtcttgcactccctctctctccctacttgctagcagtagcaggcccagccaccgtcgtcgacagctgacagggtccctccctccctctcttaacaccgccaacttatccatcaatggagattaatgatgatttgctcttaccatccaccctctaccatgcatctttctcacactgtcttctcatctttttgtttttccttatataaaccaccatgagcagccagcaaccttactactctccacttcctgccaagtgccaacaagtcccctcttcttcgtctccaaagagacaaaacccaagagaggatcgtacgtcgtagggatcttgttcaatggcggacgcggacctgacaccaaaccactcgctcctcctcaagatgcctgcggcttcggcccacgcccactccccaagcctctcgagcctcctgttatacggccaggagagccatggcgaagcagcgcctgcaaacgcaaatgcaaatgcggcagcagcaacggtggaggacgccgcctcacttgagacctcttctgcagtggttgacagtgcatctccaatggagaggaagaggaaggctacagcagaagacagtgctgcaatcagctctcctcaaccaaaggactgcaagcaggagagcaagagcaggagggggaagaggccccgaaaggagaccgaggagaagagcagcactgatgaagacgaggcctccaaggggtacatccatgtgagggcgaggaggggccaggcgacagacagccacagcctcgcagagagggtgaggagagagaggatcagcgagaggatgaggatgctgcaggcactggtccctggctgcgacaaggttactggaaaggccatggttttggacgagatcatcaattacgtgcagtccctgcagaaccaggtcgagttcctttccatgaggattgcctccatgagcccagtgctgtacgggttcggaacgaacagtgaaggccttcatgatcatcacgcaccaaagatgggaggcgtgtcgttccaggaagccgccattgcagtgccagcaggtccagcggcagcggtgagccaagctagcagtaggccggctccatctgaagccaccatgaacaccgcttgcactaccacgccctactcagtctcactgcaggcccaggcttccatctcattctctccctctcaggaaaacggcggcacttattacctggtgcagcaagcggtgggggagcaggcaacgaggcaggaggagctgctgctgagccagttggtgttcagcaacatgtgctcgttccagtaggggggcagggcaggcaagagtgtttgcgcgagcggaagcgaggaaagagacccccacccacacacccatgcacattgagtcattgacaataggtactgttgcaagctaagtttcattgattgggaggccgacgactgaaaggaggaaatgatgctgcaagatttggctagtaggagcgccagatgagtttcagatccgagcggcaagcggagcctgctgtttgtttgcacattttgagagactttgtagtttgtaatgtttctagctcctgtatgacgattttctcggcggctgcacctgacctgcccaccgtcaccagctcaccgttgtagtagtctccgatgagcaaatcggttgttaatacgtaagagaggagagctatttttgttcttaggcaaacaatgcttaactgtttcattattcaacgacccaactcccagcatctcaacgaatcatagagtgatggacgatcagttttttccccccatgctatctcttgccgtcgggtatgggcagagctgtcgactgacttcgtgtccttgcattgggtttctttgactagtttttgagacggcctttgaactgtttgctcctgtgacaaagaaactcttgtcatcatatgaataacatttcatcggcatcagaggtctctctctgtgtctttctctgcttg

SEQ ID NO: 211277 - DNA, 1836 bp, Zea Mays
tcatcccttttcttcaccgcttcgaatcctccgcccgtcgccaaaaaaccaccctcgttttcgtccaccctcgccgcttccgcccatttcacctcgtcttcttctgttacgcctcgccccccgccgcctctctcgctagcaccagaatccatctctactcgctgccaccatgcacctcacggtcatgtccctctcggcggcggttgccaacggcgccgctgcctacaggtacgacacgatccagccggttgcgaggctccgcttctgcggcctcaggcgcaaggcccaccggctccactcgccccggtactcgcggcacttggtggccgctaggcggagcgtggtggttgcggcgacggctggcaatggcgcggccgcgagcggcacgttcgactacgacctcgtgatcatcggagctggcgtcggcggccacggcgccgccctccatgcagtcgagaagggtttgaaaactgccataattgagggagacgtcgtgggtggaacttgtgtcaacagaggctgtgttccgtcaaaggctctccttgctgtaagtggtaggatgcgagaacttcaagatgaacatcacatgaaatcactgggcctacaggtctcatcaccaggatatgacaggcaggttgttgctgaccatgcaaataatcttgcatctaaaatccgcagcaacttgactaattcaatgaaagctctgggtgtggatatactcactggtattggcaccattgtggggaagcaaaaagtgagatatgggaaagttggtttcccagacaatgaaatcactgctagaaacatcataattgccactggatctgttccttttgtccccaagggcattgaaatagatggtaaaactgtatttactagtgatcatgcactaaaacttgagtcagtccctgaatggattgctattgttggaagtggttacattggacttgaattcagtgatgtatacacagctctaggaagtgaggttacttttgttgaagctcttgatcaattaatgcctgggtttgatcccgagattgcaaaattggcgcagaggattcttattagtcctcgtaaaattgactatcacactggtgtttttgcaagcaagattaccccagcaaaggatggtaagcctgttttgattgagctgattgatgctaaaacaaaagaacacaaggagacacttgaggtggatgcagcactcatagctactggaagggcacccttcaccaaaggacttggcttggaaaatatcaatgtcgttacacaacaaggttttgttcctgttgatgagcggatgcaagttatggatgcaactggcaatgtggttcctaatttatattgtatcggagatgccaatggtaagctcatgcttgctcatgcagccagcgcacaaggaatctcagttgtggagcaaatcagtgggagggacaacattttaaatcacctaagcatcccagctgcttgtttcactcaccctgagatcagtatggttggcttgacagagccacaggctagggagaaggctgacaaggaaggatttgaaataagtgttgtaaagaccagttttaaggctaacacaaaggccctggcagagaatgaaggagatggacttgctaagatgatttatcgccctgacaccggagaaattcttggagttcatattttgggcttgcatgctgctgatctcatccatgaggcatcaaatgccattgcccttggaacccatgtgcaggacatcaagtttgctgttcatgcacacccaacgttgtctgaagttctggatgaactcttcaaggctgccaagataatgttccatccgtggaggccgag

SEQ ID NO: 211278 - DNA, 2320 bp, Zea Mays
ggtttagccagaaactagcggagaaccccttcgcggcgcagctcctttcttcctcctcggccctcgcgtctcttttcccagtcgacgcaccgccaaaagccctgggtagggtgactgggtgtctgggtctctacgcctccctcgtcatgctgcgccgcctccgtctgcgctcgccggtgtgcgctgtcgccggcgcggccgctgcaatggcgtcgctcaccaacgtcgcctacgccgatggcctcttccgccgccagtccccgccgtcgaatccaggcgacgaggacaatttgggagcctccgcgttcggccgcgacccggagaccctggagcgcatggctcgagcgctgcgggagatcaacaactcaccgctcgccaagcaggtgtttggactgatgcggaagcaggaggaaacacgccttactgagctggaggccgagaaggtccaatacgccatctacgagaagctcagggacatggaaaggatggagaaaaaagctgaagattacagaaatagtttgcaacaagaagcacaagtaaaagctcaagcattacgctttgaggatgaattagctagaaaaagaatgcagacagagcatgctgcacagaggcaacaggatgctgaacttgtgaagatgcaagaggcatctgccctcagaagagaagaagctaggcgtgcaacagaacagaagattttggaagaaatgatacggactgagaaggaaaaggctgaaatagatcaggaagtaaacagagctaaagctttagcagaagcagaagctcgtgttcatgaagagaagcaatcagaagaagttacaaaaagaatgatgttggaacgtatgaagggtgaaaaggaaaagtggctcgctgcaataaatacaaccttttcacacattgaaggtggattcaaagcactgttaactgataggagcaaactaataatgggtattggaggagttactgcactggccgctggagtctatactactagggaaggtgcgagggttacatggagttacatcaataggatcttgggtcagccttcactgatccgtgaatcatcaatgccaaagttcccactaccaatgtctaggttactcaaaccaagctcagcatctttgtcggggggagcaggctttgagaatgtgattctgcacccttcactcaagcggaggattgaacatcttgcacgagcaactgcaaatacaaagtctcatggtgcaccattccgcaacatgctgttttatggtcctcctggaactggcaaaactttagtagccagggagatggctcgcaaatctggcctggattatgccatgatgacgggaggagatgttgcacccttaggatcagaggctgttaccaagatccatcaaatatttgactgggctaagaagtccaagaaaggcgtaacagtacccatatgagcgaagctcagcggagtgctctcaatgcattgttgtttcgaactggcgaccagtccagggatattgtccttgtcctggcaacaaacagaccgggtgaccttgatgctgctatcactgaccgcattgatgaagtcatagagttccccttgcccggggaggaggagaggtttcaactgctcaagctatacttgcaccaatatatactcaaggaagagggcaaaggatcttggggtgcattattcaagaagcagcagcggaagattcaggtgaatggcataagcgacgatttgctcagggaagctgcaaggaggatcgatggcttctctggcagggagattgcaaagcttgtggctagcgtgcaagctgctgtttatggccggcctggctgcacattggatccccagttattttcggaggtagttgactacaaagttactgagcatcaccaacgcatcatgcttgcttctgagggtatggcttgatcaataagaaatattttacctggaagccacaggtttcaagctatcaaagatcgggtttggtgatgagcgacaaaactgacaatcacctcccactgacttgtagtcatgttttggatcccgtgggactttttgtaggcggaggttctatttccagaatttttgttccatgtgccttgcctgaagcaaggtctggtcccggatggacatccaaataggctggttgtggtcaactgagtttagtttaactcatttagtaggtttgcgctgtgttttaacttttccttaagtctctcgtgccccattcttggtagcatctgtacgcttgtttatgccaaagaaaaggatcaaattatttaggtgataattctttgtccattttttaattgattggttgctagcgatttttctttc

SEQ ID NO: 211279 - DNA, 3258 bp, Zea Mays
ccatccagcccagccaggaggaacaagcggatgcctttgatcgattccactgcaccacgcttctctccatttctttctggcgagagagagcgagacagcgagcgggcgcctccctcctgagctgtagtgtgctgctccgtttggaccagcgagattactgccgcgtattgtacctccctccgctaccaccaccaccaccacctgcgtagcagcgaggttatgtagcgcctcggaggaggagctagctgtagctagacacctcgtggtactagtactagtagagccgcccgctatataccgctaggccactggagtagcttgccaggtccaagcagccagccctcccggcccggattgcgctcgaagcaagcggccgcccgaggcgaggcgtgcgcgcgccgcgatggacttcggcgacgacgtcatggacggcggctccgacgcgcagcgccgcaagaagagataccaccgccacactccgcgccagattcagcagctcgaggcgatgttcaaggagtgcccgcacccggacgagaaccagcggatgcagctgagcagggagctggggctggagccccggcagatcaagttctggttccagaaccgccggacgcagatgaaggcgcagcacgagcgccaggacaactgtttcctgcgcgcggagaacgacaagatccggtgcgagaacatcgccatgcaggaggcgctccggaacgtcatctgccccacctgcggcggcccgcccgtcgccgacgaccattttgacgagcagaagctgcgcatggagaacgcgcgactcaaagaagaggcaagccgtttcgcgttcaccattgcgcttgcgcccggtccggcctctctcgacgggcccgccattttaccgcgctctagtttcacattcacaagcggcgaccttgaccgggtgtccagcctgacgtccaagtacctggggcggcccatcacgcagctgccgtcggcgcaggcgctgtccatgtcgtcgctggacctgtccgtcggcgggctcggcggcccgtcgctggacctcgacctcctcagcggcggctcctcggggtatcccccgttccacctcctcccgatggcggtgtcggagatggagcggcccatgatggccgagatggcgacgcgcgccatggacgagctcatcaggatggcgcaggccggcgagcacctgtgggtcaagacgggcggccgcgaggtgctcaatgtcgacacgtacgacagcatcttcgccaagcccgacggctcgttccgcggcccggacgtgcacgtcgagggctcccgcgagacggggctcgtcttcatgagcgccatcggcctcgtcgacatgttcatggactcgagcaagtggacggagctcttccctgccatcgtgtccaaagcgcgcacggtcgacgtcctcgtgaacggcatgggcgggcggagcgagtctttgcttctgatgtacgaggagctgcacgtgatgtcgccggtcgtcccgacgcgcgagttctgcttcctccgctactgcaggcagatcgagcacgggctatgggcgatcgcggacatctcggtggaccagcagcagcgcgacgcgaggttcggcgcgcccccgtcgcgctcgtgccgcctcccgtcgggatgcctcatcgccgacatggccgacggctcgtccaaggtgacctgggtcgagcacatggagatcgaggatcgggttcccatccacctgctctaccgcgacctcgtcctcagcggggcggcgttcggcgcgcaccgttggctcgccgcgctgcagagggcgtgcgagcggtgcgcgtgcctcgccacggccggcattatgccgcaccgggacattgcagcggcaggagtgacgccggaagggaagcggagcatgatgaagctgtcgcagcggatggtgaacagcttctgcgcgagccttagcgcgtcgcagctccaccggtggacgacgctgtcggggcccaacgacgtgggcgtccgcgtcatggtgcaccgcagcacggacccggggcagcccagcggcgtggtgctcagcgcggccacgtccatctggctgccggtcccgtgcgaccgggcgtttgcctttgtccgcgacgagcatacgcgctcccagtgggacgtgctgtcgcacggcaacccggtgcaggaggtgtcgcgcatccccaacggctctcaccctggaaactgcatctccttgctgagaggcctgaacgcgagccagaacagcatgctgatcctgcaggagagctgcaccgacgcgtcaggctcgctggtggtgtacgcgccgatcgacatcccggcggccaacgtggtgatgagcggcgaggacccgtccgcgatcccgctcctgccgtccggcttctccatcctgcccgacgggcggcccggcgcgtcgtcgtcgagggccggccaggcgccgtcggcggggtcgctggtgacggtggcgttccagatcctggtgagcagcctgccgtcggcgaagctgaacgccgagtcggtggcgacggtcaacagcctcatcagcaccactgtggagcaaattaaggcggccttgaattgcgccagccattgatggagccctgcccggccgatggatccatatggaattgatgcgtgcgtgcatgcatgcacgcgtaggtctcttctcctcccctcggccggccgcctgccgctcgcctgctggctgctgcgaggagtgaattcccttcaaggcgctggttcgcgacggggttcttggttggttgggggccttcaatgctggccattcatggaggcggggctgctgccatggtgtcgcccgcttggggttcacctgccgctgttgctgcgccgtccgatcacccatgatcattcagctctctctctctctctctcttcccgccactcatgcatgcatgatagcttttcctcttgctctagcatctaggtttcccgttcctgttacaggatttgaagcttgctcgcgaggctttgcatgaaacggaggagtcaagaacgcaccatgctcgtctcattcctcttgctgccgtcacgctcggttgttaattaattccattgctcttttaatttgtgcctcccccctctccctagtttttgcagtctcacattctgtagtctgcagcagaggatgatgaatggttcgggtattgacttctgtctaatggtgttaagccttcaatgatcattagttctacttgttttttagtagagataattaagacaaataccactgtcactgctttgatt

SEQ ID NO: 211280 - DNA, 3207 bp, Zea Mays
cttcaacctccagacttcaattgctaagtagtgtaactcaggaggagttggcttttcaattttcataggataaaatgaatctatagatgtttgcctggggcttcgtttgtatttagccagacctttggatgaagcttgctgtatatggacaatttcttctgactagagttggtatcctttgttttttgctcttccaattctttgcagtcagttcatgggtcttgtaactgaacagtgtttatttgtatagatctgccaccagataaagagcctcttgattggaacacacggatgaagatagctgcaggtgcagctaagggcttagaacaccttcatgacaaggcgagtcctcctgtgatttaccgggattttaagtcatcaaacattcttcttggagaaggatttcatccgaagctatcggactttggccttgcaaaacttggtccggttggtgacaagacccatgtttcaacacgtgtgatgggtacatatggctactgtgccccagaatatgcaatgactgggcagctgacggttaaatccgatgtgtatagctttggtgttgtgttccttgaacttatcacggggcgtaaagcaattgacaatactaagacccaaggggagcaaaatttagtggcatgggctcgtccactgttcaaggaccgaaggaaattccctaaaatggctgatccaatgcttcagggccgcttccctatgaggggtctataccaggccttagccgttgctgccatgtgcttgcaagagcaagctgctacacgtcctcacatcggggatgtcgtcactgctctctcatatcttgcttctcaggcatatgacccaaatgcccctgttcaacacgtccggagcaattcatccacccccagggccagaaaccctgctgggtggaacggcgaccagcgcagcgtgcgctcgcctaaccatcattctccagacccgcggcgcagagacgctgcgggggcatccaagtatggagcagaggttagcaggactagctctaccagcgactctggccggcgatcaggcctggatgacatggacctgaccgggtcgcaagtgggaagcccagcgcagaccggaagaagaagagaagctccaaggggcaccgacagacagcgtgctgtcgcagaggccaggacatggggggagaattcaagggagcgaacaaatggccatggcagcttcgacagcacccatgagtgaagccgtcaggttctgttccagtcatcattccagaacccccaccatgggttgagtccactcattcatcagcaccagtcagatccgatcttgggacatggcgtcggtccaagtgtctgtgaataaggcttttcttgccctcctgtggcgaatgcaattctcctggcgcccattccttgccaatgcgacctgtgtgtgtcatgcctctggcgactgggagcctcaggaggagcctgtaggattcagtcagaggtagacaggtaggagatggctctcacgagaattggcctcgccggcctcgcggtcatgggacagaaccttgccctcaacatcgcggagaaagggttccccatctcggtctacaacaggacaacctccaaggttgatgagaccgtgcagcgtgccaaggtcgaaggaaacctcccagtgtttggtttccacgaccccgcgtccttcgtgagctccatccagaagccccgtgtcgtcatcatgctcgtcaaggctggggcgccggtggaccagaccattgccacgctcgcggcgcaccttgatcagggggactgtatcgtcgatggtggcaacgagtggtacgagaacacggagaggagggagaaggcgatggaggagcgcgggctcctatatcttggcatgggcgtctccggaggagaggagggtgcccgcaatggcccgtccttgatgcccgggggctccttcgaggcatacaagtacattgaagatattcttctcaaggtggctgctcaggtacctgacagcggcccgtgcgtcacatatattggcaaaggtggatcaggcaacttcgtcaagatggttcacaatggaattgaatatggtgacatgcaacttatcgccgaggcttatgatgttctcaagtcggtgggtaagctcacaaacagcgagctgcatcaggtgttctctgagtggaacaagggtgagctcctcagtttcttgattgagatcacggccgacatctttggtatcaaggatgacaagggtgaaggctacctggtcgacaaggtcctggacaagaccgggatgaagggaactgggaaatggacagtccagcaggctgctgagctttctgtagctgctcctacaatcgaggcgtccttggactccaggttcctcagcggtctgaaggacgagcgcgttgaggcttccaaaatcttccaaggtgactactccactggcctaccggtggacaaggcacagctgatcgaggacgtgaggcaagctctatatgcctccaagatctgcagttacgcgcagggcatgaacatcatcaaggccaagagctcagagaaaggatggggcctcaaccttggtgagctagcgaggatctggaagggagggtgcatcatccgtgccatcttcctcgaccgcatcaagaaggcgtacgataggaaccctaaccttgccaacctcctcgttgaccccgagttcgcccaggagatcatagacaggcaagctgcctggcgcagggttgtctgccttgccatcaacaatggcgttagcaccccaggcatgtctgcaagtctggcctacttcgactcgtaccgcagggataggcttcccgccaacctggtgcaggctcagagagactacttcggcgctcacacgtacgagagggttgacatgcctggttctttccacaccgagtggttcaagattgcgcgcaactccaagatctgaacatggcctcgtgtttgcatatgccagtatgccaccgtgtcgagtaatcaatcatattactgcttgcagggaggaactgtgtttgatttttattttccatgcgcaatgcttaatttaggtcaggaagtccaaagtctctcccattgttttcctgtaagagctaagcagtaccagatggagaaccttatatttgctggaacatgaataaaagcatttgacatgcttgtgtttagttctctgtcggccatgcattatattttcctttccccttgacagaaa

SEQ ID NO: 211281 - DNA, 2007 bp, Zea Mays
ctgattgttaaatctattttatgtctagcgtgactgtaactgtgtgcttaggttgatagatcataattcttgattcagcttaaactgatcagcatgcgtgttgttctactattggatgtaccttataggtagggtgctaatttttttgtatcgtgtgcctggccatgtaatttttcatatgctatctatacttaaaacaaaacaaagttgaccagagggagagatacccccccctgattttgtttataagaagtttgtgccacccttccaacctgaactggtgattagaggtttcttcaacctccagacttcaattgctaagtagtgtaactcaggaggagttggcttttcaattttcataggataaaatgaatctatagatgtttgcctggggcttcgtttgtatttagccagacctttggatgaagcttgctgtatatggacaatttcttctgactagaatctgccaccagataaagagcctcttgattggaacacacggatgaagatagctgcaggtgcagctaagggcttagaacaccttcatgacaaggcgagtcctcctgtgatttaccgggattttaagtcatcaaacattcttcttggagaaggatttcatccgaagctatcggactttggccttgcaaaacttggtccggttggtgacaagacccatgtttcaacacgtgtgatgggtacatatggctactgtgccccagaatatgcaatgactgggcagctgacggttaaatccgatgtgtatagctttggtgttgtgttccttgaacttatcacggggcgtaaagcaattgacaatactaagacccaaggggagcaaaatttagtggcatgggctcgtccactgttcaaggaccgaaggaaattccctaaaatggctgatccaatgcttcagggccgcttccctatgaggggtctataccaggccttagccgttgctgccatgtgcttgcaagagcaagctgctacacgtcctcacatcggggatgtcgtcactgctctctcatatcttgcttctcaggcatatgacccaaatgcccctgttcaacacgtccggagcaattcatccacccccagggccagaaaccctgctgggtggaacggcgaccagcgcagcgtgcgctcgcctaaccatcattctccagacccgcggcgcagagacgctgcgggggcatccaagtatggagcagaggttagcaggactagctctaccagcgactctggccggcgatcaggcctggatgacatggacctgaccgggtcgcaagtgggaagcccagcgcagaccggaagaagaagagaagctccaaggggcaccgacagacagcgtgctgtcgcagaggccaggacatggggggagaattcaagggagcgaacaaatggccatggcagcttcgacagcacccatgagtgaagccgtcaggttctgttccagtcatcattccagaacccccaccatgggttgagtccactcattcatcagcaccagtcagatccgatcttgggacatggcgtcggtccaagtgtctgtgaataaggcttttcttgccctcctgtggcgaatgcaattctcctggcgcccattccttgccaatgcgacctgtgtgtgtcatgcctctggcgactgggagcctcaggaggagcctgtaggattcagtcagaggtagacaggtcagtgaagaaagaggaggggcgcggagtcacattggcgagtgttttgttttttttggcggctaaatgctgagtatgttcagctgcatgtgtcctttttgtgtatgtgtacgtgtaagacgtgtaatagcaaccgtgtcaggtttggctacctgagaggcctttgaagcttctgctgctgcttccttccccttgggaattgggagttcagagttgaaatgtaggataggcgatgttgttgagtacatcaactgtttttacccttccatgttgtacggcgacgcttccctgaacaatatgaccatgatgtgcccccct

SEQ ID NO: 211282 - DNA, 2561 bp, Zea Mays
ctggacgcgctgtggcctgccctgccaacctcacactggccgctgctgagcagagctgacttttgctccgcttgccttgccccaaacctcatattcccctcctccttgctgtagctatagctgtagctttcaccccactccctccacggcaccgcgcctccctcccccccttccccaaatcctcctcccctccccaattgggccaatagcccgctccgcttccagtcgcggcgtcggtcggggaagaagcttcgctcccgtgccgcagatcgggagaggagctccccgctcccgcctcgtcgtccgcttccccgccgccggtctctccgggaggcgtctccgtcgccggcgatgagctgcttcgtctgcttcgggtcggcggcgcaggacgaggagcctaggaagcccgctgccgcgggcgccggcaaggacgccgcgccggatcgcgcagtggctcgcgtcggatcagataaatcaagatcacagggtggaccagactctaagaaggatctaattatccataaggatgggaatagtcaaaatattgcagcacagactttcacttttcgtgagctcgctgcagccactaagaacttcaggcaagattgccttttaggagagggaggttttggtcgtgtatataaaggacgcttggagaatgggcaggtaagtatctcttaaacatgatgcatcgacattttatctgtgaagctaaatccttccaaatttggcttctgagttgaaacattaagtaaaatattggaaggaaatgctaacataacgattatacttaagccctggattagtcctggatactaacagagttttacttcccaggctgttgctgtgaaacaacttgatcgtaatggtctccaaggaaacagggaatttctggttgaggttctcatgctcagtctcttacatcacactaacctggtcaatctaattggctactgtgctgatggtgaccaacgccttcttgtttatgagtttatgccattggggtcactagaagatcatctgcatgataaagagcctcttgattggaacacacggatgaagatagctgcaggtgcagctaagggcttagaacaccttcatgacaaggcgagtcctcctgtgatttaccgggattttaagtcatcaaacattcttcttggagaaggatttcatccgaagctatcggactttggccttgcaaaacttggtccggttggtgacaagacccatgtttcaacacgtgtgatgggtacatatggctactgtgccccagaatatgcaatgactgggcagctgacggttaaatccgatgtgtatagctttggtgttgtgttccttgaacttatcacggggcgtaaagcaattgacaatactaagacccaaggggagcaaaatttagtggcatgggctcgtccactgttcaaggaccgaaggaaattccctaaaatggctgatccaatgcttcagggccgcttccctatgaggggtctataccaggccttagccgttgctgccatgtgcttgcaagagcaagctgctacacgtcctcacatcggggatgtcgtcactgctctctcatatcttgcttctcaggcatatgacccaaatgcccctgttcaacacgtccggagcaattcatccacccccagggccagaaaccctgctgggtggaacggcgaccagcgcagcgtgcgctcgcctaaccatcattctccagacccgcggcgcagagacgctgcgggggcatccaagtatggagcagaggttagcaggactagctctaccagcgactctggccggcgatcaggcctggatgacatggacctgaccgggtcgcaagtgggaagcccagcgcagaccggaagaagaagagaagctccaaggggcaccgacagacagcgtgctgtcgcagaggccaggacatggggggagaattcaagggagcgaacaaatggccatggcagcttcgacagcacccatgagtgaagccgtcaggttctgttccagtcatcattccagaacccccaccatgggttgagtccactcattcatcagcaccagtcagatccgatcttgggacatggcgtcggtccaagtgtctgtgaataaggcttttcttgccctcctgtggcgaatgcaattctcctggcgcccattccttgccaatgcgacctgtgtgtgtcatgcctctggcgactgggagcctcaggaggagcctgtaggattcagtcagaggtagacaggtcagtgaagaaagaggaggggcgcggagtcacattggcgagtgttttgttttttttggcggctaaatgctgagtatgttcagctgcatgtgtcctttttgtgtatgtgtacgtgtaagacgtgtaatagcaaccgtgtcaggtttggctacctgagaggcctttgaagcttctgctgctgcttccttccccttgggaattgggagttcagagttgaaatgtaggataggcgatgttgttgagtacatcaactgtttttacccttccatgttgtacggcgacgcttccctgaacaatatgaccatgatgtgcccccct

SEQ ID NO: 211283 - DNA, 1879 bp, Zea Mays
cgccaagatccgaaatcactggctggtgagcggcagcagagcccagacgtcagatcaaaaggctctcgcctcggcttggcagtcggcactccctctccaccgcgctgcaggggcgacgcaaggccgagcgctcctcgatccagatccaaggtaggagatggctctcacgagaattggcctcgccggcctcgcggtcatgggacagaaccttgccctcaacatcgcggagaaagggttccccatctcggtctacaacaggacaacctccaaggttgatgagaccgtgcagcgtgccaaggtcgaaggaaacctcccagtgtttggtttccacgaccccgcgtccttcgtgagctccatccagaagccccgtgtcgtcatcatgctcgtcaaggctggggcgccggtggaccagaccattgccacgctcgcggcgcaccttgatcagggggactgtatcgtcgatggtggcaacgagtggtacgagaacacggagaggagggagaaggcgatggaggagcgcgggctcctatatcttggcatgggcgtctccggaggagaggagggtgcccgcaatggcccgtccttgatgcccgggggctccttcgaggcatacaagtacattgaagatattcttctcaaggtggctgctcaggtacctgacagcggcccgtgcgtcacatatattggcaaaggtggatcaggcaacttcgtcaagatggttcacaatggaattgaatatggtgacatgcaacttatcgccgaggcttatgatgttctcaagtcggtgggtaagctcacaaacagcgagctgcatcaggtgttctctgagtggaacaagggtgagctcctcagtttcttgattgagatcacggccgacatctttggtatcaaggatgacaagggtgaaggctacctggtcgacaaggtcctggacaagaccgggatgaagggaactgggaaatggacagtccagcaggctgctgagctttctgtagctgctcctacaatcgaggcgtccttggactccaggttcctcagcggtctgaaggacgagcgcgttgaggcttccaaaatcttccaaggtgactactccactggcctaccggtggacaaggcacagctgatcgaggacgtgaggcaagctctatatgcctccaagatctgcagttacgcgcagggcatgaacatcatcaaggccaagagctcagagaaaggatggggcctcaaccttggtgagctagcgaggatctggaagggagggtgcatcatccgtgccatcttcctcgaccgcatcaagaaggcgtacgataggaaccctaaccttgccaacctcctcgttgaccccgagttcgcccaggagatcatagacaggcaagctgcctggcgcagggttgtctgccttgccatcaacaatggcgttagcaccccaggcatgtctgcaagtctggcctacttcgactcgtaccgcagggataggcttcccgccaacctggtgcaggctcagagagactacttcggcgctcacacgtacgagagggttgacatgcctggttctttccacaccgagtggttcaagattgcgcgcaactccaagatctgaacatggcctcgtgtttgcatatgccagtatgccaccgtgtcgagtaatcaatcatattactgcttgcagggaggaactgtgtttgatttttattttccatgcgcaatgcttaatttaggtcaggaagtccaaagtctctcccattgttttcctgtaagagctaagcagtaccagatggagaaccttatatttgctggaacatgaataaaagcatttgacatgcttgtgtttagttctctgtcggccatgcattatattttcctttccccttgacagaaa

SEQ ID NO: 211284 - DNA, 1879 bp, Zea Mays
gctgaccataccacagatcgggagcatctgaacaattgtgaacgaaagaagaagaagaggccaccatactgatgaccagtcgatcacggcagaatctcgccaagatccgaaatcactggctggtgagcggcagcagagcccagacgtcaggtaggagatggctctcacgagaattggcctcgccggcctcgcggtcatgggacagaaccttgccctcaacatcgcggagaaagggttccccatctcggtctacaacaggacaacctccaaggttgatgagaccgtgcagcgtgccaaggtcgaaggaaacctcccagtgtttggtttccacgaccccgcgtccttcgtgagctccatccagaagccccgtgtcgtcatcatgctcgtcaaggctggggcgccggtggaccagaccattgccacgctcgcggcgcaccttgatcagggggactgtatcgtcgatggtggcaacgagtggtacgagaacacggagaggagggagaaggcgatggaggagcgcgggctcctatatcttggcatgggcgtctccggaggagaggagggtgcccgcaatggcccgtccttgatgcccgggggctccttcgaggcatacaagtacattgaagatattcttctcaaggtggctgctcaggtacctgacagcggcccgtgcgtcacatatattggcaaaggtggatcaggcaacttcgtcaagatggttcacaatggaattgaatatggtgacatgcaacttatcgccgaggcttatgatgttctcaagtcggtgggtaagctcacaaacagcgagctgcatcaggtgttctctgagtggaacaagggtgagctcctcagtttcttgattgagatcacggccgacatctttggtatcaaggatgacaagggtgaaggctacctggtcgacaaggtcctggacaagaccgggatgaagggaactgggaaatggacagtccagcaggctgctgagctttctgtagctgctcctacaatcgaggcgtccttggactccaggttcctcagcggtctgaaggacgagcgcgttgaggcttccaaaatcttccaaggtgactactccactggcctaccggtggacaaggcacagctgatcgaggacgtgaggcaagctctatatgcctccaagatctgcagttacgcgcagggcatgaacatcatcaaggccaagagctcagagaaaggatggggcctcaaccttggtgagctagcgaggatctggaagggagggtgcatcatccgtgccatcttcctcgaccgcatcaagaaggcgtacgataggaaccctaaccttgccaacctcctcgttgaccccgagttcgcccaggagatcatagacaggcaagctgcctggcgcagggttgtctgccttgccatcaacaatggcgttagcaccccaggcatgtctgcaagtctggcctacttcgactcgtaccgcagggataggcttcccgccaacctggtgcaggctcagagagactacttcggcgctcacacgtacgagagggttgacatgcctggttctttccacaccgagtggttcaagattgcgcgcaactccaagatctgaacatggcctcgtgtttgcatatgccagtatgccaccgtgtcgagtaatcaatcatattactgcttgcagggaggaactgtgtttgatttttattttccatgcgcaatgcttaatttaggtcaggaagtccaaagtctctcccattgttttcctgtaagagctaagcagtaccagatggagaaccttatatttgctggaacatgaataaaagcatttgacatgcttgtgtttagttctctgtcggccatgcattatattttcctttccccttgacagaaa

SEQ ID NO: 211285 - DNA, 2176 bp, Zea Mays
tctcatgcagaacaacaacatcaccggcccaatcccagcagagattggcaagcttacaaagctcaagacacttgatctctccagcaaccacctgtacggtggaatccccgcttctgtaggccaccttgagagcctgcagtacttgaggctcaacaacaacaccctttctggtccattcccttcagcatcagctaacttgtcccagctcgttttcctagacttgtcatataataacctgagtggtccaataccgggatctttggcaagaacattcaacatagttgggaatcctctcatctgcggcaccaacaccgaggaagattgctacgggactgccccaatgccgatgtcctacaagctcaatagctcgcagggtgctccgccactggcaaaatccaaaagccacaagtttgttgcagttgcattcggtgcagcaattggttgcatcagcatcctctccctcgctgccggattcctgttctggtggaggcaccgtagaaaccggcagatccttttcgacgtcgacgaccaacacatggagaacgttggccttggaaacgtgaagaggttccagttcagggagctccaggccgcgacagacaagttcagcggcaagaacctgctagggaaaggtggctttgggttcgtttacagagggcagctccctgacgggactctcgtggctgtgaagcgactgaaggacggcaatgtcgcgggaggcgaggcgcagttccagactgaggttgagatgatcagcttggcgctgcacagaaaccttctcaggctctatgggttttgcacgaccgccaccgagaggctgctggtctacccatacatgtctaacggaagcgtcgcgtcgcgcctgaaagggaagccgcctttggactgggcgaccaggaggaggatagctcttggcgcagggagggggctgctgtacctgcacgagcagtgtgaccccaagatcatacacagggacgtcaaagcagccaacgtcctgctagatgactgctgcgaggccatcgttggtgactttgggctcgcgaagctcctggaccaccgggactcgcatgtcaccactgcggtgcgaggcaccgtcggtcacatcgcgcccgagtacctctccactggccagtcgtctgacaagaccgacgtcttcgggtttggcatcctgctgctggagctggtcactggtcagaccgcgctggagttcgggaaggcagcaaaccagaagaagggagccatgcttgattggcaaagcattgttgttgttgttgttggtcaggtgaagaagatgcaccaggagaagaagctggacgttctggtggacaaggggctgaggagcaggtacgacgggatcgagatggaggagatggtgcaggtggcgttgctgtgcacgcagtacctccccggccaccggccgaagatgtcggaggtggtccggatgctggaaggtgacgggctcgcagagcggtggcaggcttcgcagcgcgcggactcgcacaagtccttcaaagtgcccgacttcactttcagccgctgctactccgaccttaccgacgactcgtcattgctggtgcaggccgtcgagctgtccggcccaagatgacaccaaccaccaccaccgtcagtttgcacttgtacagcataaggaccgagaatcatgtgtatattgccatattggagaataaaatgagccatgttagaataactatagtgtgtattagatagatgaactgtacaaaagaagagcgtaaggtttgtacaggtttggatatttacatatttctagcagttgagacagtaataccaagtagacgagctttttactgaaccggaaagcttttgcttgtgttgtcaggttctgttgacccttccctctatatccgtttccttgctgtatatttccagagtgcaaaaggttctgaaatcttataaagtccttagttgatatgagctgcatttcaaagaagggaattgctaaattgtgggaattctgaaatttaattaatttttgtaagatatgagctgcatttcaaagaagggaattgctaaatctcagctgaatgtttcatcagactccaaccgcatagaatcatagtatgcaattgcgtttgccccagacatattttggcaaagcattaccggctttcacatgtccatcagacaactgaaggac

SEQ ID NO: 211286 - DNA, 812 bp, Zea Mays
  misc_feature (811)..(812): n is a, c, g, or t
ccactccagactgcactcttcttccttccgcttccgccttcgccacctcccccacctctccctccgtctggtcctgcccgcgcctcccctccccccagtccgtcgataaagccgaggcatcgggacggcggcaggtagaaggagcacccattgcttccgcatctcgcgcaggctctccccaccgcactcccacgcctgataccataccattccgccgccgcatcgacttctcctcctctgaacccgcggcgggggcggacggagatccattccagccggacctggatcggcctactccgacaccggcgtatctccggttaattaaaaaggtccgctggttaacttcttcagctttttgggaagataaacaagactgcccttcagctgagtgctcggaagaagtgggagggatttcacggttcatatccgtatctgcctcgaggaacccgctgcgagaaaaagggagtggacaggggccccccggctgggtcacgagctatggacagaaccgccaatgcggtgttggatatcgagggtctgcctcaaccacctgataaatgctgctccggaagtccaaaaatgatcagggccttgtcacgcaagggttcgaatcggatggaaatgaagggtggtgatgagctggagcagcaagaggatctgaccagaaaacttatcatcaaagctggagcagcagcgggccatgggtcactgcactccctgcgcgcctgtcctcctcattgactccgcggaaggaaggagcagcaggaggtttggccggctcatcacgcccgtcaataaccctcggaggatnn

SEQ ID NO: 211287 - DNA, 912 bp, Zea Mays
gaaactgcaaagcgagacttcccatccattccactccgcagtggcggcggcggcggcggcgaggtctctacgactttcagatctctccgaagagggcggaggggagggagatgtcgtaatgctgccggagggctgctgacgaagatgcggaagctggtgaagggcctcgccaggcccgagcccaggtggctcagggccatggaagacaccagtgacatttcctcgcatgatgggaagattaaggggtgtttgtttgggattataatctgtccagattatatagtccaacaacttgaacaccccctaagaagatcgagtttctgatgatgtgtatgttaggaagctaaacaaaaagaacatccggattcgctatgccatgatgcaatcaatggatttgatccaccaccagcacgagcttttgcttggcggtcctggagttgaaagaacaaggagtcagtgaagatgatgtgatggctgtagcagatcaactggccatggtctcatattgctcctggcctatcatttggaaattcttgatttacaaccgaggaaaaggtttctcagcaagctgatcaagatgtattttgcttgcttcagaatattttgcttacagcttgcattgtgacatgttggcaggatgtcagtttcccttcaacttagctcttgtatgcatcctatgtgcttgtcgtatatccatccctaacttggctcttgtatgcttcctatgtgcttgtcgtatatccatccctaacttggctcttgtatgcttcctatgtgattgtcgtatatccatccctgtgatgaacattttagtaatctgagtgctcattcagttggtgctccctcctcatcactttgatgggaggttgaaggaaccaatatctgtgagtacactgttgagacctggcgttc

SEQ ID NO: 211288 - DNA, 914 bp, Zea Mays
actgcaaagcgagacttcccatccattccactccgcagtggcggcggcggcggcggcgaggtctctacgactttcagatctctccgaagagggcggaggggagggagatgtcgtaatgctgccggagggctgctgacgaagatgcggaagctggtgaagggcctcgccaggcccgagcccaggtggctcagggccatggaagaggcagcaccagtgacatttcctcgcatgatgggaagattaaggggtgtttgtttgggattataatctgtccagattatatagtccaacaacttgaacaccccctaagaagatcgagtttctgatgatgtgtatgttaggaagctaaacaaaaagaacatccggattcgctatgccatgatgcaatcaatggatttgatccaccaccagcacgagcttttgcttggcggtcctggagttgaaagaacaaggagtcagtgaagatgatgtgatggctgtagcagatcaactggccatggtctcatattgctcctggcctatcatttggaaattcttgatttacaaccgaggaaaaggtttctcagcaagctgatcaagatgtattttgcttgcttcagaatattttgcttacagcttgcattgtgacatgttggcaggatgtcagtttcccttcaacttagctcttgtatgcatcctatgtgcttgtcgtatatccatccctaacttggctcttgtatgcttcctatgtgcttgtcgtatatccatccctaacttggctcttgtatgcttcctatgtgattgtcgtatatccatccctgtgatgaacattttagtaatctgagtgctcattcagttggtgctccctcctcatcactttgatgggaggttgaaggaaccaatatctgtgagtacactgttgagacctggcgttc

SEQ ID NO: 211289 - DNA, 917 bp, Zea Mays
actgcaaagcgagacttcccatccattccactccgcagtggcggcggcggcggcggcgaggtctctacgactttcagatctctccgaagagggcggaggggagggagatgtcgtaatgctgccggagggctgctgacgaagatgcggaagctggtgaagggcctcgccaggcccgagcccaggtggctcagggccatggaagaggcagcaccagtgacatttcctcgcatgatgggaagattaaggggtgtttgtttgggattataatctgtccagattatatagtccaacaacttgaacaccccctaagaagatcgagtttctgatgatgtgtatgttaggaagctaaacaaaaagaacatccggattcgctatgccatgatgcaatcaatggatttgatccaccaccagcacgagcttttgcttggcggtcctggagttgaaagaacaaggagtcagtgaagatgatgtgatggctgtagcagattagcaactggccatggtctcatattgctcctggcctatcatttggaaattcttgatttacaaccgaggaaaaggtttctcagcaagctgatcaagatgtattttgcttgcttcagaatattttgcttacagcttgcattgtgacatgttggcaggatgtcagtttcccttcaacttagctcttgtatgcatcctatgtgcttgtcgtatatccatccctaacttggctcttgtatgcttcctatgtgcttgtcgtatatccatccctaacttggctcttgtatgcttcctatgtgattgtcgtatatccatccctgtgatgaacattttagtaatctgagtgctcattcagttggtgctccctcctcatcactttgatgggaggttgaaggaaccaatatctgtgagtacactgttgagacctggcgttc

SEQ ID NO: 211290 - DNA, 398 bp, Zea Mays
aggaaggcggctggggacgggggcgtggagcggccagcgcgggcacgccgtcgaggcggcgcggcgttggctgcgctggtgcgccctatacgcgtcggcacatcgaacaatctgacttcgtgcggctcctgaccctggttggaagtgttcgcttcagctaaaacagctccagctgcggcctctctctgcagatcattgtagcagcagcagcgctgccaagggattagttgttgcatcctatgatgcaaccataatatgttcatgcagcaactcagttcagttgtactgtttgactcgagaaatgtaacaagctgtactgttaaaccaggtgatcctattggtgtctcggcgtcccaagttctgtgacactgaggccagagttcgttgtattcaaacac

SEQ ID NO: 211291 - DNA, 1161 bp, Zea Mays
  misc_feature (1161)..(1161): n is a, c, g, or t
cgcctttgctagcttccttggttccttccctccctctcctttgatccttaagcaacccttcccttccattccattccttggccacgtaacccaattacccaacgcatcgaggagcgcacgaaggcaaccgccttcccatcccaccgggcatcggcccatctgatccgatcaggctagatcctgccggtgccggtcttcgcgccgcctatggccgaaggcgacgcgcccgcccccgccgcggctgcagcggcggcgtccccgcggtcgcccatgccgcaggagacgccggcgatgcagaagcggaggcagcgggggctcgtgtcgcgggtgtggaagggcatcttcggcggccgcgaggacgtcgagaagctgctgcaggcgctgtccaaggaggaggaggccgtgcgggcgcgccttcgccgccgggcccgcgcctcccgccagtccgcgcacaacgtcctcgccctcgccgccgcgctcgaggtgatccgactcgcgccggctggattatctatccgatcatacatagcaaacaccgcacgtttctgcgcacttcgctgctgtatttctgctcctgcaccgtagaggatgggaattcctttctcgtagggcgctgaatccggttccaacagtggaatcaggaacatgatgagcaacctgccaggccatcgtgttacggtagtcagcaatagccgttgttatgattgggcatctatcgtcgcctcgcatcacacgcgatgctttgcgtaagttcagcgagtagagttagtactgttgctgaatggaatcgcattgggatcggctcatgagtgccccttcagatctaggccctttgagcaggagaaaattgtgttttgagatggtcccttgttatttcgtttttgcgacagattgttgccgttggatacgccatcatgaccacgagatcgccggacatcagctggcagatgagggcagtcagggtgctacccatgttcttggttcctgctctagctgctctcatctactcgaccattacaagcctcacgaaaatgcttgacaacagagaccaacaaactcttgaaaagctacgaactgaaaggcaagccaagattgatgaattgaaggagagaacaaattactacactactcagcaacttatacaggttcatttcagccctn

SEQ ID NO: 211292 - DNA, 258 bp, Zea Mays
ggtgtggattttaaaatcaagttccttacagttggtggaaagaaactaaagttgacaatatgggatactgctggccaggagaggtttaggacaataactagttcttactacagaggtgctcagggaattattttaggttgatgatgtcgaattgcatcgtgataatgtctaatggaagttttgcctatggaatttctatccggtccttcatcttgttcttttcgtacttggattacaaaagatcgactataacggtag

SEQ ID NO: 211293 - DNA, 3012 bp, Zea Mays
cacaacctcaaacccagaaggccagcagtgcgtgcgcccttttcttcgctcacattcatcccgcgtgctctctctctctctctctctcgggccgtggcgtcgagtgggcgaccgccgccacccccgtgccgtgcgctctctctctctctctcgtgtcgacgggtgggtgggcgaccgtaggccgccgccgccgcctaggccaggtgcccaggtcgaccttcaacagcgacgagcatccaccagacgcaatcaagtatggcttcaatggcaatcattaggagaaggaagtatttcttggatcatgttaacacacctaccatttcatcgtctgctttctttacattccaacatggaagactcggtttggaggttgagccaagaacagaacagcgatttctcgagcatagttctggggattccaaatgcgagaaggagcaacacaatatgaatttgataaaaaaggatctactaggtcttggtaatgggttttggcaacgtccatcttatgtgatttctctttctcatggtggatttggaaggaatgaatttagattgcctctgagcctgggagctagatctttgctgcagtcggtccgcacagcatcaactgcaacagcaaggcagcctaagatggatacagatgatgaacagagcgaggaccacaagcaaaataaaaggaaaaaggaggcatccccagaagaatgtgatcaggctgtggaaggcctcagcactgcaaaagctaaggctaaagctaaacaggtacaagaatctctgaaggttggccaatcaattatacagaaattttgggcaagagtcctgggtgtgggccctgctcttcgtgctgttgcttcaatgagcagggctgattgggcagcaaaacttaagcattggaaggatgaattcgtttgtacactgcagcattactggttagggacaaaactactctgggcagatgttaggatctcatcaagattgctggtgaaacttgctggggggaagagcctttcaagaagagagaggcaacagctgacacgcacaacagcagatatcttcaggctggttccgtttgctgtgttcatcattgttccattcatggaattcttactgccagtcttcctcaagttatttccaaacatgcttccatcaactttccaggacaaaatgaaggaagaggaagcattaaaaaggaaattgaaagcaaggatggagtatgcaaaatttttgcaagataccgcaaaagaaatggcaaaggaagttcaaacatctcgtagcggagaaacaaaacaaacagctgaagatctggacgaatttttgaataaggttaggagaggtggacgtgtctctaatgatgaaatcttgaattttgcaaagctattcaatgatgaacttactctggataacatgaacagaccacgcttggtaaatatgtgcaaatatatgggtatccggccttttggtacagatcactacatgaggttcatgcttcgcaaaaaacttcaggacattaagaatgatgataaactgattcaagctgagggagttgaatctctctctgaagaagagctccggcaagcctgccgggaacgtggtcatctaggcctgctgtcaactgaagagatgtgccagcagctccgagactggttggacctatcacttaatcatgctgtgccatcttcacttctcatactttcaagagcctttactgtgtctgggagaatgaagccagaggaggctgttgtagcaacactatcttctttaccagacgaagttgtggatacaattgggacagtattgccatctgaagattcagtttctgaaaggaggagaaaattagaattccttgagatgcaggaagaacttatcaaggaggaagagaaaaagaaagagaaagaagaaaaggcaaaacaaaagaaagaagaggcaaagatgaaggaaccagaaactgctgaagaagatttagctttgaaggaaatgactgatgctactgctagggaagaactgagaaaagcaaaagaacatgacaaagagaagctctgtaatatcagccgtgccttggctgtgctcgcatctgcatcttctgttagcaaggagcgtcaagagtttctgagcctcgtcaataaagagatagagctatataactccatgctcaaaaaagagggtactgaaggtgaagaagcagctaaaaaagcatatatagccgctagggaagacccagacaatgatgctgaggctgctgcagaagaaaaggtctcgtcggcgttgattgagaaggttgatgctatgcttcaagaattagaaaaggagattgatgatgtggatgcacaaattggaaaccgttggcagctgcttgatagggaccacgatggcaaggtgactcctgaggaggtggccgcagctgctgcctatctgaaggacaccatcgggaaggaaggcgtgcaagagctcatcaccaacctttcgaaggacacagaaggaaagatcctcgtggaagatatcgtgaggctagcatcgcaaacagaggaacacaacgacgacgaagagcaatcacggcagtaggtggaaacagcccgagtatctagatgggtggcctattatttcaggaagaaaactaccaacctctcagttacttgatggctgtgcctggttaatcagaaggcagtacaggcgtttttggtgcccctagtcagagaccccggtagaataactcgttgctgtaaagatggtgtgactgtgacatgcatacaagtgatagggtactctacagagttgtggttcggcaggtagttcgcaaccgaaattttgactggttgctgtgaaagtggaaatacagttcggttttgtcttaaagctaccctcaattctaaaaaaattgtcttctcttgagtctaaaagtagacgggtgactaatgtggaaatgaattaggatgtttatgtactccccctgtttaaattatagagcattttaactttttggagattcagtatcttaaatttgaccagatctatctccag

SEQ ID NO: 211294 - DNA, 1310 bp, Zea Mays
gcggcccggccggtgggtggcgagcgcggtccgcacgcgccccctactacccccgttgcccgtccggtccgaccccccgtaggtcgcaggcacaaaagcgacctggcccttaacggcaattcagcctcgacgccggatccgcgcttcccgactcgccgctacgtcacccgattggggctggccctggccacgggcacccgccgaggcatttataagtacgagcgcccgggtgagccagagccccacacaccgtcttcctctgttttgccagggccaacgccattactagaagtctagaagagaggtggggaggcagagacgagaggcgtagggaattcgggggagagagagagaggcagggcggtgacgagcttggactggcgatcgcgggagcgatgacgacggcggccggcatgccggggtcgccggtgggctcggccgcggcggctggcggtcccgcggcgcccgaggtggcggccatggacgcggtgatcgggtggttccgcggcgagttcgcggccgcgaacgcgatgatcgacgcgctgtgcggacacctggcgcagatcggcggcggcggcggggccgagtacgaccccgtcttcgccgcgctccaccgccgacgcgccaactggttccccgtcctccacatgcagaagttctaccccgtcacggacgtcaacgccgagctgcgccgcgtcgcggccgcccgcgccgccgcggggccctgctgctactcggaggaggaggtcgcgtccacggtgatccacgatcccatggaagacctcccctctgaggcggagcccgaacccaggccggagcaccagcaggatcctatacaccaggatccggctccggaggccgaggaggctgacggcaccgtcatcaaccccgccttggagtgtcacgaggaggcggacgcgggggctgactcctcgggagattcgtcggagcggaaggccccctctacggaagacgacaccgtcccagacggacatcatactgatcaaggatctcaaggggaacacatcctaccagagagctatcccatctgctctgaccacgaggagtgcattgcccgtcctgagaggatcaagatccagaaaggtttcgtggccaaggaatccgtgaaggggcacatggttaatgtcgtgaaaggcttgaagatatatgaagatgtttttacaacatcggagatcatgaaggttgcagatttcatcaatgaaattcgtcaggctggcagaaatggagaactttcaggtcgtgccaagccatggtaacgtccgtccaaagtcgtgcacaacaaaatgttg

SEQ ID NO: 211295 - DNA, 1755 bp, Zea Mays
ctctgttttgccagggccaacgccattactagaagtctagaagagaggtggggaggcagagacgagaggcgtagggaattcgggggagagagagagaggcagggcggtgacgagcttggactggcgatcgcgggagcgatgacgacggcggccggcatgccggggtcgccggtgggctcggccgcggcggctggcggtcccgcggcgcccgaggtggcggccatggacgcggtgatcgggtggttccgcggcgagttcgcggccgcgaacgcgatgatcgacgcgctgtgcggacacctggcgcagatcggcggcggcggcggggccgagtacgaccccgtcttcgccgcgctccaccgccgacgcgccaactggttccccgtcctccacatgcagaagttctaccccgtcacggacgtcaacgccgagctgcgccgcgtcgcggccgcccgcgccgccgcggggccctgctgctactcggaggaggaggtcgcgtccacggtgatccacgatcccatggaagacctcccctctgaggcggagcccgaacccaggccggagcaccagcaggatcctatacaccaggatccggctccggaggccgaggaggctgacggcaccgtcatcaaccccgccttggagtgtcacgaggaggcggacgcgggggctgactcctcgggagattcgtcggagcggaaggccccctctacggaagacgacaccgtcccagacggacatcatactgatcaaggatctcaaggggaacacatcctaccagagagctatcccatctgctctgaccacgaggagtgcattgcccgtcctgagaggatcaagatccagaaaggtttcgtggccaaggaatccgtgaaggggcacatggttaatgtcgtgaaaggcttgaagatatatgaagatgtttttacaacatcggagatcatgaaggttgcagatttcatcaatgaaattcgtcaggctggcagaaatggagaactttcaggtgagactttcatattcttcaacaagcagatgaaaggaaacaagagggagatcatacagcttggtgtcccgttatttcaacctaccacagaggaagctaattgtcacacagaaccaatcccccttgtcctgcaggctgtcattgaccaccttgttctttggcaagcccccggtcagcggcgccatcatcggttatgccccgaccccgcagaccgtgctggcgcccgcggcctggggcatggccatgcgagcgcccgtcatgatggtggccgcagcgcctgcgaggcccatggtgatggcctcgttgggcaccggaggcggcaacatcagcaagtggatgagccgcagcggcaccggtgtgttcctgccgtggacggtcgggccgaagcggtacaacaagcaccttccgccgcgcatccagaagcgccggttctctgcgatgatgtcgcccatcgaggcgcagggctgaggacctgcccgacttcacgtcgccgtcgaacctgtgttttttttttttccttgagggctttcggtccgcctgtaatttagccgggtttgtgacttgtgacaatgtgagtgagtagcggtttagcggagttcagaaccggtagaggagtacgagcgtagggataggtgaaggcagaatcagggcagggttttccttttgttttcatcctgtccccctattttccgttccgagtaaaacttatggatgttgttgtcatacatgcatcagcagctgagtttggattcccc

SEQ ID NO: 211296 - DNA, 4725 bp, Zea Mays
gcggagtgtttgacgtcttgcgagctcatcatgcttggagtgccaatgccaaacacgcagacgcagcagctccgaagcaaactccacgactcggtctcctcttcctagcaccatccggcccatccagccgccgccgccttgcatcctccacctctccggatcccgccgcgatggaggaagacgacgagttcggcgacctctacacggacatcctcatccccactcatacccccgcatccacctccgcgctatccaaccctgttctagtcgaaaccctacaccgcccgcctccacaccctaatcctacccccgtggcggcggcagcagaggaggtcgacgatgactggctcctaggagggagcgaacccatacccggggtcgacccgaccggcgattgggccgacgaggacgacgatggaggggagcccgcacctcccgcgaagcggtccacctctgcggatgatatcgatccgctcatggggggtggtgcgggggattccgggccggtcatccctgggctctcgtcatcatcggcagctggtgcggccgggagcgacgaatgggacagcgatagcgaggacgacatccagatcgtgctcaacgagaccgatggccgcccggggcttgtggaggatgaaggagacgacgaagacggtgaggacctcgtcatcgtcgccgacggaccagcgatggaggagcaggattggggagaggacccagcagcggcaggggcagaaggagagcgaaaggacggatgtgagcctggtaagacggtggcagcaccgaccggaaggatcgggtacagtggcggcggcccagggttccatcagcagcaccattccatgttcaagtatgtacgacctggcgctcctggtgcttcagtaggtggggtacctggtggtcctggtcaattccgccctcctgggcctttaggccctttctctggtcgtggcagaggtgaatggaggcctgctgctggtcgaggcatgaacaaaagttttcattcaggctatggaatcactccatggggtggttcagggcgcaattttggtggtggactagattttgcacttcctcctcacaaccatggaaattccctggtgctgatatttcagacttttttaactttggccttgatgaagagaagtggaaagatttttgcaagcagctggaccaacttcgactagaatccacaatgcaatctaggatacgggtgtacgaaagtggccgctctgaacaggattatgacccagatttgccacctgagcttgctgctgtgactggtcatccagacatctctgctgacagtcgcaataaaatggttaacgggcatacagattttagtgcccaaggaagaggtccggcaaacgtacggacaccattgatgacagggagacctattcaagttgaaactaattacacagaccggtttccatctgttgattcacgctcgcatcgaatgcgtgaatcagattcggttattgagattgtgtgccagggccgtgattcgatggatgatgagacagtggaccaaactgaaaaggattctcaaggaggtaacaaaggagcccattgtattgagggaaagccatattcatcagataagataaataattctgatcataactcaaattcagtgaaaaagacacagcataagggacagctaccagtttcatctgaaagtgatatgttatctatggatgccaatactcactcccctcccagctacaaaacaagaggttcacctcgtggagcatggccattgaaaggaagctcactgggtcagaactctattcgagaaattgaaagctccaatgaagtaattcctcgtcagtcatcttcaaagagatgccatgattcccagaaagagaaccttattgagggctcagaaaataaggctgattcagattcagaagggtcacttgctgctaatgatgacgtggcagataaactgagtacagaagatcattttgatgatgctggtggtggtggtggtggtgatgatgataagctcacattggttggtcgtgttgaaatggatgttgatgatgctacctcagaccccaacatgcctagtgatgcaaatcacgatgataacctggttcattctgatacaaagcagaaacacatatctgtggttgagcaacctactgaacacaatagcagtgaacctgatgaattgaggaatactgaaaatagtaaagggaggtctggtagcagcaaagatcagcagaaacaccttgaatctggtgaagaagttcttcaagataagcaattaaggagagtaaataatgtaagaatgcatcatgacgcggaagaacacaaacttcgccaaaaagatgagcattcacgagatgcaaaatcagatttggaaagatcacgtttaccctccagaggcagggaagatatccaccaatcttatgcaaacagagatagggttgacatacagggcaggagttataataaggtaagagagactgaaattttgccaaggagagatgatggtgttcacagccgacgtgctaaagaggaagatttgaggctagagtacaatgttgaaggtggtgcaaggcatagaaataaggtgaggcccattgataggaatgatagagatgaagatcattcacggaagcgtttggatgatggcgataggagaggctctcgacaaagagagcgtggtgatgtggttttgaatcgccgtgaaagtgatgattctcttataaagagaaagaaggacgatgagaacttgcgtaggttgaagcctgaaaatgaagacatggtcgcgacacatggttataaagcaagggatgacagtaacagaagaaaaaaagagagggatgatggaattgatcagaaaagacgagatgatagtggtagactgcgggaaaaggatgatgatcgttatcatgtcaaacagaaggatggcaactggagacaaagagaaagggaggatagacagaggcccaagcaagaaaatacattaaccgttcagagggaagaaggaagaggaactggtcggggtagtcggatgatggatgataagttagtcagtggtggtaggaagaaggatgaaccaagatcttcattattaagcaaagacactcaagagcgtacaaggcaaaatgaaccttcgaggagaggtcagggtgtggaagaaaacaacatgcagaataaagggcgttttgatgacaattcaaacagtgagaggaactccaggcaagaaaaacaaaacaataatcgtctatctggcagttctgacgctcgccatgcaggcagagataagcatagggagagcacaaggaagggcagaggttccgagcttgctgagcatgatctccacagatcgagcaaaaggaggtgtgaagaccatgaaagccatcgcagtgggaaggttgaaacaaaagaagtgaatgaacaagagagtagtagaggtcatgcagcattatccaagaagggccagaatcctcagccagataattcattgttgaatgaagtggaagaagatgccatatcagatgacgaaaaccacgaggattctagaaggggtcgctctaagttggagcgatggacaagccacaaagagatagaatatagtaatattgatgatgatagtacacaaacatttccgaccatcaaagctgatgttgaagccgatgagacatctgataagatgactgaagaatgtgagcgtgaccgacatctagacacagttgagaggctcaagagacgaagtgagcgtttcaaacttcccatgcccggcgagaaggatgcacctcaaagcaaaaaggtagataccgaagtgcagcctccccaaaatgaatcgtcagctgttgatatggaagtgaagccagagcggccagctcgcaagaggagatggactgggagttagttgaactggaacatttccacttcatcaagaaatttcagcagattccatggcagttgcttgcacttcggcatgtttcttccttacagttgaaagttgagttgatgtatggttttactgtttaacttgtaccagcaaagtgtaaacttagttgttttgtggctgggaactggatactgtactaaaatcacatccattttcccaccatgattcgggattccggtgaccattgtgtggcacaggtgccactgtactcaggatagttctgaggctgttacgagaagcagtggcctcggagcccagttgaatatctgggttcggaatgagctgcattttgaagctggagtgcccctgctgcaagttgattttgtttgaagtgcaggtggcctggaagcactgggtcttgtaacacgcttgtgctggtgggagatacttgcaagctgtggtggctgaatgcttgccatgtgatgctgttttatggagcaataggtgatagaaacaaaggactagagatttcagaactgatgatataatcactaatttgtatgcttaatactatattagccatgtacattctgataaacatataactgtcgtgcatgagttgttgatggagtaaaggtagactgtagtgtagagctgcagggtgcactggaccatttggatggatcaatacatatatatatatacctgtaggcagtgctaggtaagaagaatatgattgtttgcttgttgtagatttgcgatgtatataactggttcatgtggagttttgctaatcatacagagttctgaatggcactatgtaaatttattgaaatttagcatttcagattact

SEQ ID NO: 211297 - DNA, 4737 bp, Zea Mays
gcgagctcatcatgcttggagtgccaatgccaaacacgcagacgcagcagctccgaagcaaactccacgactcggtctcctcttcctagcaccatccggcccatccagccgccgccgccttgcatcctccacctctccggatcccgccgcgatggaggaagacgacgagttcggcgacctctacacggacatcctcatccccactcatacccccgcatccacctccgcgctatccaaccctgttctagtcgaaaccctacaccgcccgcctccacaccctaatcctacccccgtggcggcggcagcagaggaggtcgacgatgactggctcctaggagggagcgaacccatacccggggtcgacccgaccggcgattgggccgacgaggacgacgatggaggggagcccgcacctcccgcgaagcggtccacctctgcggatgatatcgatccgctcatggggggtggtgcgggggattccgggccggtcatccctgggctctcgtcatcatcggcagctggtgcggccgggagcgacgaatgggacagcgatagcgaggacgacatccagatcgtgctcaacgagaccgatggccgcccggggcttgtggaggatgaaggagacgacgaagacggtgaggacctcgtcatcgtcgccgacggaccagcgatggaggagcaggattggggagaggacccagcagcggcaggggcagaaggagagcgaaaggacggatgtgagcctggtaagacggtggcagcaccgaccggaaggatcgggtacagtggcggcggcccagggttccatcagcagcaccattccatgttcaagtatgtacgacctggcgctcctggtgcttcagtaggtggggtacctggtggtcctggtcaattccgccctcctgggcctttaggccctttctctggtcgtggcagaggtgaatggaggcctgctgctggtcgaggcatgaacaaaagttttcattcaggctatggaatcactccatggggtggttcagggcgcaattttggtggtggactagattttgcacttcctcctcacaagacaatatttgatattgatgtggaaactgcatttgaggagaagccatggaaattccctggtgctgatatttcagacttttttaactttggccttgatgaagagaagtggaaagatttttgcaagcagctggaccaacttcgactagaatccacaatgcaatctaggatacgggtgtacgaaagtggccgctctgaacaggattatgacccagatttgccacctgagcttgctgctgtgactggtcatccagacatctctgctgacagtcgcaataaaatggttaacgggcatacagattttagtgcccaaggaagaggtccggcaaacgtacggacaccattgatgacagggagacctattcaagttgaaactaattacacagaccggtttccatctgttgattcacgctcgcatcgaatgcgtgaatcagattcggttattgagattgtgtgccagggccgtgattcgatggatgatgagacagtggaccaaactgaaaaggattctcaaggagtgaaaaagacacagcataagggacagctaccagtttcatctgaaagtgatatgttatctatggatgccaatactcactcccctcccagctacaaaacaagaggttcacctcgtggagcatggccattgaaaggaagctcactgggtcagaactctattcgagaaattgaaagctccaatgaagtaattcctcgtcagtcatcttcaaagagatgccatgattcccagaaagagaaccttattgagggctcagaaaataaggctgattcagattcagaagggtcacttgctgctaatgatgacgtggcagataaactgagtacagaagatcattttgatgatgctggtggtggtggtggtggtgatgatgataagctcacattggttggtcgtgttgaaatggatgttgatgatgctacctcagaccccaacatgcctagtgatgcaaatcacgatgataacctggttcattctgatacaaagcagaaacacatatctgtggttgagcaacctactgaacacaatagcagtgaacctgatgaattgaggaatactgaaaatagtaaagggaggtctggtagcagcaaagatcagcagaaacaccttgaatctggtgaagaagttcttcaagataagcaattaaggagagtaaataatgtaagaatgcatcatgacgcggaagaacacaaacttcgccaaaaagatgagcattcacgagatgcaaaatcagatttggaaagatcacgtttaccctccagaggcagggaagatatccaccaatcttatgcaaacagagatagggttgacatacagggcaggagttataataaggtaagagagactgaaattttgccaaggagagatgatggtgttcacagccgacgtgctaaagaggaagatttgaggctagagtacaatgttgaaggtggtgcaaggcatagaaataaggtgaggcccattgataggaatgatagagatgaagatcattcacggaagcgtttggatgatggcgataggagaggctctcgacaaagagagcgtggtgatgtggttttgaatcgccgtgaaagtgatgattctcttataaagagaaagaaggacgatgagaacttgcgtaggttgaagcctgaaaatgaagacatggtcgcgacacatggttataaagcaagggatgacagtaacagaagaaaaaaagagagggatgatggaattgatcagaaaagacgagatgatagtggtagactgcgggaaaaggatgatgatcgttatcatgtcaaacagaaggatggcaactggagacaaagagaaagggaggatagacagaggcccaagcaagaaaatacattaaccgttcagagggaagaaggaagaggaactggtcggggtagtcggatgatggatgataagttagtcagtggtggtaggaagaaggatgaaccaagatcttcattattaagcaaagacactcaagagcgtacaaggcaaaatgaaccttcgaggagaggtcagggtgtggaagaaaacaacatgcagaataaagggcgttttgatgacaattcaaacagtgagaggaactccaggcaagaaaaacaaaacaataatcgtctatctggcagttctgacgctcgccatgcaggcagagataagcatagggagagcacaaggaagggcagaggttccgagcttgctgagcatgatctccacagatcgagcaaaaggaggtgtgaagaccatgaaagccatcgcagtgggaaggttgaaacaaaagaagtgaatgaacaagagagtagtagaggtcatgcagcattatccaagaagggccagaatcctcagccagataattcattgttgaatgaagtggaagaagatgccatatcagatgacgaaaaccacgaggattctagaaggggtcgctctaagttggagcgatggacaagccacaaagagatagaatatagtaatattgatgatgatagtacacaaacatttccgaccatcaaagctgatgttgaagccgatgaggtaggtaaatctcaagtttctgctgcagctggcaactcggacatcaatagcaatgttgatactgggcagacatctgataagatgactgaagaatgtgagcgtgaccgacatctagacacagttgagaggctcaagagacgaagtgagcgtttcaaacttcccatgcccggcgagaaggatgcacctcaaagcaaaaaggtagataccgaagtgcagcctccccaaaatgaatcgtcagctgttgatatggaagtgaagccagagcggccagctcgcaagaggagatggactgggagttagttgaactggaacatttccacttcatcaagaaatttcagcagattccatggcagttgcttgcacttcggcatgtttcttccttacagttgaaagttgagttgatgtatggttttactgtttaacttgtaccagcaaagtgtaaacttagttgttttgtggctgggaactggatactgtactaaaatcacatccattttcccaccatgattcgggattccggtgaccattgtgtggcacaggtgccactgtactcaggatagttctgaggctgttacgagaagcagtggcctcggagcccagttgaatatctgggttcggaatgagctgcattttgaagctggagtgcccctgctgcaagttgattttgtttgaagtgcaggtggcctggaagcactgggtcttgtaacacgcttgtgctggtgggagatacttgcaagctgtggtggctgaatgcttgccatgtgatgctgttttatggagcaataggtgatagaaacaaaggactagagatttcagaactgatgatataatcactaatttgtatgcttaatactatattagccatgtacattctgataaacatataactgtcgtgcatgagttgttgatggagtaaaggtagactgtagtgtagagctgcagggtgcactggaccatttggatggatcaatacatatatatatatacctgtaggcagtgctaggtaagaagaatatgattgtttgcttgttgtagatttgcgatgtatataactggttcatgtggagttttgctaatcatacagagttctgaatggcactatgtaaatttattgaaatttagcatttcagattact

SEQ ID NO: 211298 - DNA, 4762 bp, Zea Mays
gcagcagctccgaagcaaactccacgactcggtctcctcttcctagcaccatccggcccatccagccgccgccgccttgcatcctccacctctccggatcccgccgcgatggaggaagacgacgagttcggcgacctctacacggacatcctcatccccactcatacccccgcatccacctccgcgctatccaaccctgttctagtcgaaaccctacaccgcccgcctccacaccctaatcctacccccgtggcggcggcagcagaggaggtcgacgatgactggctcctaggagggagcgaacccatacccggggtcgacccgaccggcgattgggccgacgaggacgacgatggaggggagcccgcacctcccgcgaagcggtccacctctgcggatgatatcgatccgctcatggggggtggtgcgggggattccgggccggtcatccctgggctctcgtcatcatcggcagctggtgcggccgggagcgacgaatgggacagcgatagcgaggacgacatccagatcgtgctcaacgagaccgatggccgcccggggcttgtggaggatgaaggagacgacgaagacggtgaggacctcgtcatcgtcgccgacggaccagcgatggaggagcaggattggggagaggacccagcagcggcaggggcagaaggagagcgaaaggacggatgtgagcctggtaagacggtggcagcaccgaccggaaggatcgggtacagtggcggcggcccagggttccatcagcagcaccattccatgttcaagtatgtacgacctggcgctcctggtgcttcagtaggtggggtacctggtggtcctggtcaattccgccctcctgggcctttaggccctttctctggtcgtggcagaggtgaatggaggcctgctgctggtcgaggcatgaacaaaagttttcattcaggctatggaatcactccatggggtggttcagggcgcaattttggtggtggactagattttgcacttcctcctcacaagacaatatttgatattgatgtggaaactgcatttgaggagaagccatggaaattccctggtgctgatatttcagacttttttaactttggccttgatgaagagaagtggaaagatttttgcaagcagctggaccaacttcgactagaatccacaatgcaatctaggatacgggtgtacgaaagtggccgctctgaacagatttgccacctgagcttgctgctgtgactggtcatccagacatctctgctgacagtcgcaataaaatggttaacgggcatacagattttagtgcccaaggaagaggtccggcaaacgtacggacaccattgatgacagggagacctattcaagttgaaactaattacacagaccggtttccatctgttgattcacgctcgcatcgaatgcgtgaatcagattcggttattgagattgtgtgccagggccgtgattcgatggatgatgagacagtggaccaaactgaaaaggattctcaaggaggtaacaaaggagcccattgtattgagggaaagccatattcatcagataagataaataattctgatcataactcaaattcagtgaaaaagacacagcataagggacagctaccagtttcatctgaaagtgatatgttatctatggatgccaatactcactcccctcccagctacaaaacaagaggttcacctcgtggagcatggccattgaaaggaagctcactgggtcagaactctattcgagaaattgaaagctccaatgaagtaattcctcgtcagtcatcttcaaagagatgccatgattcccagaaagagaaccttattgagggctcagaaaataaggctgattcagattcagaagggtcacttgctgctaatgatgacgtggcagataaactgagtacagaagatcattttgatgatgctggtggtggtggtggtggtgatgatgataagctcacattggttggtcgtgttgaaatggatgttgatgatgctacctcagaccccaacatgcctagtgatgcaaatcacgatgataacctggttcattctgatacaaagcagaaacacatatctgtggttgagcaacctactgaacacaatagcagtgaacctgatgaattgaggaatactgaaaatagtaaagggaggtctggtagcagcaaagatcagcagaaacaccttgaatctggtgaagaagttcttcaagataagcaattaaggagagtaaataatgtaagaatgcatcatgacgcggaagaacacaaacttcgccaaaaagatgagcattcacgagatgcaaaatcagatttggaaagatcacgtttaccctccagaggcagggaagatatccaccaatcttatgcaaacagagatagggttgacatacagggcaggagttataataaggtaagagagactgaaattttgccaaggagagatgatggtgttcacagccgacgtgctaaagaggaagatttgaggctagagtacaatgttgaaggtggtgcaaggcatagaaataaggtgaggcccattgataggaatgatagagatgaagatcattcacggaagcgtttggatgatggcgataggagaggctctcgacaaagagagcgtggtgatgtggttttgaatcgccgtgaaagtgatgattctcttataaagagaaagaaggacgatgagaacttgcgtaggttgaagcctgaaaatgaagacatggtcgcgacacatggttataaagcaagggatgacagtaacagaagaaaaaaagagagggatgatggaattgatcagaaaagacgagatgatagtggtagactgcgggaaaaggatgatgatcgttatcatgtcaaacagaaggatggcaactggagacaaagagaaagggaggatagacagaggcccaagcaagaaaatacattaaccgttcagagggaagaaggaagaggaactggtcggggtagtcggatgatggatgataagttagtcagtggtggtaggaagaaggatgaaccaagatcttcattattaagcaaagacactcaagagcgtacaaggcaaaatgaaccttcgaggagaggtcagggtgtggaagaaaacaacatgcagaataaagggcgttttgatgacaattcaaacagtgagaggaactccaggcaagaaaaacaaaacaataatcgtctatctggcagttctgacgctcgccatgcaggcagagataagcatagggagagcacaaggaagggcagaggttccgagcttgctgagcatgatctccacagatcgagcaaaaggaggtgtgaagaccatgaaagccatcgcagtgggaaggttgaaacaaaagaagtgaatgaacaagagagtagtagaggtcatgcagcattatccaagaagggccagaatcctcagccagataattcattgttgaatgaagtggaagaagatgccatatcagatgacgaaaaccacgaggattctagaaggggtcgctctaagttggagcgatggacaagccacaaagagatagaatatagtaatattgatgatgatagtacacaaacatttccgaccatcaaagctgatgttgaagccgatgaggtaggtaaatctcaagtttctgctgcagctggcaactcggacatcaatagcaatgttgatactgggcagacatctgataagatgactgaagaatgtgagcgtgaccgacatctagacacagttgagaggctcaagagacgaagtgagcgtttcaaacttcccatgcccggcgagaaggatgcacctcaaagcaaaaaggtagataccgaagtgcagcctccccaaaatgaatcgtcagctgttgatatggaagtgaagccagagcggccagctcgcaagaggagatggactgggagttagttgaactggaacatttccacttcatcaagaaatttcagcagattccatggcagttgcttgcacttcggcatgtttcttccttacagttgaaagttgagttgatgtatggttttactgtttaacttgtaccagcaaagtgtaaacttagttgttttgtggctgggaactggatactgtactaaaatcacatccattttcccaccatgattcgggattccggtgaccattgtgtggcacaggtgccactgtactcaggatagttctgaggctgttacgagaagcagtggcctcggagcccagttgaatatctgggttcggaatgagctgcattttgaagctggagtgcccctgctgcaagttgattttgtttgaagtgcaggtggcctggaagcactgggtcttgtaacacgcttgtgctggtgggagatacttgcaagctgtggtggctgaatgcttgccatgtgatgctgttttatggagcaataggtgatagaaacaaaggactagagatttcagaactgatgatataatcactaatttgtatgcttaatactatattagccatgtacattctgataaacatataactgtcgtgcatgagttgttgatggagtaaaggtagactgtagtgtagagctgcagggtgcactggaccatttggatggatcaatacatatatatatatacctgtaggcagtgctaggtaagaagaatatgattgtttgcttgttgtagatttgcgatgtatataactggttcatgtggagttttgctaatcatacagagttctgaatggcactatgtaaatttattgaaatttagcatttcagattact

SEQ ID NO: 211299 - DNA, 4222 bp, Zea Mays
tggaattctagcacaaattgtccaacaatcataaggatctttttggcctttgctcgcataatcagacgacctccacttaagtttaagagatgctagacatgttaatttgttctctttgcttcttatgcacacggaatcagattcttgctacagctggttggtgatgcaatcatacaatagatggatcttgtgaaaacttgatttcataggagtgattctagggtgagtctattgaatgggagtagggagttattagacagacatatgtaattatgaatttgagaggttaacagaaaccaaatacaagtggaggagggagcaccaatacaatctgctgaaatttgtggatcgtcttttttctactttgaaccaatgcacacgtccccaaccatttcataggaattaggatcttatgttatttagagaatccaaaaactcctgggacttgtcaaaaacaaattaccgaaactgaataccactgcataaccaagggattcaggctttcaggtccatgtggtaaacattgcaaaatatgtgctatcttcacttttctgatgtttattatgaatgcatcttttttttgaaagtcattatgaatgcatcttctgaaaattgagttcactctgcaggtttcttttgtatttggataacctataaaggtctcagcacccagtatgatttggttggcaaaggatgttttctccagaataatgaaagtttagcttctggttcattttattgtctggtcgatcttttttatactgtgataaaatggggaagcactcagctgaatctggggttagtatgttgttgcatggagacttggacatacaaataattgaagcaaaatgtctccccaatatggatctcatgacagaaaggatgcgaaaatgctttactgggtatggagcttgcagcaatgattgtgggaagtcggaaccaccacacccggacatgagaaagatcatcactagtgatccatacgtttcagtttgtctgtcaggagcaacggtggcacaaactcgagtcattgccaactcggagaaccctaaatgggatgaacacttctatgttcaagttgctcattcagttagcagagtcgagtttcatgtaaaggacaacgatgtttttggggcagagcttatcggcgtggcttcaataccagttgagcacatcatgccaggtgatttggtcggtggctggtttcccatttctggtcagtacagtaatcctatgaagccatctcctgagctgcatttgtctatccagtataagccaatcgacacaaacccactatacaaggatggagttggtgctgatggccatcagagtgttggtgtcccaaatgcatatttccctcttaggaagggtggtaaggtcacactatatcaagatgctcatgttcctgacaattttcaacctcatattgagatggatgatgggaggacatatgaacaaaacaaatgctgggaagatatttgtcatgcaatcattgaggctcatcaccttatctacatagtcggctggtccttgtatcaccctgtgaagcttgtaagggaatcaacaaaacctgttcccaatggaaacccagtcactattggggaaattttgaaacgcaaagttcaagaaggagtccgtgttatagtgttgctttgggatgataaaacatcacatgacaaatttctcttaaaaacagtaggattctttcctcccgtagaacctcttcatttcctactttgctgaaattgatatatatcgaaactattttactattttgcttaaatggtcgtcaaggggtagacagatagcaaacatgcactagatagtactcttgtctatttaccagatgataatgatgaaaggaagaatcaagaatgtaataactgaaaaggtagatgtattttgatgatgtgtaattccttactttcaatgtccctagtgtctcttctaagattgttgtcaagatgaatacacaaagaactaagctaataagttgaataaactatttgaacctgcatatgttgtgtgtctgttttttcttctttgtcattcttgttgtattttggatttattctgtaattattattatttatataaaatataatgataatcagtcttcgtgtgtttttctagaaaaaaatatgaacaagataagcctaacgaagtatagaatgcagactgcaagtttcagctcctcctcctattgttttgactattactccatgtttgctgcttctttttaagaagaatagtctgatagaaatggtgtaggtggaatgcaggatggtctcatgcatacacatgatgaggaagctcgaaaatatttcagacattcaggtgtccattgtgtgttgtctcctcgctatgccagcaacaaacttagcattttcaagcagcaggttgtaggaactttgtttacacaccatcagaaatgtgtcattgtagacacccaagccacaggaaacaatcgaaaaataactgcttttattggtggtctagacttgtgtgatggcagatatgatacacctgaacacaggcttttcaaggatttagatactattttcaaggacgatttccacaacccgacattccctgttaataagaatggacccagacagccatggcatgatttacattgtaaaattgagggtcctgctgcatatgatatacttacaaactttgaacagagatggagaaaatctgcaaagtggaaagttagcgtcagaagagctgtgagttggcatcatgatacattggtaaaaattgatcggatgtcatggattgtttccccctcttcagatgaattaaatgcacatgtttgtgaagaaaaggaccctgaaaactggcatgtacaggttttccgatcgattgattcaggatctgtaaaaggattcccaaaacttgttcaagaggctgaatcccagaatcttgtctgtgcaaagaatctgcagatagacaaaagcatacacaatgcatatgttaaagcgatcagatctgcacagcacttcgtctatattgaaaatcagtactttattgggtcttcatactactggtctgcacaccgaagtgcaggtgctgagaacttaataccaattgaattggccataaagattgcaagaaagattaaggcaaaggaaaggtttgcagcatacattgttataccgatgtggcctgaagggaatccgacaactgccgctatgcaggaaatcctctattggcaggggcataccatgtccatgatgtacaagattgtcgcagatgctctacgaaaggagggtttacatgaaaggcatccacaggagtacctgaacttctattgccttggcaaacgtgaagtctcgaatgaagttccgacgacaggcaattctaatgagaactctgcagtgcgtttgtcccagaaattcaagaggttcatgatctatgtgcactcaaaagggatgattgtggacgacgagtatgttctcatcggatcggccaacataaaccagagatccatggacggctcacgggacacggagatcgccatgggtgcataccagcctcactacagctgggctggaagcggcaggcctcccagaggacaggtgtatgggtacaggatgtctctttgggcggagcacctgggcacagtgcaggagtgtttccgccggccagagtccgaggagtgcgtgcagcaggtgaaccagatggcagatgacaactgggcgagctatgtctcgccgcagatggcggatatgaagggccacctcatgaagtaccccgtgagggtcgagcaggatgggagggtggggccgctgcatgggcaggagagcttcccagacgtcggtggcaaggtgctggggacgcactcgtcgctccccaatgcgttgacgacgtgagtactgagttggatgtagctcgaagaagctcgaaggtggcaggctggtaaatggtgagctgaagctctgctcgtcagaatcactggacgtggtgcaacaaggggttgatacattggaaagttgctgatccgatttctagctttaaggctgtttgtatgtatatttatattgaaaaagcgaaagatgtgatatccaagatgaatggagactaatgagaaaatgtttgcttcaattagcttgtggttacaactgattatatattgaggacaaaaaccttcaaaaaacgatcctcttcacggttaataagtgcttgttcggttacaagggataaaatctcaccatgg

SEQ ID NO: 211300 - DNA, 3080 bp, Zea Mays
atgagcgcccagtatatgctacagcaccggcgcccctggccctgccgcctgcgccgctcgttgccctgtgcactccgcgggcctcgggaatggccaaccaggacatttatcggtttcttttgtatttggataacctataaaggtctcagcacccagtatgatttggttggcaaaggatgttttctccagaataatgaaagtttagcttctggttcattttattgtctggtcgatcttttttatactgtgataaaatggggaagcactcagctgaatctggggttagtatgttgttgcatggagacttggacatacaaataattgaagcaaaatgtctccccaatatggatctcatgacagaaaggatgcgaaaatgctttactgggtatggagcttgcagcaatgattgtgggaagtcggaaccaccacacccggacatgagaaagatcatcactagtgatccatacgtttcagtttgtctgtcaggagcaacggtggcacaaactcgagtcattgccaactcggagaaccctaaatgggatgaacacttctatgttcaagttgctcattcagttagcagagtcgagtttcatgtaaaggacaacgatgtttttggggcagagcttatcggcgtggcttcaataccagttgagcacatcatgccaggtgatttggtcggtggctggtttcccatttctggtcagtacagtaatcctatgaagccatctcctgagctgcatttgtctatccagtataagccaatcgacacaaacccactatacaaggatggagttggtgctgatggccatcagagtgttggtgtcccaaatgcatatttccctcttaggaagggtggtaaggtcacactatatcaagatgctcatgttcctgacaattttcaacctcatattgagatggatgatgggaggacatatgaacaaaacaaatgctgggaagatatttgtcatgcaatcattgaggctcatcaccttatctacatagtcggctggtccttgtatcaccctgtgaagcttgtaagggaatcaacaaaacctgttcccaatggaaacccagtcactattggggaaattttgaaacgcaaagttcaagaaggagtccgtgttatagtgttgctttgggatgataaaacatcacatgacaaatttctcttaaaaacagtggaatgcaggatggtctcatgcatacacatgatgaggaagctcgaaaatatttcagacattcaggtgtccattgtgtgttgtctcctcgctatgccagcaacaaacttagcattttcaagcagcaggttgtaggaactttgtttacacaccatcagaaatgtgtcattgtagacacccaagccacaggaaacaatcgaaaaataactgcttttattggtggtctagacttgtgtgatggcagatatgatacacctgaacacaggcttttcaaggatttagatactattttcaaggacgatttccacaacccgacattccctgttaataagaatggacccagacagccatggcatgatttacattgtaaaattgagggtcctgctgcatatgatatacttacaaactttgaacagagatggagaaaatctgcaaagtggaaagttagcgtcagaagagctgtgagttggcatcatgatacattggtaaaaattgatcggatgtcatggattgtttccccctcttcagatgaattaaatgcacatgtttgtgaagaaaaggaccctgaaaactggcatgtacaggttttccgatcgattgattcaggatctgtaaaaggattcccaaaacttgttcaagaggctgaatcccagaatcttgtctgtgcaaagaatctgcagatagacaaaagcatacacaatgcatatgttaaagcgatcagatctgcacagcacttcgtctatattgaaaatcagtactttattgggtcttcatactactggtctgcacaccgaagtgcaggtgctgagaacttaataccaattgaattggccataaagattgcaagaaagattaaggcaaaggaaaggtttgcagcatacattgttataccgatgtggcctgaagggaatccgacaactgccgctatgcaggaaatcctctattggcaggggcataccatgtccatgatgtacaagattgtcgcagatgctctacgaaaggagggtttacatgaaaggcatccacaggagtacctgaacttctattgccttggcaaacgtgaagtctcgaatgaagttccgacgacaggcaattctaatgagaactctgcagtgggatgattgtggacgacgagtatgttctcatcggatcggccaacataaaccagagatccatggacggctcacgggacacggagatcgccatgggtgcataccagcctcactacagctgggctggaagcggcaggcctcccagaggacaggtgtatgggtacaggatgtctctttgggcggagcacctgggcacagtgcaggagtgtttccgccggccagagtccgaggagtgcgtgcagcaggtgaaccagatggcagatgacaactgggcgagctatgtctcgccgcagatggcggatatgaagggccacctcatgaagtaccccgtgagggtcgagcaggatgggagggtggggccgctgcatgggcaggagagcttcccagacgtcggtggcaaggtgctggggacgcactcgtcgctccccaatgcgttgacgacgtgagtactgagttggatgtagctcgaagaagctcgaaggtggcaggctggtaaatggtgagctgaagctctgctcgtcagaatcactggacgtggtgcaacaaggggttgatacattggaaagttgctgatccgatttctagctttaaggctgtttgtatgtatatttatattgaaaaagcgaaagatgtgatatccaagatgaatggagactaatgagaaaatgtttgcttcaattagcttgtggttacaactgattatatattgaggacaaaaaccttcaaaaaacgatcctcttcacggttaataagtgcttgttcggttacaagggataaaatctcaccatgg

SEQ ID NO: 211301 - DNA, 3750 bp, Zea Mays
ctcgtatgtccaccgctgaccgctcgtttgtcagcctagcaccggggtgcatgagcgcccagtatatgctacagcaccggcgcccctggccctgccgcctgcgccgctcgttgccctgtgcactccgcgggcctcgggaatggccaaccaggacatttatcggtttcttttgtatttggataacctataaaggtctcagcacccagtatgatttggttggcaaaggatgttttctccagaataatgaaagtttagcttctggttcattttattgtctggtcgatcttttttatactgtgataaaatggggaagcactcagctgaatctggggttagtatgttgttgcatggagacttggacatacaaataattgaagcaaaatgtctccccaatatggatctcatgacagaaaggatgcgaaaatgctttactgggtatggagcttgcagcaatgattgtgggaagtcggaaccaccacacccggacatgagaaagatcatcactagtgatccatacgtttcagtttgtctgtcaggagcaacggtggcacaaactcgagtcattgccaactcggagaaccctaaatgggatgaacacttctatgttcaagttgctcattcagttagcagagtcgagtttcatgtaaaggacaacgatgtttttggggcagagcttatcggcgtggcttcaataccagttgagcacatcatgccaggtgatttggtcggtggctggtttcccatttctggtcagtacagtaatcctatgaagccatctcctgagctgcatttgtctatccagtataagccaatcgacacaaacccactatacaaggatggagttggtgctgatggccatcagagtgttggtgtcccaaatgcatatttccctcttaggaagggtggtaaggtcacactatatcaagatgctcatgttcctgacaattttcaacctcatattgagatggatgatgggaggacatatgaacaaaacaaatgctgggaagatatttgtcatgcaatcattgaggctcatcaccttatctacatagtcggctggtccttgtatcaccctgtgaagcttgtaagggaatcaacaaaacctgttcccaatggaaacccagtcactattggggaaattttgaaacgcaaagttcaagaaggagtccgtgttatagtgttgctttgggatgataaaacatcacatgacaaatttctcttaaaaacagatggtctcatgcatacacatgatgaggaagctcgaaaatatttcagacattcaggtgtccattgtgtgttgtctcctcgctatgccagcaacaaacttagcattttcaagcagcaggtttggatattgtttctcccttgttacatacatgtacgctgaattgctagtttcctcatatcatgtactctttcttattttctctgttggttctttgtcctttcatatacattgtgactcactcaacatcctgtgcattgtcttccaaaacgtgaacctacattttgagctaatggaattttgaacttgtacagaaacagaagatgtccgcttgcattttattcaggccgaggctgtatatatctttttgttcggataaaaagttgcgagttagagataaagttggtagtttgatatatatgctgctgaaaaatgaagattcaaatttgcattgtgtatgtataacattcttgtgaaccttgggtagaaaaaagtgatgaactgttggctaggtatatgagcattctgcttgctgttggtgagtcttcttaattgaatttgatgacagaagtatttgtaatgaagttgtgggcttggagttagaatccgcagttcataggtcctattattttatagcacttactcttacctctgagttctgtaacacttctagtatatcttgaaaaaagttatcttctccaggttgtaggaactttgtttacacaccatcagaaatgtgtcattgtagacacccaagccacaggaaacaatcgaaaaataactgcttttattggtggtctagacttgtgtgatggcagatatgatacacctgaacacaggcttttcaaggatttagatactattttcaaggacgatttccacaacccgacattccctgttaataagaatggacccagacagccatggcatgatttacattgtaaaattgagggtcctgctgcatatgatatacttacaaactttgaacagagatggagaaaatctgcaaagtggaaagttagcgtcagaagagctgtgagttggcatcatgatacattggtaaaaattgatcggatgtcatggattgtttccccctcttcagatgaattaaatgcacatgtttgtgaagaaaaggaccctgaaaactggcatgtacaggttttccgatcgattgattcaggatctgtaaaaggattcccaaaacttgttcaagaggctgaatcccagaatcttgtctgtgcaaagaatctgcagatagacaaaagcatacacaatgcatatgttaaagcgatcagatctgcacagcacttcgtctatattgaaaatcagtactttattgggtcttcatactactggtctgcacaccgaagtgcaggtgctgagaacttaataccaattgaattggccataaagattgcaagaaagattaaggcaaaggaaaggtttgcagcatacattgttataccgatgtggcctgaagggaatccgacaactgccgctatgcaggaaatcctctattggcaggggcataccatgtccatgatgtacaagattgtcgcagatgctctacgaaaggagggtttacatgaaaggcatccacaggagtacctgaacttctattgccttggcaaacgtgaagtctcgaatgaagttccgacgacaggcaattctaatgagaactctgcagtgcgtttgtcccagaaattcaagaggttcatgatctatgtgcactcaaaagggatgattgtggacgacgagtatgttctcatcggatcggccaacataaaccagagatccatggacggctcacgggacacggagatcgccatgggtgcataccagcctcactacagctgggctggaagcggcaggcctcccagaggacaggtgtatgggtacaggatgtctctttgggcggagcacctgggcacagtgcaggagtgtttccgccggccagagtccgaggagtgcgtgcagcaggtgaaccagatggcagatgacaactgggcgagctatgtctcgccgcagatggcggatatgaagggccacctcatgaagtaccccgtgagggtcgagcaggatgggagggtggggccgctgcatgggcaggagagcttcccagacgtcggtggcaaggtgctggggacgcactcgtcgctccccaatgcgttgacgacgtgagtactgagttggatgtagctcgaagaagctcgaaggtggcaggctggtaaatggtgagctgaagctctgctcgtcagaatcactggacgtggtgcaacaaggggttgatacattggaaagttgctgatccgatttctagctttaaggctgtttgtatgtatatttatattgaaaaagcgaaagatgtgatatccaagatgaatggagactaatgagaaaatgtttgcttcaattagcttgtggttacaactgattatatattgaggacaaaaaccttcaaaaaacgatcctcttcacggttaataagtgcttgttcggttacaagggataaaatctcaccatgg

SEQ ID NO: 211302 - DNA, 3762 bp, Zea Mays
agcacctctcgtatgtccaccgctgaccgctcgtttgtcagcctagcaccggggtgcatgagcgcccagtatatgctacagcaccggcgcccctggccctgccgcctgcgccgctcgttgccctgtgcactccgcgggcctcgggaatggccaaccaggacatttatcggtttcttttgtatttggataacctataaaggtctcagcacccagtatgatttggttggcaaaggatgttttctccagaataatgaaagtttagcttctggttcattttattgtctggtcgatcttttttatactgtgataaaatggggaagcactcagctgaatctggggttagtatgttgttgcatggagacttggacatacaaataattgaagcaaaatgtctccccaatatggatctcatgacagaaaggatgcgaaaatgctttactgggtatggagcttgcagcaatgattgtgggaagtcggaaccaccacacccggacatgagaaagatcatcactagtgatccatacgtttcagtttgtctgtcaggagcaacggtggcacaaactcgagtcattgccaactcggagaaccctaaatgggatgaacacttctatgttcaagttgctcattcagttagcagagtcgagtttcatgtaaaggacaacgatgtttttggggcagagcttatcggcgtggcttcaataccagttgagcacatcatgccaggtgatttggtcggtggctggtttcccatttctggtcagtacagtaatcctatgaagccatctcctgagctgcatttgtctatccagtataagccaatcgacacaaacccactatacaaggatggagttggtgctgatggccatcagagtgttggtgtcccaaatgcatatttccctcttaggaagggtggtaaggtcacactatatcaagatgctcatgttcctgacaattttcaacctcatattgagatggatgatgggaggacatatgaacaaaacaaatgctgggaagatatttgtcatgcaatcattgaggctcatcaccttatctacatagtcggctggtccttgtatcaccctgtgaagcttgtaagggaatcaacaaaacctgttcccaatggaaacccagtcactattggggaaattttgaaacgcaaagttcaagaaggagtccgtgttatagtgttgctttgggatgataaaacatcacatgacaaatttctcttaaaaacagtaggattctttcctcccgtagaacctcttcatttcctactttgctgaaattgatatatatcgaaactattttactattttgcttaaatggtcgtcaaggggtagacagatagcaaacatgcactagatagtactcttgtctatttaccagatgataatgatgaaaggaagaatcaagaatgtaataactgaaaaggtagatgtattttgatgatgtgtaattccttactttcaatgtccctagtgtctcttctaagattgttgtcaagatgaatacacaaagaactaagctaataagttgaataaactatttgaacctgcatatgttgtgtgtctgttttttcttctttgtcattcttgttgtattttggatttattctgtaattattattatttatataaaatataatgataatcagtcttcgtgtgtttttctagaaaaaaatatgaacaagataagcctaacgaagtatagaatgcagactgcaagtttcagctcctcctcctattgttttgactattactccatgtttgctgcttctttttaagaagaatagtctgatagaaatggtgtaggtggaatgcaggatggtctcatgcatacacatgatgaggaagctcgaaaatatttcagacattcaggtgtccattgtgtgttgtctcctcgctatgccagcaacaaacttagcattttcaagcagcaggttgtaggaactttgtttacacaccatcagaaatgtgtcattgtagacacccaagccacaggaaacaatcgaaaaataactgcttttattggtggtctagacttgtgtgatggcagatatgatacacctgaacacaggcttttcaaggatttagatactattttcaaggacgatttccacaacccgacattccctgttaataagaatggacccagacagccatggcatgatttacattgtaaaattgagggtcctgctgcatatgatatacttacaaactttgaacagagatggagaaaatctgcaaagtggaaagttagcgtcagaagagctgtgagttggcatcatgatacattggtaaaaattgatcggatgtcatggattgtttccccctcttcagatgaattaaatgcacatgtttgtgaagaaaaggaccctgaaaactggcatgtacaggttttccgatcgattgattcaggatctgtaaaaggattcccaaaacttgttcaagaggctgaatcccagaatcttgtctgtgcaaagaatctgcagatagacaaaagcatacacaatgcatatgttaaagcgatcagatctgcacagcacttcgtctatattgaaaatcagtactttattgggtcttcatactactggtctgcacaccgaagtgcaggtgctgagaacttaataccaattgaattggccataaagattgcaagaaagattaaggcaaaggaaaggtttgcagcatacattgttataccgatgtggcctgaagggaatccgacaactgccgctatgcaggaaatcctctattggcaggggcataccatgtccatgatgtacaagattgtcgcagatgctctacgaaaggagggtttacatgaaaggcatccacaggagtacctgaacttctattgccttggcaaacgtgaagtctcgaatgaagttccgacgacaggcaattctaatgagaactctgcagtgcgtttgtcccagaaattcaagaggttcatgatctatgtgcactcaaaagggatgattgtggacgacgagtatgttctcatcggatcggccaacataaaccagagatccatggacggctcacgggacacggagatcgccatgggtgcataccagcctcactacagctgggctggaagcggcaggcctcccagaggacaggtgtatgggtacaggatgtctctttgggcggagcacctgggcacagtgcaggagtgtttccgccggccagagtccgaggagtgcgtgcagcaggtgaaccagatggcagatgacaactgggcgagctatgtctcgccgcagatggcggatatgaagggccacctcatgaagtaccccgtgagggtcgagcaggatgggagggtggggccgctgcatgggcaggagagcttcccagacgtcggtggcaaggtgctggggacgcactcgtcgctccccaatgcgttgacgacgtgagtactgagttggatgtagctcgaagaagctcgaaggtggcaggctggtaaatggtgagctgaagctctgctcgtcagaatcactggacgtggtgcaacaaggggttgatacattggaaagttgctgatccgatttctagctttaaggctgtttgtatgtatatttatattgaaaaagcgaaagatgtgatatccaagatgaatggagactaatgagaaaatgtttgcttcaattagcttgtggttacaactgattatatattgaggacaaaaaccttcaaaaaacgatcctcttcacggttaataagtgcttgttcggttacaagggataaaatctcaccatgg

SEQ ID NO: 211303 - DNA, 3195 bp, Zea Mays
cggaggagcagcacctctcgtatgtccaccgctgaccgctcgtttgtcagcctagcaccggggtgcatgagcgcccagtatatgctacagcaccggcgcccctggccctgccgcctgcgccgctcgttgccctgtgcactccgcgggcctcgggaatggccaaccaggacatttatcggtttcttttgtatttggataacctataaaggtctcagcacccagtatgatttggttggcaaaggatgttttctccagaataatgaaagtttagcttctggttcattttattgtctggtcgatcttttttatactgtgataaaatggggaagcactcagctgaatctggggttagtatgttgttgcatggagacttggacatacaaataattgaagcaaaatgtctccccaatatggatctcatgacagaaaggatgcgaaaatgctttactgggtatggagcttgcagcaatgattgtgggaagtcggaaccaccacacccggacatgagaaagatcatcactagtgatccatacgtttcagtttgtctgtcaggagcaacggtggcacaaactcgagtcattgccaactcggagaaccctaaatgggatgaacacttctatgttcaagttgctcattcagttagcagagtcgagtttcatgtaaaggacaacgatgtttttggggcagagcttatcggcgtggcttcaataccagttgagcacatcatgccaggtgatttggtcggtggctggtttcccatttctggtcagtacagtaatcctatgaagccatctcctgagctgcatttgtctatccagtataagccaatcgacacaaacccactatacaaggatggagttggtgctgatggccatcagagtgttggtgtcccaaatgcatatttccctcttaggaagggtggtaaggtcacactatatcaagatgctcatgttcctgacaattttcaacctcatattgagatggatgatgggaggacatatgaacaaaacaaatgctgggaagatatttgtcatgcaatcattgaggctcatcaccttatctacatagtcggctggtccttgtatcaccctgtgaagcttgtaagggaatcaacaaaacctgttcccaatggaaacccagtcactattggggaaattttgaaacgcaaagttcaagaaggagtccgtgttatagtgttgctttgggatgataaaacatcacatgacaaatttctcttaaaaacagtggaatgcaggatggtctcatgcatacacatgatgaggaagctcgaaaatatttcagacattcaggtgtccattgtgtgttgtctcctcgctatgccagcaacaaacttagcattttcaagcagcaggttgtaggaactttgtttacacaccatcagaaatgtgtcattgtagacacccaagccacaggaaacaatcgaaaaataactgcttttattggtggtctagacttgtgtgatggcagatatgatacacctgaacacaggcttttcaaggatttagatactattttcaaggacgatttccacaacccgacattccctgttaataagaatggacccagacagccatggcatgatttacattgtaaaattgagggtcctgctgcatatgatatacttacaaactttgaacagagatggagaaaatctgcaaagtggaaagttagcgtcagaagagctgtgagttggcatcatgatacattggtaaaaattgatcggatgtcatggattgtttccccctcttcagatgaattaaatgcacatgtttgtgaagaaaaggaccctgaaaactggcatgtacaggttttccgatcgattgattcaggatctgtaaaaggattcccaaaacttgttcaagaggctgaatcccagaatcttgtctgtgcaaagaatctgcagatagacaaaagcatacacaatgcatatgttaaagcgatcagatctgcacagcacttcgtctatattgaaaatcagtactttattgggtcttcatactactggtctgcacaccgaagtgcaggtgctgagaacttaataccaattgaattggccataaagattgcaagaaagattaaggcaaaggaaaggtttgcagcatacattgttataccgatgtggcctgaagggaatccgacaactgccgctatgcaggaaatcctctattggcaggggcataccatgtccatgatgtacaagattgtcgcagatgctctacgaaaggagggtttacatgaaaggcatccacaggagtacctgaacttctattgccttggcaaacgtgaagtctcgaatgaagttccgacgacaggcaattctaatgagaactctgcagtgcgtttgtcccagaaattcaagaggttcatgatctatgtgcactcaaaagggatgattgtggacgacgagtatgttctcatcggatcggccaacataaaccagagatccatggacggctcacgggacacggagatcgccatgggtgcataccagcctcactacagctgggctggaagcggcaggcctcccagaggacaggtgtatgggtacaggatgtctctttgggcggagcacctgggcacagtgcaggagtgtttccgccggccagagtccgaggagtgcgtgcagcaggtgaaccagatggcagatgacaactgggcgagctatgtctcgccgcagatggcggatatgaagggccacctcatgaagtaccccgtgagggtcgagcaggatgggagggtggggccgctgcatgggcaggagagcttcccagacgtcggtggcaaggtgctggggacgcactcgtcgctccccaatgcgttgacgacgtgagtactgagttggatgtagctcgaagaagctcgaaggtggcaggctggtaaatggtgagctgaagctctgctcgtcagaatcactggacgtggtgcaacaaggggttgatacattggaaagttgctgatccgatttctagctttaaggctgtttgtatgtatatttatattgaaaaagcgaaagatgtgatatccaagatgaatggagactaatgagaaaatgtttgcttcaattagcttgtggttacaactgattatatattgaggacaaaaaccttcaaaaaacgatcctcttcacggttaataagtgcttgttcggttacaagggataaaatctcaccatgg

SEQ ID NO: 211304 - DNA, 1249 bp, Zea Mays
atgttgttcaactagtactgctagatgcattagcagtttcttttgtatttggataacctataaaggtctcagcacccagtatgatttggttggcaaaggatgttttctccagaataatgaaagtttagcttctggttcattttattgtctggtcgatcttttttatactgtgataaaatggggaagcactcagctgaatctggggttagtatgttgttgcatggagacttggacatacaaataattgaagcaaaatgtctccccaatatggatctcatgacagaaaggatgcgaaaatgctttactgggtatggagcttgcagcaatgattgtgggaagtcggaaccaccacacccggacatgagaaagatcatcactagtgatccatacgtttcagtttgtctgtcaggagcaacggtggcacaaactcgagtcattgccaactcggagaaccctaaatgggatgaacacttctatgttcaagttgctcattcagttagcagagtcgagtttcatgtaaaggacaacgatgtttttggggcagagcttatcggcgtggcttcaataccagttgagcacatcatgccaggtgatttggtcggtggctggtttcccatttctggtcagtacagtaatcctatgaagccatctcctgagctgcatttgtctatccagtataagccaatcgacacaaacccactatacaaggatggagttggtgctgatggccatcagagtgttggtgtcccaaatgcatatttccctcttaggaagggtggtaaggtcacactatatcaagatgctcatgttcctgacaattttcaacctcatattgagatggatgatgggaggacatatgaacaaaacaaatgctgggaagatatttgtcatgcaatcattgaggctcatcaccttatctacatagtcggctggtccttgtatcaccctgtgaagcttgtaagggaatcaacaaaacctgttcccaatggaaacccagtcactattggggaaattttgaaacgcaaagttcaagaaggagtccgtgttatagtgttgctttgggatgataaaacatcacatgacaaatttctcttaaaaacagtggaatgcaggatggtctcatgcatacacatgatgaggaagctcgaaaatatttcagacattcaggtgtccattgtgtgttgtctcctcgctatgccagcaacaaacttagcattttcaagcagcagaaacagaagatgtccgcttg

SEQ ID NO: 211305 - DNA, 3000 bp, Zea Mays
ctcacgtcctcaccgtgccggacaccggtgtctgcttggaccaaatccgatctcgtggccacggccagaacacacctcctcacgtccacctgacctcttgctcctccccaataatgcccagtgcggcagtgcctgccaccgtctaagcccaccccaagtctccgccgtcaacccgtcctcccccatggccgccgccgccgccatctctctatccttccactttcgtttccgcccgccctttccatctccacgtacccccacgcgccacgctcccttttccttgttctccccttcccttcttgccccctgccgcctccgcgtcgctcccggccgcccctcaccgtccccgtggcgccccgacgtgcgggcgcgcgctggaagcaccatcggggcgccgcctgcgcttgtgcgcccaggcggagccgtggagacggaccgcctcccctccgacgtgcgggaccgggccatggaggcggtcgaccacttcggcggtcgcgtcaccataggagacgtcgcttctcgcgctgggctgcagctcgcgcaggcggagcgcgcgctccaagcactcgccgccgacactgaaggcttcctggaggtatcggaggacggggaggtgctatacgtcttcccaaaggactacagggcaaagctggctggcaaatcgtttaggatgcgggtcgagcctctggttgacaaagccaagcaagtgggtgcttatctggtacgtgtttcatttggcactgcgctcattgcctcaattgtgctggtgtacactacaatcattgccattctctcaagctcaagtgatgaagatggtcgtgggaggcggaggagatcttatggttctactatcatcattccgacggatatgttttggtacttggatgcagattattatagaagacgtcgagtagaaaacgaaaatgggatgaactttattgaatctgtaatttaaaagggtattttcatttgtgtttggggatggtgatccaaacgatgggcttgaagaaaagcggtggaagatgattggacagtatatttcatcaaatggtggagttgttacagctgaagaactggcaccatttcttgatgtgccacctccatcagaagagtccaaggacgatgaatcatttgttcttccagttcttttacgctttcagggacatccagaaattgatgagcaggtgcaatcttcttttctctagcagttcagacttgtactgagaactaccgttgtcaaatatgacctacattttcaacccacccagctaacactggcagagcggggcgggatgggggataactgttttctttccctacattaggtaccagtgtaccaccaaaaaataggaataaacaaacaaccccaatcatgtcaggttctctactaaaaaatagtaacatgctatatcattggattgctgacttgcatgcctaagtatgtaatcttcagatctattggaagtttccaacaaagaaaaatgataaaggaacatgcaatgtgtgagtagatgcaagaaaaaggtgctgggaaatgccatgtcctggatgatgaagggaggagtgggttgtttcagatgctagggaggcgtcagccaaagcaaaaacacccttacattacatgcactagtttcttcacttgaagttgaggaggaagaagggaatacaggcatacgggtgctaccatcacacagcagttacacatcgagttaactgttgtccaccttggctgacagatagctctgtctgtgccagctacatactaagggtgtgtttggccgcgctccggctctggctctgcggcagctctggcagcagagtcgcaccaaacggcgacggagggaaatatcctgtatcgattcccatcgctgcaacgtactgcttcatcaaaaagtggtaggagcagggaatatgtgggtaccaaatggtctgcaatgtttagcggagttgaaaagtacttagaggagaaaccgtggaaattcagtaaagcgaatgcaacagagaaggcgatggttgctggtttgggaggactcaatctctttggtgtcatcattcttggaaacttgttgaagcaaatgacagtgacacctggtggactaatctcatttgccgcacagttatatcctttgcttcagatatacgctggctccttttttgcaatacctttgtttagatggtttctgctacgcaagaccaacaatggcattaaaaagaggaataaggccagagaacagagagctcaggagctcgtgtcaccagattcttctctaagaagaaagttgctcagtgcacgtgatatggctgaacggaaagtaatcacgccagaggagattgtctatactactgaaaaggatctattggagcaggattatgaagtcaaggagtgggagaggagatttaaggagctcgagtcagagtgatggacatgaccgatatacttgacacttgcagtagctctacatggtcctcaccatacttgtcggtgatttttatccgcatccaacggagtggaagatggatctgactgaaccactcgagcaagcgaaactggatggtactggacctcactaattgtcgtgtcaccaccagcccaccactgaccacttcgctatggaagttttgtggaagctgttggtttaattggaaccgaccattatttgcaagatgatgttcgtatctgtgccattgacctgcatatatgtatagttccaatcacggatcaaattcagaatttgacacgaaaaagaaaaaaaacagggaatatggctaggatgctactcggtttgaatggagtccaatcaaaacatgtaaaaaggtcagcctgtgaacagggactcagactgtttgctgcggctttaatccactggctcctaacagtgctaggaatagacgtactgttataaaaacttccaggtggaccaattcacgatgggaacctaacattttcttgcattaagctgaaacgtgtatctcctgcctgcgtttgtcattgcgaacgag

SEQ ID NO: 211306 - DNA, 2877 bp, Zea Mays
ctgaatctcacgtcctcaccgtgccggacaccggtgtctgcttggaccaaatccgatctcgtggccacggccagaacacacctcctcacgtccacctgacctcttgctcctccccaataatgcccagtgcggcagtgcctgccaccgtctaagcccaccccaagtctccgccgtcaacccgtcctcccccatggccgccgccgccgccatctctctatccttccactttcgtttccgcccgccctttccatctccacgtacccccacgcgccacgctcccttttccttgttctccccttcccttcttgccccctgccgcctccgcgtcgctcccggccgcccctcaccgtccccgtggcgccccgacgtgcgggcgcgcgctggaagcaccatcggggcgccgcctgcgcttgtgcgcccaggcggagccgtggagacggaccgcctcccctccgacgtgcgggaccgggccatggaggcggtcgaccacttcggcggtcgcgtcaccataggagacgtcgcttctcgcgctgggctgcagctcgcgcaggcggagcgcgcgctccaagcactcgccgccgacactgaaggcttcctggaggtatcggaggacggggaggtgctatacgtcttcccaaaggactacagggcaaagctggctggcaaatcgtttaggatgcgggtcgagcctctggttgacaaagccaagcaagtgggtgcttatctggtacgtgtttcatttggcactgcgctcattgcctcaattgtgctggtgtacactacaatcattgccattctctcaagctcaaggtatgtttagtgcagcacgaaagagtttgtgtgctaattattatatgttcactgcctaaaggtctgttctggaacgatatcttcatctttgtcatatggttcagttcccttaaatgacattctgtctctgtaatttgatccgtgaattctataaaaatgaagcacacatagatttcatgagtggttttttggactttagttgtaggttttgtcatttaactcaacacccctttgattggtagcacttcctcttctactagtagtgatgaagatggtcgtgggaggcggaggagatcttatggttctactatcatcattccgacggatatgttttggtacttggatgcagattattatagaagacgtcgagtagaaaacgaaaatgggatgaactttattgaatctgtaatttaaaagggtttgacttgattgttcattgtcactttgttttgatggaatgtgtaggtagtttgaaactgtatgtaatgtttattaaataaatgccacaggtattttcatttgtgtttggggatggtgatccaaacgatgggcttgaagaaaagcggtggaagatgattggacagtatatttcatcaaatggtggagttgttacagctgaagaactggcaccatttcttgatgtgccacctccatcagaagagtccaaggacgatgaatcatttgttcttccagttcttttacgctttcagggacatccagaaattgatgagcagggaaatatcctgtatcgattcccatcgctgcaacgtactgcttcatcaaaaagtggtaggagcagggaatatgtgggtaccaaatggtctgcaatgtttagcggagttgaaaagtacttagaggagaaaccgtggaaattcaggtcagtatatatcatcaccatccttagtgaagttgaactaatccaggatgcaatttgtcctttgcgggggaaggtttgccttggtttttccccttccttgacccaattcatatgggagcctccggcactgggtctaccctatgccctttatacacctacctgttgattttgcagtaaagcgaatgcaacagagaaggcgatggttgctggtttgggaggactcaatctctttggtgtcatcattcttggaaacttgttgaagcaaatgacagtgacacctggtggactaatctcatttgccgcacagttatatcctttgcttcagatatacgctggctccttttttgcaatacctttgtttagatggtttctgctacgcaagaccaacaatggcattaaaaagaggaataaggccagagaacagagagctcaggagctcgtgtcaccagattcttctctaagaagaaagttgctcagtgcacgtgatatggctgaacggaaagtaatcacgccagaggagattgtctatactactgaaaaggatctattggagcaggattatgaagtcaaggagtgggagaggagatttaaggagctcgagtcagagtgatggacatgaccgatatacttgacacttgcagtagctctacatggtcctcaccatacttgtcggtgatttttatccgcatccaacggagtggaagatggatctgactgaaccactcgagcaagcgaaactggatggtactggacctcactaattgtcgtgtcaccaccagcccaccactgaccacttcgctatggaagttttgtggaagctgttggtttaattggaaccgaccattatttgcaagatgatgttcgtatctgtgccattgacctgcatatatgtatagttccaatcacggatcaaattcagaatttgacacgaaaaagaaaaaaaacagggaatatggctaggatgctactcggtttgaatggagtccaatcaaaacatgtaaaaaggtcagcctgtgaacagggactcagactgtttgctgcggctttaatccactggctcctaacagtgctaggaatagacgtactgttataaaaacttccaggtggaccaattcacgatgggaacctaacattttcttgcattaagctgaaacgtgtatctcctgcctgcgtttgtcattgcgaacgag

SEQ ID NO: 211307 - DNA, 2734 bp, Zea Mays
gctgaatctcacgtcctcaccgtgccggacaccggtgtctgcttggaccaaatccgatctcgtggccacggccagaacacacctcctcacgtccacctgacctcttgctcctccccaataatgcccagtgcggcagtgcctgccaccgtctaagcccaccccaagtctccgccgtcaacccgtcctcccccatggccgccgccgccgccatctctctatccttccactttcgtttccgcccgccctttccatctccacgtacccccacgcgccacgctcccttttccttgttctccccttcccttcttgccccctgccgcctccgcgtcgctcccggccgcccctcaccgtccccgtggcgccccgacgtgcgggcgcgcgctggaagcaccatcggggcgccgcctgcgcttgtgcgcccaggcggagccgtggagacggaccgcctcccctccgacgtgcgggaccgggccatggaggcggtcgaccacttcggcggtcgcgtcaccataggagacgtcgcttctcgcgctgggctgcagctcgcgcaggcggagcgcgcgctccaagcactcgccgccgacactgaaggcttcctggaggtatcggaggacggggaggtgctatacgtcttcccaaaggactacagggcaaagctggctggcaaatcgtttaggatgcgggtcgagcctctggttgacaaagccaagcaagtgggtgcttatctggtacgtgtttcatttggcactgcgctcattgcctcaattgtgctggtgtacactacaatcattgccattctctcaagctcaagtagtgatgaagatggtcgtgggaggcggaggagatcttatggttctactatcatcattccgacggatatgttttggtacttggatgcagattattatagaagacgtcgagtagaaaacgaaaatgggatgaactttattgaatctgtattttcatttgtgtttggggatggtgatccaaacgatgggcttgaagaaaagcggtggaagatgattggacagtatatttcatcaaatggtggagttgttacagctgaagaactggcaccatttcttgatgtgccacctccatcagaagagtccaaggacgatgaatcatttgttcttccagttcttttacgctttcagggacatccagaaattgatgagcagggaaatatcctgtatcgattcccatcgctgcaacgtactgcttcatcaaaaagtggtaggagcagggaatatgtgggtaccaaatggtctgcaatgtttagcggagttgaaaagtacttagaggagaaaccgtggaaattcaggtcagtatatatcatcaccatccttagtgaagttgaactaatccaggatgcaatttgtcctttgcgggggaaggtttgccttggtttttccccttccttgacccaattcatatgggagcctccggcactgggtctaccctatgccctttatacacctacctgttgattttgcagtaaagcgaatgcaacagagaaggcgatggttgctggtttgggaggactcaatctctttggtgtcatcattcttggaaacttgttgaagcaaatgacagtgacacctggtggactaatctcatttgccgcacagttatatcctttgcttcaggtatggctgggcttgatatgcctgtttagtactctataatgtggtcattactctagtcattccatttatacatatttggcctgacagaaatcacgagcccttctctttgttaaggggatttccagatgttttgaatgttgcaaaatcgatgattgctgaattacctgtgaattaataagattgtcaatgatatgtactgatacaatgtggtcatttctagatatacgctggctccttttttgcaatacctttgtttagatggtttctgctacgcaagaccaacaatggcattaaaaagaggaataaggccagagaacagagagctcaggagctcgtgtcaccagattcttctctaagaagaaagttgctcagtgcacgtgatatggctgaacggaaagtaatcacgccagaggagattgtctatactactgaaaaggatctattggagcaggattatgaagtcaaggagtgggagaggagatttaaggagctcgagtcagagtgatggacatgaccgatatacttgacacttgcagtagctctacatggtcctcaccatacttgtcggtgatttttatccgcatccaacggagtggaagatggatctgactgaaccactcgagcaagcgaaactggatggtactggacctcactaattgtcgtgtcaccaccagcccaccactgaccacttcgctatggaagttttgtggaagctgttggtttaattggaaccgaccattatttgcaagatgatgttcgtatctgtgccattgacctgcatatatgtatagttccaatcacggatcaaattcagaatttgacacgaaaaagaaaaaaaacagggaatatggctaggatgctactcggtttgaatggagtccaatcaaaacatgtaaaaaggtcagcctgtgaacagggactcagactgtttgctgcggctttaatccactggctcctaacagtgctaggaatagacgtactgttataaaaacttccaggtggaccaattcacgatgggaacctaacattttcttgcattaagctgaaacgtgtatctcctgcctgcgtttgtcattgcgaacgag

SEQ ID NO: 211308 - DNA, 700 bp, Zea Mays
agtacctggagaagcaccctgagctcaagggcgtaaaggaggcggctggggagaagtggcgctctatgtcggatgaggagaaggcgaagtatggcggtagcaagaagcaggatggcaaagcaagcaagaaggagaacactagctccaagaaggccaaagctgatgttcgggagggagatgaagcagaaggttctaacaagtcaaaatctgaggttgaggatgatgagcaggatggacgaggatgagtaaatagtacgatggggaacagcagctttgcaattgagtgtttgctgctttacttatttttctatatgctgttccttttgatgttatatgctgtaaggaaaatctgtacatgatggtaccttagggtatggcatgctggagttcccctttaacccgaagagccggatacttttgccagcctcgtcagcatgtgtaaacagttgttttcttgttttatcgacttattgggtgactacccaagagttggtttgtagtcaatgaggtatgctgccccctgtggtgctacgcagctgcagcaacatcagatggtcaggctaaaatcatgttgtgggatctgattctaatgatgcttatttagtactattacaaatatctatcgttgcttatataaatttgttaaaccttgagatatttttaccaagttctatattcgtatttccctccattccattga

SEQ ID NO: 211309 - DNA, 2526 bp, Zea Mays
gacacacttcaaaagtttgtagatcggcagtctgagttagtccgagtttaaggatagaaaatgtattttgtcctctttgggttagaaccagcaagaggagtcgtgaatccgtgacaaccggcggcggcgagggaagaatcgaagatcgccgcagccgcaaggaaggaaaccgagaacaactcaatccgctggctatggcgttgctgatggagcccggcgctgagcccctgactgagagcgagcaggccgacctggccggcatcgccgccatcaaggagtcggcggcgcgcgaatacaaggagcaggggaaccagttcgtccggatgggccggaggcactacgccgcggcggtctcctgctacacgaaggccatcgctcagatggagcccctctcctccctcgacgcatcagccgctgctgacgcctccgttctcttcgccaaccgagcacatgtcaacatcctcctcggtaaccaccgacgggccctcgacgacgccgagcaggccatccgcctctctccctccagcgtcaaggaaggggctcgaacaggacccccctaacgaggaattcaagaaactgttgtcggaagtggattcaaaactgagagagcaagatcgtcagagagcgaaggttgcacaagcaatcgccaaagccaaggatcttgctgctgctatgggaaagagaggggtgaaacttgggaaggcagcctatcaagagctgacaggggtaaagaagccagtgctggatgagcagggcgtgctccactggcctgttcttctgctctacccagaggtcatgtcgagtgacttcattgaggattttccagatacagatactttctcgccccaccttgatgtcatatcctcctgaattacatgatgcttccttttggttgagttaaaatgtgtagatgtataagtagctttactgaatttattgcaatggtatccttaactatcaaacatgttctcagaaacttctccaccattgccatgggatgataaccatgtttacacaagggactcaatcgaattatattatcaggtttgtttggatgaatttaattttgctcgagtaaacccctactttctgctaagcattatgattacagttttttttttcagaaagcaaagcattatgtgatgtagcctcttcattgaacattataaaaaaaatcttcattttgtgtacgcgcaattgttgatcttttgttctttttgatgttggaaaatcccattttgattaggtgaaccatatgtaactctggcagggcagtcatcagataacaacaacattattgtactgaactcgcaacacctgcacatttaagctgtcctgtaattaagaaacaggcaaatgacatagattaagggctgacataatttaactccatgattattatgatataattgaagtattagtatatactcaaactattatcattagttgtatttcattgctggcctattggtgacgccctgaaaaatgaaaaccatgacatcacattttcctttattgctttgaatttaaagcatctgatgagaaatgaagagacattggcaacttgagatttcaaacctatcacagagattgctgttataaccgtctagtccaatttgtctaattcagtaccttatgagtttaacctcactcattactgtaaggttcggtttgccatcctactgtggatgttattataggttgatttcagtttcaagaaatagaaggtcaatttttactctttttctggctatattcacctttatttatgcattagggtggttttggcaaacctttgtcccgaagtgaggtattaagatatcttctagaaggcaatgtagattcgaaggcgcttccagatagccttcttgacggggaagacgaagaacatgacagtaccaaatgtaccactgttacatcaactgatagctccagtaagtggatcaaggtaaaagaaggaaaaacacttcaggaggtgctgcaggataaaggctatattgttcctgcaattcctgtgttcttcgttgtttcaaggaagtccacattctataaagacttcaaggctggaaactggtctttgccatgaaacagaaccggacactaaggttcagcttaaatcgatctctgagacgggcagcggatatggcaagaaagcagaagatgccctcttgtgatcatggtcatttggtttaaaaggagtgtgcttttttcagtgtctgcagactgacagccttttgttaccgagatagacagaaaagacgaggcaatgtaatatgaatttttatgtgaaccgattcagcgtttagcatggtcgtagtatgttaagtctcggttgaaacgttggtgtttctaacggatggtcttgacagtagtgtctgagcagtgcgacttgggtgactcttctccgatcgagcaacaaacttggaatatatgcttgccgctgggagccggtggcctgtacacgcgctatgtacgaggcaagagtttccgcctggggtcaggattagtgctgggaatctgggctgg

SEQ ID NO: 211310 - DNA, 1692 bp, Zea Mays
gacacacttcaaaagtttgtagatcggcagtctgagttagtccgagtttaaggatagaaaatgtattttgtcctctttgggttagaaccagcaagaggagtcgtgaatccgtgacaaccggcggcggcgagggaagaatcgaagatcgccgcagccgcaaggaaggaaaccgagaacaactcaatccgctggctatggcgttgctgatggagcccggcgctgagcccctgactgagagcgagcaggccgacctggccggcatcgccgccatcaaggagtcggcggcgcgcgaatacaaggagcaggggaaccagttcgtccggatgggccggaggcactacgccgcggcggtctcctgctacacgaaggccatcgctcagatggagcccctctcctccctcgacgcatcagccgctgctgacgcctccgttctcttcgccaaccgagcacatgtcaacatcctcctcggtaaccaccgacgggccctcgacgacgccgagcaggccatccgcctctctccctccagcgtcaaggcgtactaccgagcagtgaaggcggcgcttgcgctggacttgttaacggacgcggcgtccttctgcaggaaggggctcgaacaggacccccctaacgaggaattcaagaaactgttgtcggaagtggattcaaaactgagagagcaagatcgtcagagagcgaaggttgcacaagcaatcgccaaagccaaggatcttgctgctgctatgggaaagagaggggtgaaacttgggaaggcagcctatcaagagctgacaggggtaaagaagccagtgctggatgagcagggcgtgctccactggcctgttcttctgctctacccagaggtcatgtcgagtgacttcattgaggattttccagatacagatactttctcgccccaccttgatgtcatgttctcagaaacttctccaccattgccatgggatgataaccatgtttacacaagggactcaatcgaattatattatcagattcgaaggcgcttccagatagccttcttgacggggaagacgaagaacatgacagtaccaaatgtaccactgttacatcaactgatagctccagtaagtggatcaaggtaaaagaaggaaaaacacttcaggaggtgctgcaggataaaggctatattgttcctgcaattcctgtgttcttcgttgtttcaaggaagtccacattctataaagacttcaaggctggaaactggtctttgccatgaaacagaaccggacactaaggttcagcttaaatcgatctctgagacgggcagcggatatggcaagaaagcagaagatgccctcttgtgatcatggtcatttggtttaaaaggagtgtgcttttttcagtgtctgcagactgacagccttttgttaccgagatagacagaaaagacgaggcaatgtaatatgaatttttatgtgaaccgattcagcgtttagcatggtcgtagtatgttaagtctcggttgaaacgttggtgtttctaacggatggtcttgacagtagtgtctgagcagtgcgacttgggtgactcttctccgatcgagcaacaaacttggaatatatgcttgccgctgggagccggtggcctgtacacgcgctatgtacgaggcaagagtttccgcctggggtcaggattagtgctgggaatctgggctgg

SEQ ID NO: 211311 - DNA, 1836 bp, Zea Mays
gtgttatctctgtccaaacttttaaagcgtgtcggtccgttttaatcctggttcgtgtcaatcatgatatgtttagacctgacacacttcaaaagtttgtagatcggcagtctgagttagtccgagtttaaggatagaaaatgtattttgtcctctttgggttagaaccagcaagaggagtcgtgaatccgtgacaaccggcggcggcgagggaagaatcgaagatcgccgcagccgcaaggaaggaaaccgagaacaactcaatccgctggctatggcgttgctgatggagcccggcgctgagcccctgactgagagcgagcaggccgacctggccggcatcgccgccatcaaggagtcggcggcgcgcgaatacaaggagcaggggaaccagttcgtccggatgggccggaggcactacgccgcggcggtctcctgctacacgaaggccatcgctcagatggagcccctctcctccctcgacgcatcagccgctgctgacgcctccgttctcttcgccaaccgagcacatgtcaacatcctcctcggtaaccaccgacgggccctcgacgacgccgagcaggccatccgcctctctccctccagcgtcaaggcgtactaccgagcagtgaaggcggcgcttgcgctggacttgttaacggacgcggcgtccttctgcaggaaggggctcgaacaggacccccctaacgaggaattcaagaaactgttgtcggaagtggattcaaaactgagagagcaagatcgtcagagagcgaaggttgcacaagcaatcgccaaagccaaggatcttgctgctgctatgggaaagagaggggtgaaacttgggaaggcagcctatcaagagctgacaggggtaaagaagccagtgctggatgagcagggcgtgctccactggcctgttcttctgctctacccagaggtcatgtcgagtgacttcattgaggattttccagatacagatactttctcgccccaccttgatgtcatgttctcagaaacttctccaccattgccatgggatgataaccatgtttacacaagggactcaatcgaattatattatcagggtggttttggcaaacctttgtcccgaagtgaggtattaagatatcttctagaaggcaatgtagattcgaaggcgcttccagatagccttcttgacggggaagacgaagaacatgacagtaccaaatgtaccactgttacatcaactgatagctccagtaagtggatcaaggtaaaagaaggaaaaacacttcaggaggtgctgcaggataaaggctatattgttcctgcaattcctgtgttcttcgttgtttcaaggaagtccacattctataaagacttcaaggctggaaactggtctttgccatgaaacagaaccggacactaaggttcagcttaaatcgatctctgagacgggcagcggatatggcaagaaagcagaagatgccctcttgtgatcatggtcatttggtttaaaaggagtgtgcttttttcagtgtctgcagactgacagccttttgttaccgagatagacagaaaagacgaggcaatgtaatatgaatttttatgtgaaccgattcagcgtttagcatggtcgtagtatgttaagtctcggttgaaacgttggtgtttctaacggatggtcttgacagtagtgtctgagcagtgcgacttgggtgactcttctccgatcgagcaacaaacttggaatatatgcttgccgctgggagccggtggcctgtacacgcgctatgtacgaggcaagagtttccgcctggggtcaggattagtgctgggaatctgggctgg

SEQ ID NO: 211312 - DNA, 1577 bp, Zea Mays
gggcaggctgctagttacagcctagacacggcgcggcgagtgcaggttggcagctagcgacgacgacctcgccggccgacgacatgggtaaaggcgggccgcggccggccgaggccaagaaatcggcgccggcgctgcggtcgcttgcgtcggtgttcatgcacgcggacgtcgcggacgtggtgctcatggtgctgggcctggtgggcgccatgggcgacggcatgtccacgcccgtgatgctctttatcaccagccgcatcttcaacgacctcggcagcggaccgggcctcctccaggagttcagctccaagatcaacgagaacgcgcggaacctcgtcttcttggcgctcggcaactggctcatggcgttcctagaggggtactgctgggcgcgcacggcggagcggcaggcgtcgcggatgcgggagcggtacctgcgggcggtgctccggcaggacgtggagtacttcgacctcaaggtggggtcgacgtcggaggtgatcaccagcgtctccaacgacagcctggtggtgcaggacgtgctgagcgagaaggtgcccaacttcgtgatgaactgctccatgttcctgggcagctacgccgtcgggttcgcgctgctgtggcacctcacgctggtggcgctgccgtccgtgctgctgctcatcatcccgggcttcatgtacggccgcatcctcatcggcctcgcgcgccggatcagggagcagtacacgcggccgggcgccatcgccgagcaggccgtctcgtccgtgcgcaccgtgtactcgttcgtggccgagcgcagcaccatggcgcagttctccgccgcgctccaggagtcggcgaggctcggcgtcaagcaggggctcgccaagggcgtcgccatcggcagcaacggcatcaccttcgccatctgggcgttcaacgtctggtacggcagccgcctcgtcatgtaccacggctaccagggcggcaccgtcttcgccgtctccgctgccattgtcgtcggtggcttagctctggggtccggtctgtccaacgtcaagtacttctccgaggcgagctcggcggcggagagggtccaggaggtgatcctgcgggtgcccaagatcgactcggagagcagtgccggcgacgagctggccaacgtcgccggcgaggtggaattcaagaacgtggagttctgctacccgtcgcggccggagaccccaattttcgtgagcttcaacctgcgcgtgccggcggggcgcacggtggcgctggtgggcggcagcgggtcggggaagtcgacggtgatcgcgctgctggagcgcttctacgacccgtcggccggggaggtgaccctggacggcgtggacatccggcggctgcggctcaagtggctgcgcgcgcagatggggctcgtgagccaggagccggcgctgttcgcgacgtccatcagggagaacatcctgttcggcaaggaggacgccacgggggaggagatcgtcgcggcggcgaaggcggccaacgcccataacttcatctcccagttgccgcagggctacgacactcagttgggccgccgtggaggacgc

SEQ ID NO: 211313 - DNA, 2366 bp, Zea Mays
gtcgaaattgtttttgctcgtctgttcttcgttggataactagaaaaatttcctcccaaaattgccgccgtcgcctccgtgtccttccacggcagggacccgccggagcatcaccgcctccgtccatgtcgctcaaccgcctcaaggaaaccctccacgcctgttcctcttcctcctccgaaccacggacccaaccgcgctcaccacagcatcctgcccgccttccgcggagacccccaaagacgtccctttcgcagcagctcctccgcctcgaggccgccgcctcttcatcctccttcttctcctccaggcccttacagctcccacccgcccccaggcccccgatcgagaagccgcgggaggatgtcgaaccgccgtcgtcggaggatgaggacgagagaaaaagtcgccccattatccgccgctgcctgcatccgccaccagcggccgccctcgagtcccgcgggccatacgagccacttgtgctctcgctgcctggagagcaccctgtcgtccaggtgcccccatcaataaattgcaggctacttgcgcatcagagggacggtgtgagattcttatacaatttgtatagaaacaatcatggcggtgttcttggagatgacatgggtttggggaagaccattcaaactattgcttttttgtcttctgttattggaaaaggcaatggccatgggcaatcaacaaacaaaggaaagatgactggtcctgtactcatcctctgccctacttcggtgatccggaactgggaaaatgaattttccgagtgggcagaattctctgttgctgtctatcatggtccaaatcgtgatttagttcttggaaaaattgaaaatcaaggactggaggtactcattaccagttttgacactttcagaattcatgataaggttttatgtggtatctcgtgggaacttgtggttgttgatgaggcacatcgtctcaagaatgaaaagtccaagttatatacagcatgcttggggataacaactcaaaagcggtttggtctcacggggaccataatgcagaataagatcatggaattatttaatctatttgactgggtcgtgcctggctgcttaggggaccgagaacactttcgagcttattatgatgagcctctaaaacagggtcagaggctaagtgctcctgagagatttgttcaagttgctgatgcgcgcaagaagcaccttgtttccattcttagggaattcttattgagaaggacaaaagaggagacaattggacatcttatgcttgggaaggaggataatattgttttctgcaaaatgagtgacgttcaaaaacgtgtttatagaagaatgctgcaacaacctgatatacaaatccttattaataaggatgtccgctgtagctgtggaagtcctttacctcaggttgaatgttgcaagagaactgaaccagatggtgttatatggtcttatcttcacagagagaaccctgaaggctgttctatatgccccttctgtcttgttcttcctttcctcgtcaagcttcagcagattagcaaccatctggagctgataaaacctaatccaaaggatgagcttgaaaagcagaagaaagatgctgaacttgcagctgctgtctttggtgcagatattgacttagttggtggtactgctaaaagtgagaacttcatgggtctcagtgatgctgagaactgtggaaagatgcgagcactagaaaggcttctgtcattatggactggacagggtgacaagattcttcttttcagttattctgtcaggatgcttgacatactagagaagtttctcataaggaagggttattgcttttcacgcttcgatggaacaactccgatgaatgcacgccaatcactagtggatgagttcaacagaagccctagcaaacaggttttccttatatctactcgagcaggtaatttaggtgtaaaccttgttagtgctaaccgcgtggtgatatttgatccaagttggaaccctgcccaagacttgcaagcacaagacagatcatttcggtatggacagagacggcatgttacagtatttcgcctacttggtgccggttcacttgaagagctcatttattctaggcaaatatataaacagcagctttccaacattgcagtctctggaaaaatagagaggcgttactttgaaggtgtgcaggaactagatcccaagtgttattttttcatcagcgcatcaaattcagcattgatggcgttcttccaaagttccaattgtcgtcacctagagcttcagacatgtcttgaggttcaccggtggtggtaaaacaaccatatttaatgagtaatttttccatcttgtgatcttgtccga

SEQ ID NO: 211314 - DNA, 3132 bp, Zea Mays
aaatacaccctatggattcgcatttcagggaagagttctctggttccccagttcctcttagaagaaaatatggagcctatcctgtgcacacagcctagaaggtttgcagtggtagccattgctcgagcgatagctaactctcgcaattggcagctaggcgaggaggttggatatcatataggtcactcaaatatgtcggatctcaactctaaaaggtcaaaaattgtgttcaaaacagctggtgtagtattggagcaaatgtgtgataggggaattgctgcattaaagtataaggtcattattcttgatgaggtacatgaaagatccgtggaatctgatcttgtccttgctagtatcaagcagtttttgatgaaaaagagtgacttaaggttagttttgatgtctgccactgctgacattactagatataaagaatattttagagacctagggagaggcgaaagggttgaagtgattgccattccctgcagtccacatacaagcatttttcagcgcaaagtcctatacctagagcagattgctgatattctcaagataaattcccaattgctttcatcaaaatattgctctggtccggatgcttctgctgatgctgaaataaattatgatgtttatgaacttatccacaagttattgttgcatatacaccaaaatgaaccagacattagcaagagcattttggttttcctccctacatactacgcattggagcagcaatggatccgtctactgccttttagttcaacctttaaggtacatattcttcaccggagtattggcactgatgaagcacttcagactatggagatctcaaagtcttgccgaaaggtgatactggctacaaatattgctgaatcatcagttactataccaggagttgcatacgttatcgattcttgtagatcattgcaagtatattgggacccaatcaggaaagcagatgcagctgggcttgtttggatttccaagtctcaggcagagcagcgtaaaggcaggacaggtcgaacctgtgatggtcaaatttatcgtttggtgactggaacattttatagcagtttaaatgatcatgaatatcctgccattttgagatgctccttaagggagcaagtgctcatgcacttctgcaaagagttcttaatccaccagatccagatgctattgaagaagcgctagaatcactagttcaaattcatgcattggagaagacagcttctggacgctacgaacccactttttatggctgtttgctcaatagtttgccattgtcatttgattcttctgttcttgcccttaaattttgtgagcttggtgctatccatgaaggaattctaataagcatcatgctggacatccagccgcttcctatcttgcacacttttggctatcgagaactgtgccagaagtacatagacaattatttcaagggaaatggcagtgtacaaatcggcaaaaaggaagctaccaccattggaaatctttgtgcatttcaattttgggagcgcgtttttaaggacaaacaccgtctggaatatctaaaatatgtggcgaagactcaagaaccagaagaatcacataccttccttactaaacctgaagaggaatggtgtgcagttcacaacctcctccctgcagcgtttaagaacatatctgaaatttatgatgttgttgtgatgcaactgcaccggttcaggccaagttttcttgtcaaaatcaatcctccaaagtttcttcagccttctgaattcaaccacacatgtctccatcgtgaaatactggatctagaggaggacgtggattcactctcattagagactgagaatgctcacagcgattcacagaagcgatgtgctgcaactccatatgtttcaccaactgattttgagaccagcaccattgttgaaatgctaaagacacttgtcaagatgaaaacacaacatgctgagaataaaatttcttataaggggcgacttggttctaatgtgaagccaaccttgggaactcaggcgtgcgtgttttttgctaatggatcatgcaatcttggggatgtgtgccgcttttctcattcatcccttgctcctaaaccagtatgcaagttctatctcacactacagggttgtcgaaatggcagatcttgtccatactctcatgattctggctcattggtctctgcacctgtcacatctggaatatgctctcaggaaagcagaggcacctcattgtgcgatacaaggttgcttcctgctgatggagatgggcatattcttgtcgtgaatgacaaaaccctgcagttctctattccaaagggcctcaagatactcgagaatttggccgatccatctagtctaatcactgggcttgagcatgaattgccagttccttgggcaaaacttaagcgagttttctggttcgatggctttggtaacgatgagtcagccaccgagcaggctctcttgcagaagttcttcgcgagtattgccatcaagattttgtcggaacagctgtccggcctgcaggtcatcctgatcatgaaaaacacgagatacattcagttgcaggtggaaagattggcgcgggagtgcttctttttcctcagcgaatcgtttctgtctgatgaagcaaatctaggatggttctcagatacctccacgcacacaagaaggatgcaagtggcagcaccggtgacctacgtcttcaacctgcaccctccctcctctactcagtttggggattatccggcggaacttcgggaggctttacgcagggattagttaggccaggttatccacgtgaatagctagtgtcatctggatttcgtagcagtgaaccttgttcgtggtattggcactgaagccctttctgtctgtgagttgtgagcttgcttactcgttcttagtaagacgctgaggaatattgcataactccattcaggtgtcaactgtcggtcgtctcatggacagcttattaggccgctgcttgcaaatatcatttgtgggtgggcgtaaatatgcttgacctgctaagttaacgtacgttttagtgcttttgttgactgcgaaattgtaccttcacgatgtcatctattgtgtgcagacgaaagcattctgaaatatc

SEQ ID NO: 211315 - DNA, 1442 bp, Zea Mays
gccccttgtgcacggagatagttgcttcggaggctcaggttgggttgccaaatgttggcaaatcaacttttttcaacatagtaacgaagttggctatcccagctgagaattttcctttctgtaccatcgaaccaaatgaagcacgggtgaatgttccagatgaacggtttgattggctttgcaaactttacaagccaaagagtgaggtgcctgcatatcttgaagtaactgacatagctgggcttattagaggtgctcatgctggggatggtctgggcaatgcattcctctcacatatacgtgctgttgatggaatcttccatgtcctaagagcatttgaagacgcagaaattactcatgttgacgatacagtagatcctgttagagacatggaaactattagtgaagagctcagactaaaggatatagagttcatgaaaaagaaacttgaggaccttgataagtcaatgaagaggagcaatgataagcagctcaaaattgagcatgaattatgtgagagggtcataggccatcttgaggaagggaaagatgtccgtttaggagattggaaagctgctgacattgagatcttgaatacattccagctactttcagctaagccagttgtctatttggaacatggtggtgaaaccatacttcctttcagctgtgcttttgaacagaaactagtggatatgccagaagatgaagccgccaaatattgtgctgaaaaccagataacaagcatgatcccaaaaattatcaagactggttttgcagcaattcatctgatatactttttcactgctggtcctgatgaggtaaaatgttggcagatcagacgccagactaaagctcctcaagctgctggtgcaattcacactgattttgaaaggggtttcatatgcgctgaggtaatgaagtttgaagatctgaaagaactgggcagtgaatctgctgtaaaggctgctggaaaatacaagcaggaggggaaaacctatgtggtccaggacggggacatcatctttttcaaattcaacgtgtctggtggcgggaagaagtgaataatgtatgaagatggtagcatcaacagtgttttacgtcttaccccgaatttctcattcaacagtgtttacaccttgccccgtatttccacatttttgaggtcgcttgccagtagctctaggttccggtatcgaaaacttgtacaacaaggctccagaccgttgaaggatttgtattaataacatgcacaattgtatggcttgtgcttgagctctcgctgttaccagaagcttagaatcgtttgagttctgtggttcggttttgcgtggtttattgtgtaagctggtctaactgcaaatgatttgatgcttgtggcgggaacaaatgtatcaaccgtgaagctagttgtggaagctatgtgtgggtcccctttgggc

SEQ ID NO: 211316 - DNA, 2524 bp, Zea Mays
ccaagcattctcaaaccgaaagcaatgtttttttggaagggacttcggaaggcgacgcttttactggcgtaccagagcttcggcgtcgtgtatggcgatctctgcatttcgcccgtctacgtgtacaagaacaccttttccgggaagctgcggctgcacgaggaggacgaggagatcctcggggtgctgtccctcgtcttctggagcctgacgctcataccgcttctcaaatacatcatccttgttcttggagcagatgacgatggagaaggtggcacatttgcgttgtactcgttgatgtgcaggcgctcaaggatgggcctcctgatgaacagtataaacgacgggtgtttatcggtgtacagccaggaggaggaacctcgcgaggaggagctgaagagtagtctggcgataaagtctttcatcgagaggcattactcgctccgtgtcctgctgctgctcttcgtcctgatgggtactagcatggttattggggatggcgtcttcaccccaactatgtcagttctatcagcagtttctggactcagaatcaagtttccagagctacatgaaagtaagaagctgtttattatacatattgctcacaatgatttacttctgttaggagcagatgctagtcaatatttccctgattacactgtgcttctcgcctgtttcattttggttgtccttttcgcgctgcaacactacggaacccaccgcgttgggttcctgttcgctcctattctgcttgcctggcttggctgcatcggcggcatcggcatatacaacatattcaggtggaaccctagtgtcgtccgtgctctgtccccgtactacatatacaacttcttcaggaaggccggcaaggatggctggagctcgctaggagggattgttctatgcatcacaggtgctgaagcaatgttcgctgatcttgggcatttctccaaactttcactgaggcttggattcacaatagttgtgtatccatgcttagtcctggcttacatgggtgaggctgcttatctatctaaacatagagaggacctacagagcagcttttacaaagctctcccagacagagtgttctggcctgtcctgatcatcgcaacactagccacagtcgttgggagccaggccatcatctcagctacgttctcgatcataagccagtccagggctttggggtgcttcccgcggataaagatcgtgcacacatccagccacgtccacggccagatctacataccggaggtgaactgggccctcatgttcctgtgcctggccgtcaccgtcggcttccgcgacaccgaaatgatcggaaacgcctacgggctcgccgtgatcctggtgatgttcgcgaccacatgcctgatgttcctcgtcatcacggtcgtgtggagccggagcgtggcgctggcggcgctcttcacggcggggttcgggtccgtggagctgacgtacctgtcggcgtgcctcgccaaggtgccgcacggcgggtggctgccgctgctgctgtcgctgggcacgctgctggccatgtcgacgtggcactacggcacgaagaggaagcgggagcacgaggcgcagagcaaggtgcgcctggaccggttcctgggcctgagcgccggcatgggcctggtgcgcgtcccgggggtgggcttcgtctacgccgccagcgccgccgctggcggcgtgccccccgtgttcgcgcacttcgtcaccaacttcccggcgttccaccgggtgctggtcttcgtgtccctgcagacgctggcggtgccccgtgtgccccccggcgagcggttcctggtggggcgggtcggcgcgccggcgcaccggatgttccgctgcgtcgtgcgctacgggtacaaggaagggcggcgggaccacttcaacttcgagaaccagctgctgatgaaggtggtggagttcctgcagctgcaggacgccgccgccgccgccaaggcgggaggatgcgtgtccgggtccggggagctgtcggtgatcccggcgcacgtggacgcgggctcggcgccgccgtcgtgcagcgagatcgacgccggcaggagggtccggttcgaggagccgagcggggccgccgccggcagcgaggaggaggtgaagacgctgctggaggagctggagtccggcgtgtcgtacatgatcgggcacacgtgcgtgcaggcccacgagtcgtcgcccgccgtgaagaagttcgccatcaacgtggtgtacgggttcctccggcgcaactcgcggcggcccgccgtggagctcggcatccccaacacctccctcatcgaggtgggcatgacgtacaagatctgagtccgactagtgtctagtggcacctcgccggtgaggacgagcacgctagctggggctgaaaacaccgacgaagctgcaggctactgtaggggaattgctatttcagaattcagagtcacagggcccccttttttttgtcagagaatcaggcggcatttgctggtcagttgtcattcgctttctgatccac

SEQ ID NO: 211317 - DNA, 1336 bp, Zea Mays
gtgcgccccctattttattttattggcactgtacctaaaggttgcagaagagcgcttagaggatacttgggttcctttggaccaaacagttgctcctgaagaacttgaggaaatgatccgctctaaagaggcacacacaaatgcagtaatacttgagagtctggcagatattccagatgctgaggttaaaccgccagataatgtcttatttgtttgtaagctcaacccagtaacacaggatgaagatttatacacaatcttttctcgttttggaactgtgacatcagctgaaataattcgtgactacaagactggagatagtttatgctatgcttttattgaattcgatacaaaggaggcttgtgagcgtgcatatttcaagatggacaattgtctgattgacgatagaaggatccatgttgattttagtcagagtgtttcgaagctgtggggtcaattcagacaaagcaaaagaaatgcaaagaaagatgggtgttttaagtgtggcgcccctgatcacctagccagagactgcgatcaagacggtgagcagaaaaacaaaggcccaagttatgttctaaaagatgaaaatacacaacgtggtggaaatcaccgtagaagctatgatctagtatttgacgaagacgaagctgattgttctgaagagagagatcatgaaaatggccacagaagaaagaatcgaagaatagatgatcgaaaatcagagctaccacctcgtggtggtcgtgatagaaatagccatgagagaacacacagtgatgagaaaggaagcaagcatgggaaagatgataggaaccgaggggatcggaaacatgatgactaccacagttacagtagatccggtgacagaagctctggtagaaacgatgatcgtgattatagcaagcgccacgacagaagcagaagtggggaggaagagaagggctacagacgaagggataagtctgatgatagtaaacatagaagagaagacggagggcaccatgtgagaaaccagcagtctgatgataggtcctacaaggagagaaggcacagagatggtagataagaaagtttctgcacgactcggttttcttgcctgctttccactgatgtctctataagctggtattcttagctcaacttttttttttgtaagtcaatgtaactgcctggaatatgttgaattgttgtagtgtccagatctgaatctttttttgtgtgtttacagtttttgctggataatttattgcaatcaaaaaattgctgacttagactgtttgcgcttattctattgtaaggattggcatgggcccataaataattctattgtaag

SEQ ID NO: 211318 - DNA, 236 bp, Zea Mays
caagaaacccggccgccgaaggagatgaccgaacccctctccaatggcgccgtctaccagtcggtgcctgagtcctacgtgctcccggagcaccagaggcctaggagctcgccgccgtcttccgcggcggcgatacctgtagttgacctcggcggcgatgatcccgacaggacggcggaacagatcgtcgccgcggggaaagagttcggtttctttcagaagaaacgaaaccttgg

SEQ ID NO: 211319 - DNA, 3768 bp, Zea Mays
gccggacaggcatgagggtgtgtgcttacgacctcactgccaagcggggcccacctgcagatccaaccctccccgcaacggctagttccggcccccgcagccgttgggacaaaaggcaaacaaaaccagagtccagagggagcggagctctcccaccaaaccaccgttctaaacgctcccctagtcccctgctcagcttctccagagatcgccaaagaagcagcatcggcagtaagctctgcggcgatggggtacacgtacactccgacatactactcgggcctgcaggacaccatcgcgtcgctctgcaagtccatcctgccctccttccgcgtgggccggcggctcaccgccgaccaggccgccgcgcggcgccacgccgagcagctcaagtggcagcaggagtccttccaccgcatcctccacctcgccgcgctccaccgcgagggcatcgctccggcctccgacgttgccgccttccgcggaaccatgctcgcggcgctcgtcgcgccgccgcagcacctcgagcagcccgctgtgctccgggacaagctcctcttcctccaggagctcctctacgccaagtgcgtctccgcggcggagtacaacgcgtccaaggcgcccctcgtgcagcggctcgccgcgttcggcgtcatcgtcgactgccccgacgcggaggtctcggccgaggagtggtcggagatcgacctccgtgacccgcctcctcccgccactgcggcggcctccgacaagccgaagcacaaggccttcgtcacgccatggaagagcagatccaagaaggaccaggacgtgaacagcagcgcatcaaggccgccgctggcccctgtggaccataacaacgccaccaacgcgccagtcttcatgaccgagagctcgccgtcggaaacggttccctccgggaaggccgagaaagggaagaggaggcatctggcagggatgttccacagcggcggcagtggcaccgagaacaaggagcctgcgggggaggaaggggtcgtcgagaaagagacggtgagaggtaagaagaagagctcgtgggggttcgatggcatcaagaagtggacgaaagccggtgcctgtaacagtggcgaggcggcagccaccggtgagcagccgcagcatgttcctccgcgctcatcttacagcgagtgccagctggaggcgagccccatggctgcttctggaccggatgccaagagggccaagacgaggctgcactcggacacggacaatgactctgcttccgagctgctgcgtgacaaggttctggtggagaacacaaagaaagagctctcaaggattcaggctgagctatcatctacaaatcggaacttgaacttctcgaatcagcagatggaggccatctcaacaaagcttccggtggacaagtctgacctcaagtcctacttcccaaaggcatggtgtgatcagcacggggatggcgtgatcaccgcggctaaggaagggttcaagcagcacgtcgaagagatggagaagcagagggacatcactggcagtgagggctgggctacctttgaggacatcgaccttgatgacaacttcaacccgagggccttctctcgccaccagccggactctgcgtttgctgatgtgctagagacaaatttatcttctatgcaatccgcgtcaacacgaggcaggcagcggtcatgcgacgtcactaagcaggtcccggtagctgacacgtgggccccggttccgtggcgctgtggcccacggcgacgccttgctcgcagttcgctccacgacatggcggcctcggtgctgcaggccgagcgccacctgctcctgctcggcagcggccgcaaccgtcccctcctccgcatgctcccgccacgcgtgctcttcccgcaccggcgccgcagctggccccgggccgtgagggtgtcacccggcgacggcgagggcgcgggagggttcgcgagcgccgtggagaagcgctcgataccggggatagttgaggaggaagggtatggagcgaggggagaggagttggaaggggacgtggccggggctttggagcagaggtggcctccgtgggatgggttggccgagcggtacaagctcatcggcgccacctccctcgccttcgtcatctgcaacatggacaaggttaacttgagtgtcgcaattattccaatgtcacatcaatatggttggaactcatcaactgctggcttagttcagtcctcattcttttggggttatgcattgagtcaactaccaggaggatggctggcaaaattgtttggcggaaggaaagtgcttgaggtcggtgttgtgacatggtctttggccactgctataattcctgttgtagcaggttttatgccagggcttgtactatcgaggattctggtaggtattggagaaggtgtttcaccatcagctgctacagatttaattgctaggtccattccttggcaagaacgatcaagagcagttgctgttgtttttggtgggttgagctttggcagtgtcttaggactcctgtttgcccctcccatcattcagaactttggctgggagtctgtcttttacatatttggccttcttgggattgtttggtgcttaggatttgaatctcttatagtgcaacggttcggtgacaaaaaaagcctattaagatgtgccttggggggcatttttcaaaagcaaggcggtctgggcaatgatatatgcacacttttgtggaagttgggggcattatacttgtttgtcttggctaccaacattctttagcgaggagctgaacctgaacttgacagaagcagcatgggtgtcagtccttcctcctttgggttcaatgatcattacatctattgcagcaccttttgcagacaacttgatatcaaatggagttgacaccacgaaggtgcgaaaaatttgccaaacaattgcctttgtgtcacctgcgactttcatgatgctttcctctgtggatcttggactgcctccctgggaaattgttgcttttcttacaagtggtgtagcactctccagcttcgcattgtcagggctttattgcacacatcaagacatctctagtgaatatgcaagcattctcctgggaatcacaaacactgtaggcgcggtgccaggaattgtaggcgttgcactcacaggctttcttcttgattcaactcattcttggagtatatcactctttgcgccttctatcttcttttacttaactggtactgttgtatggttggcatttgcaagcagtaagccccaggatttttccaagtcaggacctgagtctgagccgtgaatcgtgatgtatggtactcctctgcacataaggatcgtttcacaaggaaaattcgttttgagtttagacaaaagaatggagttctagggcagagaatagatgttatgttcctcttcagtcagtagcagacaagaggaagccactgataaggggacaatgcttgcgtgtatatagtataatgatgataggctttttttctggttagttttcacattttgatatggttttgatttttgaatgtgtgcagtcaggtccgcggtccgccagtttgtagtatcctgttggtttcgggtgtcttggttgttgagtgagatttagaatgtgctgatacttcgtttcagtgcttgtactttagattcgacctgttacgaaaaaaatgaagagtacccactgaattttaaattacaagtcattttaaattttctaaatgtatagattttgctatgttgtct

SEQ ID NO: 211320 - DNA, 4354 bp, Zea Mays
ctctcccaccaaaccaccgttctaaacgctcccctagtcccctgctcagcttctccagagatcgccaaagaagcagcatcggcagtaagctctgcggcgatggggtacacgtacactccgacatactactcgggcctgcaggacaccatcgcgtcgctctgcaagtccatcctgccctccttccgcgtgggccggcggctcaccgccgaccaggccgccgcgcggcgccacgccgagcagctcaagtggcagcaggagtccttccaccgcatcctccacctcgccgcgctccaccgcgagggcatcgctccggcctccgacgttgccgccttccgcggaaccatgctcgcggcgctcgtcgcgccgccgcagcacctcgagcagcccgctgtgctccgggacaagctcctcttcctccaggagctcctctacgccaagtgcgtctccgcggcggagtacaacgcgtccaaggcgcccctcgtgcagcggctcgccgcgttcggcgtcatcgtcgactgccccgacgcggaggtctcggccgaggagtggtcggagatcgacctccgtgacccgcctcctcccgccactgcggcggcctccgacaagccgaagcacaaggccttcgtcacgccatggaagagcagatccaagaaggaccaggacgtgaacagcagcgcatcaaggccgccgctggcccctgtggaccataacaacgccaccaacgcgccagtcttcatgaccgagagctcgccgtcggaaacggttccctccgggaaggccgagaaagggaagaggaggcatctggcagggatgttccacagcggcggcagtggcaccgagaacaaggagcctgcgggggaggaaggggtcgtcgagaaagagacggtgagaggtaagaagaagagctcgtgggggttcgatggcatcaagaagtggacgaaagccggtgcctgtaacagtggcgaggcggcagccaccggtgagcagccgcagcatgttcctccgcgctcatcttacagcgagtgccagctggaggcgagccccatggctgcttctggaccggatgccaagagggccaagacgaggctgcactcggacacggacaatgactctgcttccgagctgctgcgtgacaaggttctggtggagaacacaaagaaagagctctcaaggattcaggctgagctatcatctacaaatcggaacttgaacttctcgaatcagcagatggaggccatctcaacaaagcttccggtggacaagtctgacctcaagtcctacttcccaaaggcatggtgtgatcagcacggggatggcgtgatcaccgcggctaaggaagggttcaagcagcacgtcgaagagatggagaagcagagggacatcactggcagtgagggctgggctacctttgaggacatcgaccttgatgacaacttcaacccgagggccttctctcgccaccagccggactctgcgtttgctgatgtgctagagacaaatttatcttctatgcaatccgcgtcaacacgaggcaggcagcggtcatgcgacgtcactaagcaggtcccggtagctgacacgtgggccccggttccgtggcgctgtggcccacggcgacgccttgctcgcagttcgctccacgacatggcggcctcggtgctgcaggccgagcgccacctgctcctgctcggcagcggccgcaaccgtcccctcctccgcatgctcccgccacgcgtgctcttcccgcaccggcgccgcagctggccccgggccgtgagggtgtcacccggcgacggcgagggcgcgggagggttcgcgagcgccgtggagaagcgctcgataccggggatagttgaggaggaagggtatggagcgaggggagaggagttggaaggggacgtggccggggctttggagcagaggtggcctccgtgggatgggttggccgagcggtacaagctcatcggcgccacctccctcgccttcgtcatctgcaacatggacaaggttaacttgagtgtcgcaattattccaatgtcacatcaatatggttggaactcatcaactgctggcttagttcagtcctcattcttttggggttatgcattgagtcaactaccaggaggatggctggcaaaattgtttggcggaaggaaagtgcttgaggtcggtgttgtgacatggtctttggccactgctataattcctgttgtagcaggttttatgccagggcttgtactatcgaggattctggtattggagaaggtgtttcaccatcagctgctacagatttaattgctaggtccattccttggcaagaacgatcaagagcagttgctgttgtttttggtgggttgagctttggcagtgtcttagggtatgttgtattaagatatatggtcatttttatcgaaattaattaaatattccttaattgaaaaaatatacatggtccccactattttcatgatcctttgagcaacaatttacatacttccatgtatgtgctagcatgtaaaatgctgaattcaactaaattggattttcccccatctttgtatggctctaaacggtagcttacatactttctttagtaattgatggtaatgctgttttgtcctttaagtacaaagctttattcctgctcgaacttgttatgtatttggatgtaaacatagaagaatgcagtggaagttatttagaaggataaaatactaaatctattttttatgaactgcttgagactgttctgctggttttatttgtttcattcttcaaggcacatggatgaagagcaattttggcatccctagtatgatggaaaacttggttgttttctgcatcatcgcaaatcttgataactgcgcaagagtcaaggcctccttaacgatcagatgttaactttttttcttgttatcagaacaacattgctctacatttgtctgtatgactttgcagcttgaagtaatagcagaagctttgctacagttaatgttttatccgttttattacattgcagactcctgtttgcccctcccatcattcagaactttggctgggagtctgtcttttacatatttggccttcttgggattgtttggtgcttaggatttgaatctcttatagtgcaacggttcggtgacaaaaaaagcctattaaatcttggacaaagttctactggatctgatggtcttatctcatatgctatgtcttcggaatcatcacactcgtcattggaagatctgcaaaattcactaaaggatgtgccttggggggcatttttcaaaagcaaggcggtctgggcaatgatatatgcacacttttgtggaagttgggggcattatacttgtttgtcttggctaccaacattctttagcgaggagctgaacctgaacttgacagaagcagcatgggtgtcagtccttcctcctttgggttcaatgatcattacatctattgcagcaccttttgcagacaacttgatatcaaatggagttgacaccacgaaggtgcgaaaaatttgccaaacaattgcctttgtgtcacctgcgactttcatgatgctttcctctgtggatcttggactgcctccctgggaaattgttgcttttcttacaagtggtgtagcactctccagcttcgcattgtcagggctttattgcacacatcaagacatctctagtgaatatgcaagcattctcctgggaatcacaaacactgtaggcgcggtgccaggaattgtaggcgttgcactcacaggctttcttcttgattcaactcattcttggagtgtacgacatcaatccatcttcataatctatattgcattttatgaatcactctgatcaccataatgtaagccccaggatttttccaagtcaggacctgagtctgagccgtgaatcgtgatgtatggtactcctctgcacataaggatcgtttcacaaggaaaattcgttttgagtttagacaaaagaatggagttctagggcagagaatagatgttatgttcctcttcagtcagtagcagacaagaggaagccactgataaggggacaatgcttgcgtgtatatagtataatgatgataggctttttttctggttagttttcacattttgatatggttttgatttttgaatgtgtgcagtcaggtccgcggtccgccagtttgtagtatcctgttggtttcgggtgtcttggttgttgagtgagatttagaatgtgctgatacttcgtttcagtgcttgtactttagattcgacctgttacgaaaaaaatgaagagtacccactgaattttaaattacaagtcattttaaattttctaaatgtatagattttgctatgttgtct

SEQ ID NO: 211321 - DNA, 3689 bp, Zea Mays
ctctcccaccaaaccaccgttctaaacgctcccctagtcccctgctcagcttctccagagatcgccaaagaagcagcatcggcagtaagctctgcggcgatggggtacacgtacactccgacatactactcgggcctgcaggacaccatcgcgtcgctctgcaagtccatcctgccctccttccgcgtgggccggcggctcaccgccgaccaggccgccgcgcggcgccacgccgagcagctcaagtggcagcaggagtccttccaccgcatcctccacctcgccgcgctccaccgcgagggcatcgctccggcctccgacgttgccgccttccgcggaaccatgctcgcggcgctcgtcgcgccgccgcagcacctcgagcagcccgctgtgctccgggacaagctcctcttcctccaggagctcctctacgccaagtgcgtctccgcggcggagtacaacgcgtccaaggcgcccctcgtgcagcggctcgccgcgttcggcgtcatcgtcgactgccccgacgcggaggtctcggccgaggagtggtcggagatcgacctccgtgacccgcctcctcccgccactgcggcggcctccgacaagccgaagcacaaggccttcgtcacgccatggaagagcagatccaagaaggaccaggacgtgaacagcagcgcatcaaggccgccgctggcccctgtggaccataacaacgccaccaacgcgccagtcttcatgaccgagagctcgccgtcggaaacggttccctccgggaaggccgagaaagggaagaggaggcatctggcagggatgttccacagcggcggcagtggcaccgagaacaaggagcctgcgggggaggaaggggtcgtcgagaaagagacggtgagaggtaagaagaagagctcgtgggggttcgatggcatcaagaagtggacgaaagccggtgcctgtaacagtggcgaggcggcagccaccggtgagcagccgcagcatgttcctccgcgctcatcttacagcgagtgccagctggaggcgagccccatggctgcttctggaccggatgccaagagggccaagacgaggctgcactcggacacggacaatgactctgcttccgagctgctgcgtgacaaggttctggtggagaacacaaagaaagagctctcaaggattcaggctgagctatcatctacaaatcggaacttgaacttctcgaatcagcagatggaggccatctcaacaaagcttccggtggacaagtctgacctcaagtcctacttcccaaaggcatggtgtgatcagcacggggatggcgtgatcaccgcggctaaggaagggttcaagcagcacgtcgaagagatggagaagcagagggacatcactggcagtgagggctgggctacctttgaggacatcgaccttgatgacaacttcaacccgagggccttctctcgccaccagccggactctgcgtttgctgatgtgctagagacaaatttatcttctatgcaatccgcgtcaacacgaggcaggcagcggtcatgcgacgtcactaagcaggtcccggtagctgacacgtgggccccggttccgtggcgctgtggcccacggcgacgccttgctcgcagttcgctccacgacatggcggcctcggtgctgcaggccgagcgccacctgctcctgctcggcagcggccgcaaccgtcccctcctccgcatgctcccgccacgcgtgctcttcccgcaccggcgccgcagctggccccgggccgtgagggtgtcacccggcgacggcgagggcgcgggagggttcgcgagcgccgtggagaagcgctcgataccggggatagttgaggaggaagggtatggagcgaggggagaggagttggaaggggacgtggccggggctttggagcagaggtggcctccgtgggatgggttggccgagcggtacaagctcatcggcgccacctccctcgccttcgtcatctgcaacatggacaaggttaacttgagtgtcgcaattattccaatgtcacatcaatatggttggaactcatcaactgctggcttagttcagtcctcattcttttggggttatgcattgagtcaactaccaggaggatggctggcaaaattgtttggcggaaggaaagtgcttgaggtcggtgttgtgacatggtctttggccactgctataattcctgttgtagcaggttttatgccagggcttgtactatcgaggattctggtaggtattggagaaggtgtttcaccatcagctgctacagatttaattgctaggtccattccttggcaagaacgatcaagagcagttgctgttgtttttggtgggttgagctttggcagtgtcttaggactcctgtttgcccctcccatcattcagaactttggctgggagtctgtcttttacatatttggccttcttgggattgtttggtgcttaggatttgaatctcttatagtgcaacggttcggtgacaaaaaaagcctattaaatcttggacaaagttctactggatctgatggtcttatctcatatgctatgtcttcggaatcatcacactcgtcattggaagatctgcaaaattcactaaaggcggtctgggcaatgatatatgcacacttttgtggaagttgggggcattatacttgtttgtcttggctaccaacattctttagcgaggagctgaacctgaacttgacagaagcagcatgggtgtcagtccttcctcctttgggttcaatgatcattacatctattgcagcaccttttgcagacaacttgatatcaaatggagttgacaccacgaaggtgcgaaaaatttgccaaacaattgcctttgtgtcacctgcgactttcatgatgctttcctctgtggatcttggactgcctccctgggaaattgttgcttttcttacaagtggtgtagcactctccagcttcgcattgtcagggctttattgcacacatcaagacatctctagtgaatatgcaagcattctcctgggaatcacaaacactgtaggcgcggtgccaggaattgtaggcgttgcactcacaggctttcttcttgattcaactcattcttggagtatatcactctttgcgccttctatcttcttttacttaactggtactgttgtatggttggcatttgcaagcagtaagccccaggatttttccaagtcaggacctgagtctgagccgtgaatcgtgatgtatggtactcctctgcacataaggatcgtttcacaaggaaaattcgttttgagtttagacaaaagaatggagttctagggcagagaatagatgttatgttcctcttcagtcagtagcagacaagaggaagccactgataaggggacaatgcttgcgtgtatatagtataatgatgataggctttttttctggttagttttcacattttgatatggttttgatttttgaatgtgtgcagtcaggtccgcggtccgccagtttgtagtatcctgttggtttcgggtgtcttggttgttgagtgagatttagaatgtgctgatacttcgtttcagtgcttgtactttagattcgacctgttacgaaaaaaatgaagagtacccactgaattttaaattacaagtcattttaaattttctaaatgtatagattttgctatgttgtct

SEQ ID NO: 211322 - DNA, 3718 bp, Zea Mays
ctctcccaccaaaccaccgttctaaacgctcccctagtcccctgctcagcttctccagagatcgccaaagaagcagcatcggcagtaagctctgcggcgatggggtacacgtacactccgacatactactcgggcctgcaggacaccatcgcgtcgctctgcaagtccatcctgccctccttccgcgtgggccggcggctcaccgccgaccaggccgccgcgcggcgccacgccgagcagctcaagtggcagcaggagtccttccaccgcatcctccacctcgccgcgctccaccgcgagggcatcgctccggcctccgacgttgccgccttccgcggaaccatgctcgcggcgctcgtcgcgccgccgcagcacctcgagcagcccgctgtgctccgggacaagctcctcttcctccaggagctcctctacgccaagtgcgtctccgcggcggagtacaacgcgtccaaggcgcccctcgtgcagcggctcgccgcgttcggcgtcatcgtcgactgccccgacgcggaggtctcggccgaggagtggtcggagatcgacctccgtgacccgcctcctcccgccactgcggcggcctccgacaagccgaagcacaaggccttcgtcacgccatggaagagcagatccaagaaggaccaggacgtgaacagcagcgcatcaaggccgccgctggcccctgtggaccataacaacgccaccaacgcgccagtcttcatgaccgagagctcgccgtcggaaacggttccctccgggaaggccgagaaagggaagaggaggcatctggcagggatgttccacagcggcggcagtggcaccgagaacaaggagcctgcgggggaggaaggggtcgtcgagaaagagacggtgagaggtaagaagaagagctcgtgggggttcgatggcatcaagaagtggacgaaagccggtgcctgtaacagtggcgaggcggcagccaccggtgagcagccgcagcatgttcctccgcgctcatcttacagcgagtgccagctggaggcgagccccatggctgcttctggaccggatgccaagagggccaagacgaggctgcactcggacacggacaatgactctgcttccgagctgctgcgtgacaaggttctggtggagaacacaaagaaagagctctcaaggattcaggctgagctatcatctacaaatcggaacttgaacttctcgaatcagcagatggaggccatctcaacaaagcttccggtggacaagtctgacctcaagtcctacttcccaaaggcatggtgtgatcagcacggggatggcgtgatcaccgcggctaaggaagggttcaagcagcacgtcgaagagatggagaagcagagggacatcactggcagtgagggctgggctacctttgaggacatcgaccttgatgacaacttcaacccgagggccttctctcgccaccagccggactctgcgtttgctgatgtgctagagacaaatttatcttctatgcaatccgcgtcaacacgaggcaggcagcggtcatgcgacgtcactaagcaggtcccggtagctgacacgtgggccccggttccgtggcgctgtggcccacggcgacgccttgctcgcagttcgctccacgacatggcggcctcggtgctgcaggccgagcgccacctgctcctgctcggcagcggccgcaaccgtcccctcctccgcatgctcccgccacgcgtgctcttcccgcaccggcgccgcagctggccccgggccgtgagggtgtcacccggcgacggcgagggcgcgggagggttcgcgagcgccgtggagaagcgctcgataccggggatagttgaggaggaagggtatggagcgaggggagaggagttggaaggggacgtggccggggctttggagcagaggtggcctccgtgggatgggttggccgagcggtacaagctcatcggcgccacctccctcgccttcgtcatctgcaacatggacaaggttaacttgagtgtcgcaattattccaatgtcacatcaatatggttggaactcatcaactgctggcttagttcagtcctcattcttttggggttatgcattgagtcaactaccaggaggatggctggcaaaattgtttggcggaaggaaagtgcttgaggtcggtgttgtgacatggtctttggccactgctataattcctgttgtagcaggttttatgccagggcttgtactatcgaggattctggtattggagaaggtgtttcaccatcagctgctacagatttaattgctaggtccattccttggcaagaacgatcaagagcagttgctgttgtttttggtgggttgagctttggcagtgtcttaggactcctgtttgcccctcccatcattcagaactttggctgggagtctgtcttttacatatttggccttcttgggattgtttggtgcttaggatttgaatctcttatagtgcaacggttcggtgacaaaaaaagcctattaaatcttggacaaagttctactggatctgatggtcttatctcatatgctatgtcttcggaatcatcacactcgtcattggaagatctgcaaaattcactaaaggatgtgccttggggggcatttttcaaaagcaaggcggtctgggcaatgatatatgcacacttttgtggaagttgggggcattatacttgtttgtcttggctaccaacattctttagcgaggagctgaacctgaacttgacagaagcagcatgggtgtcagtccttcctcctttgggttcaatgatcattacatctattgcagcaccttttgcagacaacttgatatcaaatggagttgacaccacgaaggtgcgaaaaatttgccaaacaattgcctttgtgtcacctgcgactttcatgatgctttcctctgtggatcttggactgcctccctgggaaattgttgcttttcttacaagtggtgtagcactctccagcttcgcattgtcagggctttattgcacacatcaagacatctctagtgaatatgcaagcattctcctgggaatcacaaacactgtaggcgcggtgccaggaattgtaggcgttgcactcacaggctttcttcttgattcaactcattcttggagtatatcactctttgcgccttctatcttcttttacttaactggtactgttgtatggttggcatttgcaagcagtaagccccaggatttttccaagtcaggacctgagtctgagccgtgaatcgtgatgtatggtactcctctgcacataaggatcgtttcacaaggaaaattcgttttgagtttagacaaaagaatggagttctagggcagagaatagatgttatgttcctcttcagtcagtagcagacaagaggaagccactgataaggggacaatgcttgcgtgtatatagtataatgatgataggctttttttctggttagttttcacattttgatatggttttgatttttgaatgtgtgcagtcaggtccgcggtccgccagtttgtagtatcctgttggtttcgggtgtcttggttgttgagtgagatttagaatgtgctgatacttcgtttcagtgcttgtactttagattcgacctgttacgaaaaaaatgaagagtacccactgaattttaaattacaagtcattttaaattttctaaatgtatagattttgctatgttgtct

SEQ ID NO: 211323 - DNA, 3794 bp, Zea Mays
ctctcccaccaaaccaccgttctaaacgctcccctagtcccctgctcagcttctccagagatcgccaaagaagcagcatcggcagtaagctctgcggcgatggggtacacgtacactccgacatactactcgggcctgcaggacaccatcgcgtcgctctgcaagtccatcctgccctccttccgcgtgggccggcggctcaccgccgaccaggccgccgcgcggcgccacgccgagcagctcaagtggcagcaggagtccttccaccgcatcctccacctcgccgcgctccaccgcgagggcatcgctccggcctccgacgttgccgccttccgcggaaccatgctcgcggcgctcgtcgcgccgccgcagcacctcgagcagcccgctgtgctccgggacaagctcctcttcctccaggagctcctctacgccaagtgcgtctccgcggcggagtacaacgcgtccaaggcgcccctcgtgcagcggctcgccgcgttcggcgtcatcgtcgactgccccgacgcggaggtctcggccgaggagtggtcggagatcgacctccgtgacccgcctcctcccgccactgcggcggcctccgacaagccgaagcacaaggccttcgtcacgccatggaagagcagatccaagaaggaccaggacgtgaacagcagcgcatcaaggccgccgctggcccctgtggaccataacaacgccaccaacgcgccagtcttcatgaccgagagctcgccgtcggaaacggttccctccgggaaggccgagaaagggaagaggaggcatctggcagggatgttccacagcggcggcagtggcaccgagaacaaggagcctgcgggggaggaaggggtcgtcgagaaagagacggtgagaggtaagaagaagagctcgtgggggttcgatggcatcaagaagtggacgaaagccggtgcctgtaacagtggcgaggcggcagccaccggtgagcagccgcagcatgttcctccgcgctcatcttacagcgagtgccagctggaggcgagccccatggctgcttctggaccggatgccaagagggccaagacgaggctgcactcggacacggacaatgactctgcttccgagctgctgcgtgacaaggttctggtggagaacacaaagaaagagctctcaaggattcaggctgagctatcatctacaaatcggaacttgaacttctcgaatcagcagatggaggccatctcaacaaagcttccggtggacaagtctgacctcaagtcctacttcccaaaggcatggtgtgatcagcacggggatggcgtgatcaccgcggctaaggaagggttcaagcagcacgtcgaagagatggagaagcagagggacatcactggcagtgagggctgggctacctttgaggacatcgaccttgatgacaacttcaacccgagggccttctctcgccaccagccggactctgcgtttgctgatgtgctagagacaaatttatcttctatgcaatccgcgtcaacacgaggcaggcagcggtcatgcgacgtcactaagcaggtcccggtagctgacacgtgggccccggttccgtggcgctgtggcccacggcgacgccttgctcgcagttcgctccacgacatggcggcctcggtgctgcaggccgagcgccacctgctcctgctcggcagcggccgcaaccgtcccctcctccgcatgctcccgccacgcgtgctcttcccgcaccggcgccgcagctggccccgggccgtgagggtgtcacccggcgacggcgagggcgcgggagggttcgcgagcgccgtggagaagcgctcgataccggggatagttgaggaggaagggtatggagcgaggggagaggagttggaaggggacgtggccggggctttggagcagaggtggcctccgtgggatgggttggccgagcggtacaagctcatcggcgccacctccctcgccttcgtcatctgcaacatggacaaggttaacttgagtgtcgcaattattccaatgtcacatcaatatggttggaactcatcaactgctggcttagttcagtcctcattcttttggggttatgcattgagtcaactaccaggaggatggctggcaaaattgtttggcggaaggaaagtgcttgaggtcggtgttgtgacatggtctttggccactgctataattcctgttgtagcaggttttatgccagggcttgtactatcgaggattctggtattggagaaggtgtttcaccatcagctgctacagatttaattgctaggtccattccttggcaagaacgatcaagagcagttgctgttgtttttggtgggttgagctttggcagtgtcttaggactcctgtttgcccctcccatcattcagaactttggctgggagtctgtcttttacatatttggccttcttgggattgtttggtgcttaggatttgaatctcttatagtgcaacggttcggtgacaaaaaaagcctattaaatcttggacaaagttctactggatctgatggtcttatctcatatgctatgtcttcggaatcatcacactcgtcattggaagatctgcaaaattcactaaaggatgtgccttggggggcatttttcaaaagcaaggcggtctgggcaatgatatatgcacacttttgtggaagttgggggcattatacttgtttgtcttggctaccaacattctttagcgaggagctgaacctgaacttgacagaagcagcatgggtgtcagtccttcctcctttgggttcaatgatcattacatctattgcagcaccttttgcagacaacttgatatcaaatggagttgacaccacgaaggtgcgaaaaatttgccaaacaattgcctttgtgtcacctgcgactttcatgatgctttcctctgtggatcttggactgcctccctgggaaattgttgcttttcttacaagtggtgtagcactctccagcttcgcattgtcaggtcatgttgttaagattgcaaccaagtttccatttttacacggttctgaggtccaaacctaaatattttcgttggtaaacagggctttattgcacacatcaagacatctctagtgaatatgcaagcattctcctgggaatcacaaacactgtaggcgcggtgccaggaattgtaggcgttgcactcacaggctttcttcttgattcaactcattcttggagtgtacgacatcaatccatcttcataatctatattgcattttatgaatcactctgatcaccataatgtaagccccaggatttttccaagtcaggacctgagtctgagccgtgaatcgtgatgtatggtactcctctgcacataaggatcgtttcacaaggaaaattcgttttgagtttagacaaaagaatggagttctagggcagagaatagatgttatgttcctcttcagtcagtagcagacaagaggaagccactgataaggggacaatgcttgcgtgtatatagtataatgatgataggctttttttctggttagttttcacattttgatatggttttgatttttgaatgtgtgcagtcaggtccgcggtccgccagtttgtagtatcctgttggtttcgggtgtcttggttgttgagtgagatttagaatgtgctgatacttcgtttcagtgcttgtactttagattcgacctgttacgaaaaaaatgaagagtacccactgaattttaaattacaagtcattttaaattttctaaatgtatagattttgctatgttgtct

SEQ ID NO: 211324 - DNA, 1462 bp, Zea Mays
atctcgatttccaaggcagatttcctttctaccttccgcctcatggagatgcaatgcaacggcaatttgcgccattttattagaaattgcggtggcgcaattaaatatatcgcggctgcccctgtcgcccccgcccgtccgcctccttcgtcagctggcagctgctataataaggaaggaagaagataacggagggcaaggaaactcgctcccactctactcctatccactgcggcctggacgcgtgcgagagacttgaccaagcagcagcagcagggatggcgcctctgaagctgtacgggatgccgctgtcccccaacgtggtgcgcgtggccaccgtgctcaacgagaagggcctcgacttcgagatcgtccccgtcgacctcaccaccggcgcccacaagcagcccgacttcctcgccctcaaccctttcggccagatcccggctctcgtcgacggagacgaagtcctcttcgagtcccgtgcgatcaaccggtacatcgccagcaagtacgcgtcggagggcacggacctgctccccgcgacggcgtcggcggcgaagctggaggtgtggctagaggtggagtcgcaccacttctacccgaacgcctcgccaaggtgctcgacgtgtacgaggcgcacctcgcccgcaacaagtacctcgccggggacgagttcacgctcgccgacgccaaccacgcgtcctacctgctctacctcagcaagacccccaaggccgggctcgtcgccgcccgcccccacgtcaaggcctggtgggaggccatcgtcgcccgccccgcgttccagaagaccgtcgccgccatccccttgcccccgccgccctcctcctcggcttgacctcgccttgcgttgcgccgttgcctgggtcgcggatgcgtcggagccccgagtcgaataaaagaggcagcatcctgtcttgcatttgctgctgcgccatgtgttaacagcctgtgtaataaacactgttgctttcgtgtgtgttcattgccttttggttggtctttgcatatcctactagtgctgatctttttgtgaagcttggattggatggacgcgttttcttcaccgtaattcccttcttcctgagcgacgtgactgttgattcgaacaacaacaaaattttcggcccacaaccgcaaggcccgttcctacgactcacctgttgggtttgggttacagttaaggccttcctcttggatgaatttatatcccatatctaattctatggtgggattaaatccatcatttaattcatgtatctctcaaaactagttattttttgatccatacattctaatttaaactcgtgcaatatccttataaagatttgttctatacctaataacctatggataaaatccatgtctttcataatttaaaaaatttctaaacccttaggttataatctacgatgaatttaaccgaataagaataaaaaaa

SEQ ID NO: 211325 - DNA, 4552 bp, Zea Mays
caggcgcaggcacagcgcattgcccccctccttgtccagcgcccccaaccacaaggagtcaaggaacaggtcggggtccagccatccgaccccttgaatccgcttgccctcctgcttgatcccgccgccaccatctcaaccgcccactccttcctctccctatagggttccctgccgctcctgcgaatcgagcaatcggagacccccgggccgccctccaatgcgagttcctctccttccccctactcaactttccccttttcggctcgattcactacaatctcatgggaattttgccgcaccgccctctcccttcctctccaatgttgttaataatattggacccgtgcgtgcgtgcgtgtatccccgtaggccgtagcagagcacaatccggtggtatttaggactgatatagatttctgccgatagatttaaagttggatggttgatttgttagaatcgggcaaggacgaccatgagcgacgatggcgaccgaacctgcccgctctgtgccgaggagatggacactactgaccagcagctcaagccatgcaaatgcggctatgatatttgtgtttggtgctggcaccacatcatagacatggctgagaaggaggaaacagtgggccgctgccctgcatgccgcacatgctatgacaaggacaggatcgtcaagatggctgccacttgtgacaggacggtggcagataaaaatgtagagaagaagcacaagacccaaaaggttaagccaaaggcagcacccacagcagcagcaacatcaaccgtagaatcaaagaagcatctggctagtgtcagggttatccagagaaatctggtgtatataattgggctacctgcacatttatgcaacgagagtgtgcttgagtgtagggagtactttggtcaatatgggaaagttttgaaggtttcagtttcccgtccgactgggcctccctctcagcaggcatcagcaaccagcaatattagtgtgtatattacttatgcgaaagaagaggaggccatccggtgtattcaggctgtacacaattttgtcttggaagggaaagtgttaagggcatgtttcggtactacgaagtattgccatgcatggctgcgaaacatggcatgtgggaatccagattgtctctatttgcatgatgtaggcagtcaggaggatagttttactaaagatgagatcatctcagcatatacaaggactagagtcccccagatggcatctagtgtttcgcaaagacgtacaggcactgtgttacctcctccaggagatgatttctctcacagtgcggtggtttcagccaagcatacattcaagaatggaacacttaataccaccagtcagcccagactttcacctccaaacagtagttctgggaggtccacgcttccaccagctgcatcatgggggcagcgtgatttgaatgccaggataacagctactggagcgacatcatcacaatctcatacaaaaccaaaatcagaatcacagagtaatccattttcaagttcttcagcaatttccagtacaaaaacaccctcttcatggaatgatgatacaagtacagcagcaaaaatgcctgaaggacagcaagtgtcagaaaaagagtctaaaaccttgcagccgtataagcctggtatttcaaaggaaacacaagctctatcgtcactggagtcatcactggacatagacttctcaacaataccttcagcttggaatgatgatgacattgtagtatcagatgggatgccaaaaggaagcgatgaaaatcaagttccaaataaaaatggtgagctaacccatccagcatctaagtcactggttttatctaagaaagacatagaaatgaacattaccagcaaaaatccttcagattttttatcaagtctagcaatatctaaattagatgtaagtactagtgatggtgaccactcagataccaatattactcctaaaagccttacttcaaatgctgtagaatgccaatcttgtcatgctgctggggagaaaatgttggaggatattggatccaaggacatcgacatggagaagatatcttctcagatatcttcagtaacattaggtggcaacgataagattcagagtatggcaggaaatcagcaaccagatgtaatgccatgcacatctattgatgtgcccatggatcagaattttggcagagaccgatctcatctcaatcttaacgagcttttattgccttcagaaaataaggatagtagtctttcttgtcaatatagttctgataagcgtcttgcttggagtttgaagatgcaaaattgtagcgttactcctttaaatgatacaatagactctgcaatgctcactgacaaaccttatagtatactgctggaaggttcagagaaaccatcatatccaccatttgttgaatttcctagtacatgggatacctcattgtggaatgatacaaaaaataacgctgcatcgacgattgacactataacttcttcacagatgcagacagggttttcttcaatcgataacacttatgccttgctaaatggaggtcaagatgggctaggtactgtatatacacatgataatgtttctgtatatacacgtggacgtggtaatgtttctggacatcctggaatgggaagtcatcagcatagagcaatgggttcagtaagaactgatagtataggaagttttgacaagaccataagcgtaaataaggatgagagcagaataatttctgatacgttgtcagagtttaatccatgggatgattcatattcgactgctaacaattttgttaggatgcttagggaatctgaaaataatgatgttcagtgcactgcgccttcatggaaatcaggaaccgggagcaaacagtccagattttcatttgctagacaggataaccaaggaaacttgttggattcatctctcagaaactgtggtattggtactgagcagaatttcagtttgctaccccagaattctcgaagaaatatttaccagaatggtcttgcattccaatctctagagaatgaattttcaaatagtaactttcctggtctattagatatggcaactactggtacatcaatgtctaaaatatctgctcccccaggattttcagcaccaacaagagtaccccctcctggattttctactgcatttccatcccaggatagtttgaaccccactcctgggtttccttctgggattttgtctcatgatgggtctatccccctttctagattcccttcattttcttctggagtttcagctcaggaagtgtctaagctccctactagactgccttctccattttcttctagattttcatcacaggatggtcctgatcccccttctagattccctttttcttctgggttcacatcacaggatgggtctaatcagttgtatggctcaacaaacccagaaaatcttctcgggggtactgttctgggtgtcgacggtaatcattatcaatctcagtttggaaggcactcaagtgacatggagtttgatgatcctgctatattagctgtgggcaaagggctgatgcctggaattggcgattcagggctggagatgaaaaatactcgtgcttcacagttgcaaccagcaagtagtgatccaagatttcagctacatgtacagccaaatgtgcagtctcatcaaaacatgagattcacagaccctgtgcaagatggtttgaaccatatgaatgataattacctggcatccagatttttagctcagaaccatggtcctctatctccttatgtgcagattccgcaacaacccagaaactcgcaggttacaaatggtcactgggacgggtggagtgaatcgagacaagggaataacattcctatgtcagacatgtccaggatattatatccaagtgaagtgaacaagttgcacatgctgggttcaaacgatatccataacagagcctttggaatgtgattgtctcctgggataatgtgtgactttgagctgacatattcgcttggggcgttttgtggaagtaactggttgcacaaaacatagtatacctgaggtggttaatggtgttgtgcttatgagctggcacacaatatttattgctattggagttgaccaaaatgaaccttagttttggtccagccagttgaaattaccaggttcattctcgtctatgatttgtgacgcttgaatgaaaagaacgagaagaacaaggcagctgaagttgaaatagatatagagatatgtctatcatgggatttggggcgacctgtgagtgaaagaagcttaggtgtggcagtttgtttttcttgtgtctgtacatgatgatattggtcggtggttgtagtataatttggtgatcggcggtggctgtattaacttgtagtggttgctcttgctccctcttgcttgtttatgttaattaagggaattgaggtgaaggtctagtgttacccatagcataataatatacgatacataactggtttctttgctagcattacttcatttgtttcaacaacagcaaaaaagaaa

SEQ ID NO: 211326 - DNA, 4153 bp, Zea Mays
caggcgcaggcacagcgcattgcccccctccttgtccagcgcccccaaccacaaggagtcaaggaacaggacgaccatgagcgacgatggcgaccgaacctgcccgctctgtgccgaggagatggacactactgaccagcagctcaagccatgcaaatgcggctatgatatttgtgtttggtgctggcaccacatcatagacatggctgagaaggaggaaacagtgggccgctgccctgcatgccgcacatgctatgacaaggacaggatcgtcaagatggctgccacttgtgacaggacggtggcagataaaaatgtagagaagaagcacaagacccaaaaggttaagccaaaggcagcacccacagcagcagcaacatcaaccgtagaatcaaagaagcatctggctagtgtcagggttatccagagaaatctggtgtatataattgggctacctgcacatttatgcaacgagagtgtgcttgagtgtagggagtactttggtcaatatgggaaagttttgaaggtttcagtttcccgtccgactgggcctccctctcagcaggcatcagcaaccagcaatattagtgtgtatattacttatgcgaaagaagaggaggccatccggtgtattcaggctgtacacaattttgtcttggaagggaaagtgttaagggcatgtttcggtactacgaagtattgccatgcatggctgcgaaacatggcatgtgggaatccagattgtctctatttgcatgatgtaggcagtcaggaggatagttttactaaagatgagatcatctcagcatatacaaggactagagtcccccagatggcatctagtgtttcgcaaagacgtacaggcactgtgttacctcctccaggagatgatttctctcacagtgcggtggtttcagccaagcatacattcaagaatggaacacttaataccaccagtcagcccagactttcacctccaaacagtagttctgggaggtccacgcttccaccagctgcatcatgggggcagcgtgatttgaatgccaggataacagctactggagcgacatcatcacaatctcatacaaaaccaaaatcagaatcacagagtaatccattttcaagttcttcagcaatttccagtacaaaaacaccctcttcatggaatgatgatacaagtacagcagcaaaaatgcctgaaggacagcaagtgtcagaaaaagagtctaaaaccttgcagccgtataagcctggtatttcaaaggaaacacaagctctatcgtcactggagtcatcactggacatagacttctcaacaataccttcagcttggaatgatgatgacattgtagtatcagatgggatgccaaaaggaagcgatgaaaatcaagttccaaataaaaatggtgagctaacccatccagcatctaagtcactggttttatctaagaaagacatagaaatgaacattaccagcaaaaatccttcagattttttatcaagtctagcaatatctaaattagatgtaagtactagtgatggtgaccactcagataccaatattactcctaaaagccttacttcaaatgctgtagaatgccaatcttgtcatgctgctggggagaaaatgttggaggatattggatccaaggacatcgacatggagaagatatcttctcagatatcttcagtaacattaggtggcaacgataagattcagagtatggcaggaaatcagcaaccagatgtaatgccatgcacatctattgatgtgcccatggatcagaattttggcagagaccgatctcatctcaatcttaacgagcttttattgccttcagaaaataaggatagtagtctttcttgtcaatatagttctgataagcgtcttgcttggagtttgaagatgcaaaattgtagcgttactcctttaaatgatacaatagactctgcaatgctcactgacaaaccttatagtatactgctggaaggttcagagaaaccatcatatccaccatttgttgaatttcctagtacatgggatacctcattgtggaatgatacaaaaaataacgctgcatcgacgattgacactataacttcttcacagatgcagacagggttttcttcaatcgataacacttatgccttgctaaatggaggtcaagatgggctaggtactgtatatacacatgataatgtttctgtatatacacgtggacgtggtaatgtttctggacatcctggaatgggaagtcatcagcatagagcaatgggttcagtaagaactgatagtataggaagttttgacaagaccataagcgtaaataaggatgagagcagaataatttctgatacgttgtcagagtttaatccatgggatgattcatattcgactgctaacaattttgttaggatgcttagggaatctgaaaataatgatgttcagtgcactgcgccttcatggaaatcaggaaccgggagcaaacagtccagattttcatttgctagacaggataaccaaggaaacttgttggattcatctctcagaaactgtggtattggtactgagcagaatttcagtttgctaccccagaattctcgaagaaatatttaccagaatggtcttgcattccaatctctagagaatgaattttcaaatagtaactttcctggtctattagatatggcaactactggtacatcaatgtctaaaatatctgctcccccaggattttcagcaccaacaagagtaccccctcctggattttctactgcatttccatcccaggatagtttgaaccccactcctgggtttccttctgggattttgtctcatgatgggtctatccccctttctagattcccttcattttcttctggagtttcagctcaggaagtgtctaagctccctactagactgccttctccattttcttctagattttcatcacaggatggtcctgatcccccttctagattccctttttcttctgggttcacatcacaggatgggtctaatcagttgtatggctcaacaaacccagaaaatcttctcgggggtactgttctgggtgtcgacggtaatcattatcaatctcagtttggaaggcactcaagtgacatggagtttgatgatcctgctatattagctgtgggcaaagggctgatgcctggaattggcgattcagggctggagatgaaaaatactcgtgcttcacagttgcaaccagcaagtagtgatccaagatttcagctacatgtacagccaaatgtgcagtctcatcaaaacatgagattcacagaccctgtgcaagatggtttgaaccatatgaatgataattacctggcatccagatttttagctcagaaccatggtcctctatctccttatgtgcagattccgcaacaacccagaaactcgcaggttacaaatggtcactgggacgggtggagtgaatcgagacaagggaataacattcctatgtcagacatgtccaggatattatatccaagtgaagtgaacaagttgcacatgctgggttcaaacgatatccataacagagcctttggaatgtgattgtctcctgggataatgtgtgactttgagctgacatattcgcttggggcgttttgtggaagtaactggttgcacaaaacatagtatacctgaggtggttaatggtgttgtgcttatgagctggcacacaatatttattgctattggagttgaccaaaatgaaccttagttttggtccagccagttgaaattaccaggttcattctcgtctatgatttgtgacgcttgaatgaaaagaacgagaagaacaaggcagctgaagttgaaatagatatagagatatgtctatcatgggatttggggcgacctgtgagtgaaagaagcttaggtgtggcagtttgtttttcttgtgtctgtacatgatgatattggtcggtggttgtagtataatttggtgatcggcggtggctgtattaacttgtagtggttgctcttgctccctcttgcttgtttatgttaattaagggaattgaggtgaaggtctagtgttacccatagcataataatatacgatacataactggtttctttgctagcattacttcatttgtttcaacaacagcaaaaaagaaa

SEQ ID NO: 211327 - DNA, 1295 bp, Zea Mays
gccggttctctctcctcccatccagtcttacccctgctatttgtacccgccttaccgcgccccctaaccctaggccctcaattccactctgcccgagcaagccgaattgtcgtccgaattcgctcgcggggagcacttgctacctcgcgcccgccttctgtcgcgcggattcgttgctgcgcctggagatggacccgatggacatcgtcggcaagtccaaggaggacgtctccctccccaaatagttcatcaatctcctttcgtctgaatcgaatgaagtgtgcagcagagaagagaaaaaaacgattgctcctgagcatgttatcaaggctctaagtgatcttggcttcagagagtacattgaggaggtttatgctgcatatgaacagcacaaacttgatactttggattctccaaaagctggcaaattcactgggattgagatgacagaggaagaagctgttgctgagcaacaaaggatgtttgctgaggctcgagcaaggatgaataatggagcccccaaaccaaaggagacagaacaagagccgccacagcaaccacaagcacaaccccaacttcagctgcatactgaaccacagcaacccgtgcaatctcaagtgcagttgcattcgccaacacagcattccctccaacctcaagtgcagctgcacccccagccacaacagctcccacaagtgcaggtgcactctcagacgcagctgcaccctcagccacagcagccccaagtgcaggtccatccgcagctgcagcaactcccacaattacaggcccactcgcagccaccgcaaccccaagtgcaaatccacccacagccgcagcagcccccacaagtgcagttgcagtcatcagtccagcagacctcccaaccccaacctcaggtacatctctacaatcacagggggggctcacaagcgcagctgcagccccaactgccaggtcagctgcagacacaggggcaaaccggacctggcattgacagttagagactactgctggcatatactaggaacctgtatgcttgcttgtgactcgttagatcctgatttaggtttctgtgcttcctgtacaatgtaaatccagtgtgattgcagttgccttgttgctaataatgtgaaaccgttagttactgatgatgtccttactgtgtcgaatactgaatgtcatggcgtggcttatgtgccatgctgaatgatgttctgtggtcattgtaatagcctaacttgacatctgtccatgatgatagtgattgatttgaatgagctcttggtgcatat

SEQ ID NO: 211328 - DNA, 1371 bp, Zea Mays
gccggttctctctcctcccatccagtcttacccctgctatttgtacccgccttaccgcgccccctaaccctaggccctcaattccactctgcccgagcaagccgaattgtcgtccgaattcgctcgcggggagcacttgctacctcgcgcccgccttctgtcgcgcggattcgttgctgcgcctggagatggacccgatggacatcgtcggcaagtccaaggaggacgtctccctccccaaatataattaaggagatgcttcctcctgatgtacgagtggcaagagatgcacaggatcttcttgttgaatgctgtgtagagttcatcaatctcctttcgtctgaatcgaatgaagtgtgcagcagagaagagaaaaaaacgattgctcctgagcatgttatcaaggctctaagtgatcttggcttcagagagtacattgaggaggtttatgctgcatatgaacagcacaaacttgatactttggattctccaaaagctggcaaattcactgggattgagatgacagaggaagaagctgttgctgagcaacaaaggatgtttgctgaggctcgagcaaggatgaataatggagcccccaaaccaaaggagacagaacaagagccgccacagcaaccacaagcacaaccccaacttcagctgcatactgaaccacagcaacccgtgcaatctcaagtgcagttgcattcgccaacacagcattccctccaacctcaagtgcagctgcacccccagccacaacagctcccacaagtgcaggtgcactctcagacgcagctgcaccctcagccacagcagccccaagtgcaggtccatccgcagctgcagcaactcccacaattacaggcccactcgcagccaccgcaaccccaagtgcaaatccacccacagccgcagcagcccccacaagtgcagttgcagtcatcagtccagcagacctcccaaccccaacctcaggtacatctctacaatcacagggggggctcacaagcgcagctgcagccccaactgccaggtcagctgcagacacaggggcaaaccggacctggcattgacagttagagactactgctggcatatactaggaacctgtatgcttgcttgtgactcgttagatcctgatttaggtttctgtgcttcctgtacaatgtaaatccagtgtgattgcagttgccttgttgctaataatgtgaaaccgttagttactgatgatgtccttactgtgtcgaatactgaatgtcatggcgtggcttatgtgccatgctgaatgatgttctgtggtcattgtaatagcctaacttgacatctgtccatgatgatagtgattgatttgaatgagctcttggtgcatat

SEQ ID NO: 211329 - DNA, 5511 bp, Zea Mays
cagggagggtacagacggaggccatgaccacatagcagaacacggggagagagaccggccgggggccgggcccgtgacccgtgaggacgagggcagcatcaccggagacggagacggagagcgtcggtgggcgcggccgacccaggaggaaattttcactgcgctattgactcctgtggtgttgggcctcactgggcctggcgagctacgaagcaagagcgtcggtgagagttgttcgttttagctgcgcgacagggcgttaaccccaagaggcccagcgcctcgccgccaccaagcgcagggccgctacctccttgccgtcagatcctccgcccgccgccgctcttctctctgttggggtgcggtgaagactccttgctactcgtgtcgcaagtgtattatcgcgaaattgttgtctgggacaacaagaatgccataaggaaccacagataatcgtgcggtggttaactggttatggataatgacaatggcgatgtggatgacctgggttcagggtggtttgaagtgaaaaagaaacatcggtccagctcaaaatacacattgcagaggtcttcaggtggttccagccataaaattccaaacttactatcacggtcaggtgctaacagtgacagttcaaggtggcatgacaaactgcaacacccatctccgagcataaatgctaatgttggtgttgatgggtctggtagtggagagacaacaaatgttcatggtgaagggtgcaatgatgtaagcaccagccccagtggcctgaatagtggcttaaatgcttcagcctcagaggatagagtagaaagacttgaagaactggcggtggctgaaaaaacaagtgaatctcccgaaaatgatctggctgatcatgcagatccttcactgcctcatgaaccatccacctgttcaggcagtcctgcaaaatgcgcagatctttctcagcatgtaaaatgttctccaaaaacagagtctgtaggtgttttgtccattactcctgtcaagtttggagactttgatgaagttccaggtctatcattaccttcagattcatacagagacaataatacttctagaggccacagacatactgaagatgttgcacatttaaaaaatgtgcaaaaagatgcaagtgaactcaaaccggagacagacacttgtactacaattgatgaggcatctccaattatggtacaaggaacagagacacccaatcatgatagtggtttgatagcctcagttgattctgttaccctatcctgctccaaaaatgatcatgaagttccagttacatcttcatctgttcctgttgcttccatggaaggtagaacgttacttcatgacgaagcaccagcttctgcagattttggatctgaaactgctgagagcaaagaaagattcaggcagaggctatggtgttttctttttgagaatctgaatagggctgttgatgaactttacctcctctgtgaactagaatgtgacatggaacagattaatgaatccatacttgtccttgaagaagctatttctgattttcaagaacttaaatccagagcagagcattttgataataccaaaaaatctcctggtgtaccaaaggagggcatgccaatggctgtgaaagctgaccataggagacctcatgccttgtcttgggaggtcagaagaatgacaagttctccacacaggcaagaaatactgtcttcatctctagaggccttccagagaatccaattggaactggcatgcaagcaggctggtatagcagcagaaagatttacatccagctcttctgaaaaagttttgggtagttcatcaaagctgactacagcatcggcaactgttaggaatataagtttgaaagttgagagtcaggtgaaacttcctgataccagcgtgaaaaagattgctggcgagaagctaagtagggatgcattcaagtctggtaagtcgtatccacaaagtatgccttcatattctgcaaggagtagaagagggtcattagaaccaatctctgaaatagagaaacacacctttaagaaggacagggagttgctagaaaacaaatttgacaggctcaagtcaaccgatgttgttaaaaagactacagctcatcttgaaaaggaaaagcaaattacagcaccttggaagtccatggatgcctggaaggagaaaagaaactgggaagatatactgaaatctcctgtacggagttctcgtgtttctcactctccaggtgttggaagaaaagttacagaccgcgctcgtgttctacatgacaagttgatgtctcctgaaaagaaaaaaagaagtgctttggatatgaaaaaagaagcagaagaaaagcatgcgcgtgcactgcgaattaggagtcaactagagagcgagagggttcagaggctacaacgtacctctgaaaagttgcatcgtgtcaatgagtggcaggctgtacgcagctcaaaactgagagaagtaatgaatgcacgtcatcaacgtggtgaatctcgtcacgaagcatatcttgctcaggttgcaaaaagagctggtgatgagagtactaaggtcaatgaggtccgttttataacatcactgaatgaagaaaacaagaaattcttgctgaggcagaaacttcatgattctgagatgcggagagctgaaaagctacaggtgatcaaaacaaagcaaaaggaggacactgcaagggaagaagctgttttggagcgaaggaagttccttgaagctgagaagatgcaacgccttgctgaaatacagcgcaagaaagaagaagctattttcagaagagaagaggagcgcaaagcatctagtgctgcacgggaagcaagggctgcagaacaacaacgtcgaaaagagataagagcaaaagcgcaacaagaggaagctgaacttttagcccaaaagttagctgaaaaacttcgtgaaagtgagcagcggcgcaagtattacctagaacaaatacgagagcgagcctcaatggatcttagggatcagccttcaccttttcagcgtcgctttccaagtaaagattgccaaaaccgttctagttctgctaacagcggagaagattcacagacaactggcaattccagtgctgcagattctatggttaagtcatcgaataatgcacagataaaacgaaggattaaaaagattcgccagagattaatggctctaaagcatgaatttattgaaccatccataggtgaaagtacaggaatcacgcacaggtctggtcttggagctgccaaagctaagctaagtagatggcttcaagaccttcagagacttcgtcaagctagaaaagaaggtgctgccagtattggattgattgtcagtgacatagcgaagtatttagaagggaaggatcttgagctgcatgcatcaagacaagttggtttgcttgactttattgcgtctgcattacctgcgtcacatacttcaaagcctggagcttgtcaagtcactgtctaccttttgcgcctgttgagagtgttgctctcacttccagctaatcgaacttattttctagtacaaaatcttttacccccaattattcccatgctatcagcatcactggagaattatattaaggtggcagcatccaactctggaagttcaaatcttttgtctaataaaacatcagctgagactacagagtcatcgggtgaagtgttagatggatttttatggactgtggccatgatcgttggccatgtacacatcaatggtgaacaacttcaaatgcagggaggtttgatagaactgattgtagcttatcaaataattcatcgtctgcgagatctgtttgcactttatgataggccacaggtggaaggatccccactcccatcatctatactgtttggcctcaaccttttgtccgtattaacatccaaaccgggaaatttctctactatcgattgggagtcctgcaaatgcaggacactaggtggaaatatagtgcaagaatatgaatatcttagttcacaggacagtttggggtgtcaatcaatgacacttgatcagtttggtgatgccaaatcgccaaccatatacagtgaactggctgaagatagcaaatcctgtaaacaacatgacttgagcattcctgtggacagaaaattggttgatgaagctagtaaagacttgttagtgatggctgctggcctgaacaactcagcaatgcaaccatctgatttgggcattactacagagaagcattctggaaatcctagccagggagatgaaaataacacagtggacagttttcttgaaggaagaaagacgaataatgtatgtgcattgtatagtagttcaggaaaaggcaatgagatgaaccttaagcagcctgcaatgctcttactttctgcactggctgagactggccttgttactctaccatcacttttgactgctgtgttgctccaggcaaacaacaacaggtcatcatcagagcagacattggcgattcttccatcaaattttgaagaagtagccactggtgtattgaaagttttgaataatatggcacgtttggatataacccttttgcagcacatgctgcttccttttgagtcattgcatgaacaaatggagagtgccaaacgatcaggttggtttgctgcttctagagtctctgctacttcttggctacttttctttgttccatgctgggaaccaagctgttcttcggtggggaaagagtcccactatacttcacaaggtgtgcgacctgccatttgttttcttcagcgaccccgagttgatgcccatcttggctgctgctctgatcgctgtttgctacggttgcgatcagaacctaagcgttgtacagcaggaaataagcacggatatgctgcgctgcttgctcaagtcctgccaaacttcaggatcaaattctccagattccattgctgtggatggttctggaaacaattccactgaaagcattctggatatcaggaactcacagggtgacatcccaacaaggtcaagccgcaaaattggacggccagttattgggaagggtgtttcagggggtatcagattcaacagaaataaggttcagaaggatggtaggggaacaagagcaattgacgatgggcctctgaagcaaagagctcaagaagctgcatcgaacttcatgttgcatagaaagatcccagcttcttttttggacagagccgaggagttcttctgcagtgagacatgaaatcggccctgtggttcgcctaacttgtatggcacgagctactgaatttactgttttgcaaggatggtgtttcctgacctgatattttgatcgaatctgtagtctacagattaaaaaaatgagtcatgtacggaaacgaatgcactgtttgtacagaaacacagaagaaaaaactgataagagaatctgatttcgtatgaaagaaaggaactgtccataatttacttagtctttattaattttgaaaatgctacatgttctgtagcttg

SEQ ID NO: 211330 - DNA, 5715 bp, Zea Mays
ctctactcccaggccccagccccagaggacacagggagggtacagacggaggccatgaccacatagcagaacacggggagagagaccggccgggggccgggcccgtgacccgtgaggacgagggcagcatcaccggagacggagacggagagcgtcggtgggcgcggccgacccaggaggaaattttcactgcgctattgactcctgtggtgttgggcctcactgggcctggcgagctacgaagcaagagcgtcggtgagagttgttcgttttagctgcgcgacagggcgttaaccccaagaggcccagcgcctcgccgccaccaagcgcagggccgctacctccttgccgtcagatcctccgcccgccgccgctcttctctctgttggggtgcggtgaagactccttgctactcgtgtcgcaagtgtattatcgcgaaattgttgtctgggacaacaagaatgccataaggaaccacagataatcgtgcggtggttaactggttatggataatgacaatggcgatgtggatgacctgggttcagggtggtttgaagtgaaaaagaaacatcggtccagctcaaaatacacattgcagaggtcttcaggtggttccagccataaaattccaaacttactatcacggtcaggtgctaacagtgacagttcaaggtggcatgacaaactgcaacacccatctccgagcataaatgctaatgttggtgttgatgggtctggtagtggagagacaacaaatgttcatggtgaagggtgcaatgatgtaagcaccagccccagtggcctgaatagtggcttaaatgcttcagcctcagaggatagagtagaaagacttgaagaactggcggtggctgaaaaaacaagtgaatctcccgaaaatgatctggctgatcatgcagatccttcactgcctcatgaaccatccacctgttcaggcagtcctgcaaaatgcgcagatctttctcagcatgtaaaatgttctccaaaaacagagtctgtaggtgttttgtccattactcctgtcaagtttggagactttgatgaagttccaggtctatcattaccttcagattcatacagagacaataatacttctagaggccacagacatactgaagatgttgcacatttaaaaaatgtgcaaaaagatgcaagtgaactcaaaccggagacagacacttgtactacaattgatgaggcatctccaattatggtacaaggaacagagacacccaatcatgatagtggtttgatagcctcagttgattctgttaccctatcctgctccaaaaatgatcatgaagttccagttacatcttcatctgttcctgttgcttccatggaaggtagaacgttacttcatgacgaagcaccagcttctgcagattttggatctgaaactgctgagagcaaagaaagattcaggcagaggctatggtgttttctttttgagaatctgaatagggctgttgatgaactttacctcctctgtgaactagaatgtgacatggaacagattaatgaatccatacttgtccttgaagaagctatttctgattttcaagaacttaaatccagagcagagcattttgataataccaaaaaatctcctggtgtaccaaaggagggcatgccaatggctgtgaaagctgaccataggagacctcatgccttgtcttgggaggtcagaagaatgacaagttctccacacaggcaagaaatactgtcttcatctctagaggccttccagagaatccaattggaactggcatgcaagcaggctggtatagcagcagaaagatttacatccagctcttctgaaaaagttttgggtagttcatcaaagctgactacagcatcggcaactgttaggaatataagtttgaaagttgagagtcaggtgaaacttcctgataccagcgtgaaaaagattgctggcgagaagctaagtagggatgcattcaagtctggtaagtcgtatccacaaagtatgccttcatattctgcaaggagtagaagagggtcattagaaccaatctctgaaatagagaaacacacctttaagaaggacagggagttgctagaaaacaaatttgacaggctcaagtcaaccgatgttgttaaaaagactacagctcatcttgaaaaggaaaagcaaattacagcaccttggaagtccatggatgcctggaaggagaaaagaaactgggaagatatactgaaatctcctgtacggagttctcgtgtttctcactctccaggtgttggaagaaaagttacagaccgcgctcgtgttctacatgacaagttgatgtctcctgaaaagaaaaaaagaagtgctttggatatgaaaaaagaagcagaagaaaagcatgcgcgtgcactgcgaattaggagtcaactagagagcgagagggttcagaggctacaacgtacctctgaaaagttgcatcgtgtcaatgagtggcaggctgtacgcagctcaaaactgagagaagtaatgaatgcacgtcatcaacgtggtgaatctcgtcacgaagcatatcttgctcaggttgcaaaaagagctggtgatgagagtactaaggtcaatgaggtccgttttataacatcactgaatgaagaaaacaagaaattcttgctgaggcagaaacttcatgattctgagatgcggagagctgaaaagctacaggtgatcaaaacaaagcaaaaggaggacactgcaagggaagaagctgttttggagcgaaggaagttccttgaagctgagaagatgcaacgccttgctgaaatacagcgcaagaaagaagaagctattttcagaagagaagaggagcgcaaagcatctagtgctgcacgggaagcaagggctgcagaacaacaacgtcgaaaagagataagagcaaaagcgcaacaagaggaagctgaacttttagcccaaaagttagctgaaaaacttcgtgaaagtgagcagcggcgcaagtattacctagaacaaatacgagagcgagcctcaatggatcttagggatcagccttcaccttttcagcgtcgctttccaagtaaagattgccaaaaccgttctagttctgctaacagcggagaagattcacagacaactggcaattccagtgctgcagattctatggttaagtcatcgaataatgcacagataaaacgaaggattaaaaagattcgccagagattaatggctctaaagcatgaatttattgaaccatccataggtgaaagtacaggaatcacgcacaggtctggtcttggagctgccaaagctaagctaagtagatggcttcaagaccttcagagacttcgtcaagctagaaaagaaggtgctgccagtattggattgattgtcagtgacatagcgaagtatttagaagggaaggatcttgagctgcatgcatcaagacaagttggtttgcttgactttattgcgtctgcattacctgcgtcacatacttcaaagcctggagcttgtcaagtcactgtctaccttttgcgcctgttgagagtgttgctctcacttccagctaatcgaacttattttctagtacaaaatcttttacccccaattattcccatgctatcagcatcactggagaattatattaaggtggcagcatccaactctggaagttcaaatcttttgtctaataaaacatcagctgagactacagagtcatcgggtgaagtgttagatggatttttatggactgtggccatgatcgttggccatgtacacatcaatggtgaacaacttcaaatgcagggaggtttgatagaactgattgtagcttatcaaataattcatcgtctgcgagatctgtttgcactttatgataggccacaggtggaaggatccccactcccatcatctatactgtttggcctcaaccttttgtccgtattaacatccaaaccgggaaatttctctactatcgattgggagtcctgcaaatgcaggacactaggtggaaatatagtgcaagaatatgaatatcttagttcacaggacagtttggggtgtcaatcaatgacacttgatcagtttggtgatgccaaatcgccaaccatatacagtgaactggctgaagatagcaaatcctgtaaacaacatgacttgagcattcctgtggacagaaaattggttgatgaagctagtaaagacttgttagtgatggctgctggcctgaacaactcagcaatgcaaccatctgatttgggcattactacagagaagcattctggaaatcctagccagggagatgaaaataacacagtggacagttttcttgaaggaagaaagacgaataatgtatgtgcattgtatagtagttcaggaaaaggcaatgagatgaaccttaagcagcctgcaatgctcttactttctgcactggctgagactggccttgttactctaccatcacttttgactgctgtgttgctccaggcaaacaacaacaggtcatcatcagagcagacattggcgattcttccatcaaattttgaagaagtagccactggtgtattgaaagttttgaataatatggcacgtttggatataacccttttgcagcacatgctgtctagatcagatctaaagatggagttcttccatttaatcagcttccttttgagtcattgcatgaacaaatggagagtgccaaacgatcaggaagttgatgacttggggagttggggtactggatcatgttatagtttctgccaggcttgaccatttgtgacccttttggatattattaccaagaaatttggacatactgccattttacacctgaatctcatggttggtttgctgcttctagagtctctgctacttcttggctacttttctttgttccatgctgggaaccaagctgttcttcggtggggaaagagtcccactatacttcacaaggtgtgcgacctgccatttgttttcttcagcgaccccgagttgatgcccatcttggctgctgctctgatcgctgtttgctacggttgcgatcagaacctaagcgttgtacagcaggaaataagcacggatatgctgcgctgcttgctcaagtcctgccaaacttcaggatcaaattctccagattccattgctgtggatggttctggaaacaattccactgaaagcattctggatatcaggaactcacagggtgacatcccaacaaggtcaagccgcaaaattggacggccagttattgggaagggtgtttcagggggtatcagattcaacagaaataaggttcagaaggatggtaggggaacaagagcaattgacgatgggcctctgaagcaaagagctcaagaagctgcatcgaacttcatgttgcatagaaagatcccagcttcttttttggacagagccgaggagttcttctgcagtgagacatgaaatcggccctgtggttcgcctaacttgtatggcacgagctactgaatttactgttttgcaaggatggtgtttcctgacctgatattttgatcgaatctgtagtctacagattaaaaaaatgagtcatgtacggaaacgaatgcactgtttgtacagaaacacagaagaaaaaactgataagagaatctgatttcgtatgaaagaaaggaactgtccataatttacttagtctttattaattttgaaaatgctacatgttctgtagcttg

SEQ ID NO: 211331 - DNA, 5878 bp, Zea Mays
gtgaattttcttttctaaggtcgcatttatacccaagccgtttatgccgacgcaatctgcgaaattggcacttcaatttgcaatttcatagaaaacacagtatttgaaataaaaaataattgtacattacgaaaatattcatcacggtgaatctgataaatattaatttaaatataccaaccgatcaggtaatgatttatagaacaaactaaaggcgatgcagtgcagaacgcgctaacatgcaattattattatattaattgcagcaattagaagcaccactcctcccccactcctctactcccaggccccagccccagaggacacagggagggtacagacggaggccatgaccacatagcagaacacggggagagagaccggccgggggccgggcccgtgacccgtgaggacgagggcagcatcaccggagacggagacggagagcgtcggtgggcgcggccgacccaggaggaaattttcactgcgctattgactcctgtggtgttgggcctcactgggcctggcgagctacgaagcaagagcgtcggtgagagttgttcgttttagctgcgcgacagggcgttaaccccaagaggcccagcgcctcgccgccaccaagcgcagggccgctacctccttgccgtcagatcctccgcccgccgccgctcttctctctgttggggtgcggtgaagactccttgctactcgtgtcgcaagtgtattatcgcgaaattgttgtctgggacaacaagaatgccataaggaaccacagataatcgtgcggtggttaactggttatggataatgacaatggcgatgtggatgacctgggttcagggtggtttgaagtgaaaaagaaacatcggtccagctcaaaatacacattgcagaggtcttcaggtggttccagccataaaattccaaacttactatcacggtcaggtgctaacagtgacagttcaaggtggcatgacaaactgcaacacccatctccgagcataaatgctaatgttggtgttgatgggtctggtagtggagagacaacaaatgttcatggtgaagggtgcaatgatgtaagcaccagccccagtggcctgaatagtggcttaaatgcttcagcctcagaggatagagtagaaagacttgaagaactggcggtggctgaaaaaacaagtgaatctcccgaaaatgatctggctgatcatgcagatccttcactgcctcatgaaccatccacctgttcaggcagtcctgcaaaatgcgcagatctttctcagcatgtaaaatgttctccaaaaacagagtctgtaggtgttttgtccattactcctgtcaagtttggagactttgatgaagttccaggtctatcattaccttcagattcatacagagacaataatacttctagaggccacagacatactgaagatgttgcacatttaaaaaatgtgcaaaaagatgcaagtgaactcaaaccggagacagacacttgtactacaattgatgaggcatctccaattatggtacaaggaacagagacacccaatcatgatagtggtttgatagcctcagttgattctgttaccctatcctgctccaaaaatgatcatgaagttccagttacatcttcatctgttcctgttgcttccatggaaggtagaacgttacttcatgacgaagcaccagcttctgcagattttggatctgaaactgctgagagcaaagaaagattcaggcagaggctatggtgttttctttttgagaatctgaatagggctgttgatgaactttacctcctctgtgaactagaatgtgacatggaacagattaatgaatccatacttgtccttgaagaagctatttctgattttcaagaacttaaatccagagcagagcattttgataataccaaaaaatctcctggtgtaccaaaggagggcatgccaatggctgtgaaagctgaccataggagacctcatgccttgtcttgggaggtcagaagaatgacaagttctccacacaggcaagaaatactgtcttcatctctagaggccttccagagaatccaattggaactggcatgcaagcaggctggtatagcagcagaaagatttacatccagctcttctgaaaaagttttgggtagttcatcaaagctgactacagcatcggcaactgttaggaatataagtttgaaagttgagagtcaggtgaaacttcctgataccagcgtgaaaaagattgctggcgagaagctaagtagggatgcattcaagtctggtaagtcgtatccacaaagtatgccttcatattctgcaaggagtagaagagggtcattagaaccaatctctgaaatagagaaacacacctttaagaaggacagggagttgctagaaaacaaatttgacaggctcaagtcaaccgatgttgttaaaaagactacagctcatcttgaaaaggaaaagcaaattacagcaccttggaagtccatggatgcctggaaggagaaaagaaactgggaagatatactgaaatctcctgtacggagttctcgtgtttctcactctccaggtgttggaagaaaagttacagaccgcgctcgtgttctacatgacaagttgatgtctcctgaaaagaaaaaaagaagtgctttggatatgaaaaaagaagcagaagaaaagcatgcgcgtgcactgcgaattaggagtcaactagagagcgagagggttcagaggctacaacgtacctctgaaaagttgcatcgtgtcaatgagtggcaggctgtacgcagctcaaaactgagagaagtaatgaatgcacgtcatcaacgtggtgaatctcgtcacgaagcatatcttgctcaggttgcaaaaagagctggtgatgagagtactaaggtcaatgaggtccgttttataacatcactgaatgaagaaaacaagaaattcttgctgaggcagaaacttcatgattctgagatgcggagagctgaaaagctacaggtgatcaaaacaaagcaaaaggaggacactgcaagggaagaagctgttttggagcgaaggaagttccttgaagctgagaagatgcaacgccttgctgaaatacagcgcaagaaagaagaagctattttcagaagagaagaggagcgcaaagcatctagtgctgcacgggaagcaagggctgcagaacaacaacgtcgaaaagagataagagcaaaagcgcaacaagaggaagctgaacttttagcccaaaagttagctgaaaaacttcgtgaaagtgagcagcggcgcaagtattacctagaacaaatacgagagcgagcctcaatggatcttagggatcagccttcaccttttcagcgtcgctttccaagtaaagattgccaaaaccgttctagttctgctaacagcggagaagattcacagacaactggcaattccagtgctgcagattctatggttaagtcatcgaataatgcacagataaaacgaaggattaaaaagattcgccagagattaatggctctaaagcatgaatttattgaaccatccataggtgaaagtacaggaatcacgcacaggtctggtcttggagctgccaaagctaagctaagtagatggcttcaagaccttcagagacttcgtcaagctagaaaagaaggtgctgccagtattggattgattgtcagtgacatagcgaagtatttagaagggaaggatcttgagctgcatgcatcaagacaagttggtttgcttgactttattgcgtctgcattacctgcgtcacatacttcaaagcctggagcttgtcaagtcactgtctaccttttgcgcctgttgagagtgttgctctcacttccagctaatcgaacttattttctagtacaaaatcttttacccccaattattcccatgctatcagcatcactggagaattatattaaggtggcagcatccaactctggaagttcaaatcttttgtctaataaaacatcagctgagactacagagtcatcgggtgaagtgttagatggatttttatggactgtggccatgatcgttggccatgtacacatcaatggtgaacaacttcaaatgcagggaggtttgatagaactgattgtagcttatcaaataattcatcgtctgcgagatctgtttgcactttatgataggccacaggtggaaggatccccactcccatcatctatactgtttggcctcaaccttttgtccgtattaacatccaaaccgggaaatttctctactatcgattgggagtcctgcaaatgcaggacactaggtggaaatatagtgcaagaatatgaatatcttagttcacaggacagtttggggtgtcaatcaatgacacttgatcagtttggtgatgccaaatcgccaaccatatacagtgaactggctgaagatagcaaatcctgtaaacaacatgacttgagcattcctgtggacagaaaattggttgatgaagctagtaaagacttgttagtgatggctgctggcctgaacaactcagcaatgcaaccatctgatttgggcattactacagagaagcattctggaaatcctagccagggagatgaaaataacacagtggacagttttcttgaaggaagaaagacgaataatgtatgtgcattgtatagtagttcaggaaaaggcaatgagatgaaccttaagcagcctgcaatgctcttactttctgcactggctgagactggccttgttactctaccatcacttttgactgctgtgttgctccaggcaaacaacaacaggtcatcatcagagcagacattggcgattcttccatcaaattttgaagaagtagccactggtgtattgaaagttttgaataatatggcacgtttggatataacccttttgcagcacatgctgtctagatcagatctaaagatggagttcttccatttaatcagcttccttttgagtcattgcatgaacaaatggagagtgccaaacgatcaggttggtttgctgcttctagagtctctgctacttcttggctacttttctttgttccatgctgggaaccaagctgttcttcggtggggaaagagtcccactatacttcacaaggtgtgcgacctgccatttgttttcttcagcgaccccgagttgatgcccatcttggctgctgctctgatcgctgtttgctacggttgcgatcagaacctaagcgttgtacagcaggaaataagcacggatatgctgcgctgcttgctcaagtcctgccaaacttcaggatcaaattctccagattccattgctgtggatggttctggaaacaattccactgaaagcattctggatatcaggaactcacagggtgacatcccaacaaggtcaagccgcaaaattggacggccagttattgggaagggtgtttcagggggtatcagattcaacagaaataaggttcagaaggatggtaggggaacaagagcaattgacgatgggcctctgaagcaaagagctcaagaagctgcatcgaacttcatgttgcatagaaagatcccagcttcttttttggacagagccgaggagttcttctgcagtgagacatgaaatcggccctgtggttcgcctaacttgtatggcacgagctactgaatttactgttttgcaaggatggtgtttcctgacctgatattttgatcgaatctgtagtctacagattaaaaaaatgagtcatgtacggaaacgaatgcactgtttgtacagaaacacagaagaaaaaactgataagagaatctgatttcgtatgaaagaaaggaactgtccataatttacttagtctttattaattttgaaaatgctacatgttctgtagcttg

SEQ ID NO: 211332 - DNA, 2910 bp, Zea Mays
agacatggacggatcttcgcgccctcatccagcccgcggcccgcagtcgtctgtgccttgcggaaggagcactcttcttccttagcagcagccagcgcccagcaggcaataccgtcactcggtcggctccttgccgattcccccacccccgcaagccgcggcgatggcctacgatctcccgttcactctcttcgtactcctcttcctcgtcctcctacagacgccgagctcctcatggcgaccggctgacgacgacgacgcgtcggtctcgaggtcggctttccccatggagggtgacgtcgcctgggtggtgcaggtcagcgacctccatatcagcacctacaaccctgagcgtgccgccgaactcgcgctcctcggcaccgcgctgcgcgcaatccggcctcaccttctcctcgtcaccggtgacatcaccgaatcagcaaagaactagttcaaggcaggatgaatacgaatggattacctacaagaaaactattgatgcaattgttggaagcggtggcattgataagagcaggatatttgatattagaggcaatcatgatacatatggagtgccttatagaggaggaaaattggacttcttctcaacttacagcgttaactcacagtttaagcgattaagcaccatcagtagtatattgcttcagggagatagaagctaccaatttctgggtattgatgataccatgaatgttggcattcgttttcctgcaaatctttttggccattctactgataaaaggatagaagcggtaaattcagagcttcaatactggaccaatcattccaatgttccagttaccaaagtagtttttggacatttccctatgtcattcactgcatcatctgaaaaaggacagcgatatgaaagtgtgcttgcagggcagtctatttcagcatacctatgtggtcatctccatgcaaaagttagtaagcagctttggaggtatcatgaaatcagaacaacagaagatcacaagtcaagcttttgggaatgggaacttggagactggaaggactccagattgatgaggattttagcaatagatggtggtgcagtctcattcatagaccacacattgaaacatgcactccaaacttccatcttgatcacatatccaacagattcaagaagtatgaatatgttggattcagaaaagtggtcgatgagaaatgatataaatgtccttattttctctcatcaatttataagtaatgtgagtgctagaatctttgactctcattgtgagtttaagattgtcgaggagatacctctgcagcttgttaccagtacttctgctcacagacctttgttccatgccaaatggaatgctgaaaattacagaagttcatccgccactcgctactggttgcaggtgtttgttcttgattctcatggtgtaaaaatttcaagtgagcagagaccattttcagttgagggtaagatggcaattcccacaagtccatggaccaactatctgctctttgaagtccagtgggaaggcatgtatcaagttcttctgtggagtaatttggccttcaccattgtattgttgttcatccccaaactattgtatcactttgttaggagaagttcatcatatcaaaggtgggctgtgtcaattccgtcctcctctatccagcagagaaaaccttacttttggttggtttggtttttaatggagggcacaaggagtaaacctttctggttttctatggtaacatatgtgctctggctaattgaaatgccatggttttggggccatgcaacgtctgaaaatggagaaatcgctcaaatgtacttatctggatggagcgtgccaattcatgatgggggcttgacgggcaacaaactgagcaacccagatgtgcttgtcatcacactaccgttcctctatctggtgcttgtcccagtaatagtccttacatatggtctgtttgcagaaaaggctactgtgtttttgcagcacagaagaagagtagtatactctcttgactcaacaaatgtgcatgccgagtcaccaagattgctgccagttgctccaagggcttcactaatgaaattcgccgacaagatggtgtccatggtgatccaattttgtggtagctggacaagaagggctcttctacttgcatgcttgatcaccgcagcaatacatttgaagctctgttccaaactaatgtcagcatatggaactgtaccagtagcattgtcacccccattgacatggataccattgttgctattaggtggtgctgcctattgtacagttctccatgcagattagcgctcagtactctgcaatcctgaagtgtagtacttatttgcattggaggattagggctcataactgtgaattcctgaagtgaacgtagttgcgtttcgggtgcgtgctgctgctgtgcattaaatcctggaactgtggaacatgtcacctttcgatggttaactgcatgggtgctggctaaccaaagataaagtagaaacagtttaatggttgagacttgagagtgcaaactgcagagtagaacatctggatggatggaccaaaactggtagcggtggctcgtcgttgtgtctaaccctcgccgcagcaagaggagatggaacagtggcttggacagagaggttgttgatcggatggctgtgaggggagtgatgggggtagggacgtagggtgagagggaaaccatggcggctaggtattttttgtgctgagtaggctgttgtgtttgtgtacaggggatattttcccaagtggaccactctattggtgtgtgggcctctcggccagaatttcggtctgcatggttattttcacgagtgggtcattttgttggtggagcgtattttggttagaaattctaacggcttcgggctagtttggt

SEQ ID NO: 211333 - DNA, 2979 bp, Zea Mays
gtccaaccatttgtggcggctgccgcaacaggctcaacgctcacgcgcacacacaatccatagccgcctcccacatctcactctcgttccgagcttccggccatggcggtgacctccggcgcccccaacgacaacggccgggacgctggcgccgctgcgactgacgatgagcaccgcgtggatctggaagttaggcacaaggacgccggcactagggactcgccagcaccgatagcggcagctgcgcctgcgtcccaatcccgagtggctggaaagcttggcccctcagatccaaagcacctcatctatgcgggatccaaattaaagcatattaaagctgcacctgctgcaccagacaagaatcgccgaccacctttgtctccaccagcacctgccgtcaatcgtggtcgtggatctgtgcgcacacctttgggattaaaaaaatgtctaccgaaagtggcagtcaatccccattatctcaagcatcacaagcaccgatgtctccatctcatgaacctgaatcgtctcgtcctgagtcagataatgactcgatgccaatttaaatagatgacaatgacaacattgaagtagaagaggaagaatacgacgctgaagctggttctaagagaaagctcacctcaactgtttggaaagagttcaagagagtgaagttcaatggcacagtccgggcaaagtgcaactattgcttcaagcaactttctgcgtcaagtaataatgggacaaaacatcttcatgttcatttaaaaagttgtgtgcaaaggaagattaagttgaacgggaagacattggcacaagcttctttgagatttggtagaacggatggtggaacagtttcaatagagaattacacatttgatcaagaaatagctagaaatgaacttgctgcgatgatagttctgcatgaataccccttaagcatggttgatcatgtgggtttccgaagatttgttggtgctcttcaaccacttttcaagatcggaaccagaaacatgataagatctgatattatgaagcattatgaggtggagaagaaaaaagccattgaatacatggctggaatccagtccagggtagcggtcaccacagatttgtggacgtctgacaaccaaaaaagaggttacatggccataacagctcactttattgatgaatcctggactcttagaaatattataatgaggtttatctatgttcctgctcctcatactgctgacgtcattggtgaagaattgtatgagtcattggttgaatggaatcttgatgagaaaatatcttctgtgactcttgacaactgcacaactaatgatgcggtaatctcttctcttgtgaggaatattggaaagcacaaacttatgaatgatggaaaattgctacatatgcgatgttctgcccatatccttaatttgatagtaaaggatggtttagaagtacttaaagatgcaattgagaacatccgtgatagtgttgcttattggacagccactccaaaaaggtttgaaaagtttgaggaaatagctaaatttgttaaagttgatatcaagacaaagataggatttgactgtaggactagatggaattcaactttcaccatgcttgccactgcagtgccttacaaggctattttcataagagcaagtcgtgtagataggcagtacacgtgtttgcccactgaggatgagtggaaatttgctaaggatgttgtggagaggcttagattgtttaatgacattactacactattttttggaactgattatgtcactgctaacgtctacttcactagaattgctaagattagaaatcagattaggttgtggtcatcatgtggcaatccgttggtagaagaaatgttagtgaatatggtagccaaatttgacaagtactggactgacattcaagggctcatgggcattgcaactattcttgaccctcgattcaaaactgcagtcctattgatatgttatgaggacttacttgttgtgtccggtagtgaatgtgaagatagagttgctaatgtgaagaacttgctagctgatttgatgaatgagtaccatataactgagaatattgagaacaatgagtcatcaacaccatcagttggaaacagtgatgacttcttatctgacattagtgcccgtattgcaagtagaaggccaacaagcatggggctcaaatctgagctagaccggtacttggatgaagaaatggtgaacatgcaaaccaaaaacttcaatgttttagattggtagaaggtagctggaactcggtttcctattttaagaaggattgcaagagacatatatgttatccctgttacaactgttgcttcagaagctgctttcagcactagtggtagagtacttagtgagcatcgcagtaggcttacttcaaagatgttggaggctctcatgtgctctcaagattggcttaggaacaaatacaaagttgatgagaaaactaaacaacctgccaccttttggtcctgtctccaagacatgcaagagggcctccagggaacttgcactttgacattttcatttcaaggatttaggtggcgttaatcttttggctgttgacatgtagtgaacaagtcaagtacaagtagcaattgacaagatcacaagaaccttttggctctcatgaacacttgatatggatcttttggttctcatgtttttactcaatggtgaacttgtaatgaacttgtaacagatgtgcttttgggagcggtttgcacatctgttgatgcgcacctatgttgtaagcacattgtatgtgttaatttggaaatttggatgtttaatgtggtgaactagtggcgccatgctaggggtggtggacactaactggatattaatctagctgtgaacatctgatgtctgatgtgatcaatggtgttatgatttgtgaaacacttaacattgaccactctatcagtcttattgttgatgtttctta

SEQ ID NO: 211334 - DNA, 2306 bp, Zea Mays
ctaacgctgtccaaccatttgtggcggctgccgcaacaggctcaacgctcacgcgcacacacaatccatagccgcctcccacatctcactctcgttccgagcttccggccatggcggtgacctccggcgcccccaacgacaacggccgggacgctggcgccgctgcgactgacgatgagcaccgcgtggatctggaagttaggcacaaggacgccggcactagggactcgccagcaccgatagcggcagctgcgcctgcgtcccaatcccgagtggctggaaagcttggcccctcagatccaaagcacctcatctatgcgggatccaaattaaagcatattaaagctgcacctgctgcaccagacaagaatcgccgaccacctttgtctccaccagcacctgccgtcaatcgtggtcgtggatctgtgcgcacacctttgggattaaaaaaatgtctaccgaaagtggcagtcaatccccattatctcaagcatcacaagcaccgatgtctccatctcatgaacctgaatcgtctcgtcctgagtcagataatgactcgatgccaatttaaatagatgacaatgacaacattgaagtagaagaggaagaatacgacgctgaagctggttctaagagaaagctcacctcaactgtttggaaagagttcaagagagtgaagttcaatggcacagtccgggcaaagtgcaactattgcttcaagcaactttctgcgtcaagtaataatgggacaaaacatcttcatgttcatttaaaaagttgtgtgcaaaggaagattaagttgaacgggaagacattggcacaagcttctttgagatttggtagaacggatggtggaacagtttcaatagagaattacacatttgatcaagaaatagctagaaatgaacttgctgcgatgatagttctgcatgaataccccttaagcatggttgatcatgtgggtttccgaagatttgttggtgctcttcaaccacttttcaagatcggaaccagaaacatgataagatctgatattatgaagcattatgaggtggagaagaaaaaagccattgaatacatggctggaatccagtccagggtagcggtcaccacagatttgtggacgtctgacaaccaaaaaagaggttacatggccataacagctcactttattgatgaatcctggactcttagaaatattataatgaggtttatctatgttcctgctcctcatactgctgacgtcattggtgaagaattgtatgagtcattggttgaatggaatcttgatgagaaaatatcttctgtgactcttgacaactgcacaactaatgatgcgtgaatgtgaagatagagttgctaatgtgaagaacttgctagctgatttgatgaatgagtaccatataactgagaatattgagaacaatgagtcatcaacaccatcagttggaaacagtgatgacttcttatctgacattagtgcccgtattgcaagtagaaggccaacaagcatggggctcaaatctgagctagaccggtacttggatgaagaaatggtgaacatgcaaaccaaaaacttcaatgttttagattggtagaaggtagctggaactcggtttcctattttaagaaggattgcaagagacatatatgttatccctgttacaactgttgcttcagaagctgctttcagcactagtggtagagtacttagtgagcatcgcagtaggcttacttcaaagatgttggaggctctcatgtgctctcaagattggcttaggaacaaatacaaagttgatgagaaaactaaacaacctgccaccttttggtcctgtctccaagacatgcaagagggcctccaggaacttgcactttgacattttcatttcaaggatttaggtggcgttaatcttttggctgttgacatgtagtgaacaagtcaagtacaagtagcaattgacaagatcacaagaaccttttggctctcatgaacacttgatatggatcttttggttctcatgtttttactcaatggtgaacttgtaatgaacttgtaacagatgtgcttttgggagcggtttgcacatctgttgatgcgcacctatgttgtaagcacattgtatgtgttaatttggaaatttggatgtttaatgtggtgaactagtggcgccatgctaggggtggtggacactaactggatattaatctagctgtgaacatctgatgtctgatgtgatcaatggtgttatgatttgtgaaacacttaacattgaccactctatcagtcttattgttgatgtttctta

SEQ ID NO: 211335 - DNA, 2300 bp, Zea Mays
tctaacgctgtccaaccatttgtggcggctgccgcaacaggctcaacgctcacgcgcacacacaatccatagccgcctcccacatctcactctcgttccgagcttccggccatggcggtgacctccggcgcccccaacgacaacggccgttaggcacaaggacgccggcactagggactcgccagcaccgatagcggcagctgcgcctgcgtcccaatcccgagtggctggaaagcttggcccctcagatccaaagcacctcatctatgcgggatccaaattaaagcatattaaagctgcacctgctgcaccagacaagaatcgccgaccacctttgtctccaccagcacctgccgtcaatcgtggtcgtggatctgtgcgcacacctttgggattaaaaaaatgtctaccgaaagtggcagtcaatccccattatctcaagcatcacaagcaccgatgtctccatctcatgaacctgaatcgtctcgtcctgagtcagataatgactcgatgccaatttaaatagatgacaatgacaacattgaagtagaagaggaagaatacgacgctgaagctggttctaagagaaagctcacctcaactgtttggaaagagttcaagagagtgaagttcaatggcacagtccgggcaaagtgcaactattgcttcaagcaactttctgcgtcaagtaataatgggacaaaacatcttcatgttcatttaaaaagttgtgtgcaaaggaagattaagttgaacgggaagacattggcacaagcttctttgagatttggtagaacggatggtggaacagtttcaatagagaattacacatttgatcaagaaatagctagaaatgaacttgctgcgatgatagttctgcatgaataccccttaagcatggttgatcatgtgggtttccgaagatttgttggtgctcttcaaccacttttcaagatcggaaccagaaacatgataagatctgatattatgaagcattatgaggtggagaagaaaaaagccattgaatacatggctggaatccagtccagggtagcggtcaccacagatttgtggacgtctgacaaccaaaaaagaggttacatggccataacagctcactttattgatgaatcctggactcttagaaatattataatgaggtttatctatgttcctgctcctcatactgctgacgtcattggtgaagaattgtatgagtcattggttgaatggaatcttgatgagaaaatatcttctgtgactcttgacaactgcacaactaatgatgcgtcctattgatatgttatgaggacttacttgttgtgtccggtagtgaatgtgaagatagagttgctaatgtgaagaacttgctagctgatttgatgaatgagtaccatataactgagaatattgagaacaatgagtcatcaacaccatcagttggaaacagtgatgacttcttatctgacattagtgcccgtattgcaagtagaaggccaacaagcatggggctcaaatctgagctagaccggtacttggatgaagaaatggtgaacatgcaaaccaaaaacttcaatgttttagattggtagaaggtagctggaactcggtttcctattttaagaaggattgcaagagacatatatgttatccctgttacaactgttgcttcagaagctgctttcagcactagtggtagagtacttagtgagcatcgcagtaggcttacttcaaagatgttggaggctctcatgtgctctcaagattggcttaggaacaaatacaaagttgatgagaaaactaaacaacctgccaccttttggtcctgtctccaagacatgcaagagggcctccaggaacttgcactttgacattttcatttcaaggatttaggtggcgttaatcttttggctgttgacatgtagtgaacaagtcaagtacaagtagcaattgacaagatcacaagaaccttttggctctcatgaacacttgatatggatcttttggttctcatgtttttactcaatggtgaacttgtaatgaacttgtaacagatgtgcttttgggagcggtttgcacatctgttgatgcgcacctatgttgtaagcacattgtatgtgttaatttggaaatttggatgtttaatgtggtgaactagtggcgccatgctaggggtggtggacactaactggatattaatctagctgtgaacatctgatgtctgatgtgatcaatggtgttatgatttgtgaaacacttaacattgaccactctatcagtcttattgttgatgtttctta

SEQ ID NO: 211336 - DNA, 2234 bp, Zea Mays
agtaaccctagagtccagttgcctagttgccttctctggtagtccagtctaacgctgtccaaccatttgtggcggctgccgcaacaggctcaacgctcacgcgcacacacaatccatagccgcctcccacatctcactctcgttccgagcttccggccatggcggtgacctccggcgcccccaacgacaacggccgtattggtactgagtactgacccatcgagccgtcccgaagggacgctggcgccgctgcgactgacgatgagcaccgcgtggatctggaagttaggcacaaggacgccggcactagggactcgccagcaccgatagcggcagctgcgcctgcgtcccaatcccgagtggctggaaagcttggcccctcagatccaaagcacctcatctatgcgggatccaaattaaagcatattaaagctgcacctgctgcaccagacaagaatcgccgaccacctttgtctccaccagcacctgccgtcaatcgtggtcgtggatctgtgcgcacacctttgggattaaaaaaatgtctaccgaaagtggcagtcaatccccattatctcaagcatcacaagcaccgatgtctccatctcatgaacctgaatcgtctcgtcctgagtcagataatgactcgatgccaatttaaatagatgacaatgacaacattgaagtagaagaggaagaatacgacgctgaagctggttctaagagaaagctcacctcaactgtttggaaagagttcaagagagtgaagttcaatggcacagtccgggcaaagtgcaactattgcttcaagcaactttctgcgtcaagtaataatgggacaaaacatcttcatgttcatttaaaaagttgtgtgcaaaggaagattaagttgaacgggaagacattggcacaagcttctttgagatttggtagaacggatggtggaacagtttcaatagagaattacacatttgatcaagaaatagctagaaatgaacttgctgcgatgatagttctgcatgaataccccttaagcatggttgatcatgtgggtttccgaagatttgttggtgctcttcaaccacttttcaagatcggaaccagaaacatgataagatctgatattatgaagcattatgaggtggagaagaaaaaagccattgaatacatggctggaatccagtccagggtagcggtcaccacagatttgtggacgtctgacaaccaaaaaagaggttacatggccataacagctcactttattgatgaatcctggactcttagaaatattataatgaggtttatctatgttcctgctcctcatactgctgacgtcattggtgaagaattgtatgagtcattggttgaatggaatcttgatgagaaaatatcttctgtgactcttgacaactgcacaactaatgatgcgaaggccaacaagcatggggctcaaatctgagctagaccggtacttggatgaagaaatggtgaacatgcaaaccaaaaacttcaatgttttagattggtagaaggtagctggaactcggtttcctattttaagaaggattgcaagagacatatatgttatccctgttacaactgttgcttcagaagctgctttcagcactagtggtagagtacttagtgagcatcgcagtaggcttacttcaaagatgttggaggctctcatgtgctctcaagattggcttaggaacaaatacaaagttgatgagaaaactaaacaacctgccaccttttggtcctgtctccaagacatgcaagagggcctccaggaacttgcactttgacattttcatttcaaggatttaggtggcgttaatcttttggctgttgacatgtagtgaacaagtcaagtacaagtagcaattgacaagatcacaagaaccttttggctctcatgaacacttgatatggatcttttggttctcatgtttttactcaatggtgaacttgtaatgaacttgtaacagatgtgcttttgggagcggtttgcacatctgttgatgcgcacctatgttgtaagcacattgtatgtgttaatttggaaatttggatgtttaatgtggtgaactagtggcgccatgctaggggtggtggacactaactggatattaatctagctgtgaacatctgatgtctgatgtgatcaatggtgttatgatttgtgaaacacttaacattgaccactctatcagtcttattgttgatgtttctta

SEQ ID NO: 211337 - DNA, 2196 bp, Zea Mays
cagtaaccctagagtccagttgcctagttgccttctctggtagtccagtctaacgctgtccaaccatttgtggcggctgccgcaacaggctcaacgctcacgcgcacacacaatccatagccgcctcccacatctcactctcgttccgagcttccggccatggcggtgacctccggcgcccccaacgacaacggccgggacgctggcgccgctgcgactgacgatgagcaccgcgtggatctggaagttaggcacaaggacgccggcactagggactcgccagcaccgatagcggcagctgcgcctgcgtcccaatcccgagtggctggaaagcttggcccctcagatccaaagcacctcatctatgcgggatccaaattaaagcatattaaagctgcacctgctgcaccagacaagaatcgccgaccacctttgtctccaccagcacctgccgtcaatcgtggtcgtggatctgtgcgcacacctttgggattaaaaaaatgtctaccgaaagtggcagtcaatccccattatctcaagcatcacaagcaccgatgtctccatctcatgaacctgaatcgtctcgtcctgagtcagataatgactcgatgccaatttaaatagatgacaatgacaacattgaagtagaagaggaagaatacgacgctgaagctggttctaagagaaagctcacctcaactgtttggaaagagttcaagagagtgaagttcaatggcacagtccgggcaaagtgcaactattgcttcaagcaactttctgcgtcaagtaataatgggacaaaacatcttcatgttcatttaaaaagttgtgtgcaaaggaagattaagttgaacgggaagacattggcacaagcttctttgagatttggtagaacggatggtggaacagtttcaatagagaattacacatttgatcaagaaatagctagaaatgaacttgctgcgatgatagttctgcatgaataccccttaagcatggttgatcatgtgggtttccgaagatttgttggtgctcttcaaccacttttcaagatcggaaccagaaacatgataagatctgatattatgaagcattatgaggtggagaagaaaaaagccattgaatacatggctggaatccagtccagggtagcggtcaccacagatttgtggacgtctgacaaccaaaaaagaggttacatggccataacagctcactttattgatgaatcctggactcttagaaatattataatgaggtttatctatgttcctgctcctcatactgctgacgtcattggtgaagaattgtatgagtcattggttgaatggaatcttgatgagaaaatatcttctgtgactcttgacaactgcacaactaatgatgcgaaggccaacaagcatggggctcaaatctgagctagaccggtacttggatgaagaaatggtgaacatgcaaaccaaaaacttcaatgttttagattggtagaaggtagctggaactcggtttcctattttaagaaggattgcaagagacatatatgttatccctgttacaactgttgcttcagaagctgctttcagcactagtggtagagtacttagtgagcatcgcagtaggcttacttcaaagatgttggaggctctcatgtgctctcaagattggcttaggaacaaatacaaagttgatgagaaaactaaacaacctgccaccttttggtcctgtctccaagacatgcaagagggcctccaggaacttgcactttgacattttcatttcaaggatttaggtggcgttaatcttttggctgttgacatgtagtgaacaagtcaagtacaagtagcaattgacaagatcacaagaaccttttggctctcatgaacacttgatatggatcttttggttctcatgtttttactcaatggtgaacttgtaatgaacttgtaacagatgtgcttttgggagcggtttgcacatctgttgatgcgcacctatgttgtaagcacattgtatgtgttaatttggaaatttggatgtttaatgtggtgaactagtggcgccatgctaggggtggtggacactaactggatattaatctagctgtgaacatctgatgtctgatgtgatcaatggtgttatgatttgtgaaacacttaacattgaccactctatcagtcttattgttgatgtttctta

SEQ ID NO: 211338 - DNA, 3035 bp, Zea Mays
cagtaaccctagagtccagttgcctagttgccttctctggtagtccagtctaacgctgtccaaccatttgtggcggctgccgcaacaggctcaacgctcacgcgcacacacaatccatagccgcctcccacatctcactctcgttccgagcttccggccatggcggtgacctccggcgcccccaacgacaacggccgggacgctggcgccgctgcgactgacgatgagcaccgcgtggatctggaagttaggcacaaggacgccggcactagggactcgccagcaccgatagcggcagctgcgcctgcgtcccaatcccgagtggctggaaagcttggcccctcagatccaaagcacctcatctatgcgggatccaaattaaagcatattaaagctgcacctgctgcaccagacaagaatcgccgaccacctttgtctccaccagcacctgccgtcaatcgtggtcgtggatctgtgcgcacacctttgggattaaaaaaatgtctaccgaaagtggcagtcaatccccattatctcaagcatcacaagcaccgatgtctccatctcatgaacctgaatcgtctcgtcctgagtcagataatgactcgatgccaatttaaatagatgacaatgacaacattgaagtagaagaggaagaatacgacgctgaagctggttctaagagaaagctcacctcaactgtttggaaagagttcaagagagtgaagttcaatggcacagtccgggcaaagtgcaactattgcttcaagcaactttctgcgtcaagtaataatgggacaaaacatcttcatgttcatttaaaaagttgtgtgcaaaggaagattaagttgaacgggaagacattggcacaagcttctttgagatttggtagaacggatggtggaacagtttcaatagagaattacacatttgatcaagaaatagctagaaatgaacttgctgcgatgatagttctgcatgaataccccttaagcatggttgatcatgtgggtttccgaagatttgttggtgctcttcaaccacttttcaagatcggaaccagaaacatgataagatctgatattatgaagcattatgaggtggagaagaaaaaagccattgaatacatggctggaatccagtccagggtagcggtcaccacagatttgtggacgtctgacaaccaaaaaagaggttacatggccataacagctcactttattgatgaatcctggactcttagaaatattataatgaggtttatctatgttcctgctcctcatactgctgacgtcattggtgaagaattgtatgagtcattggttgaatggaatcttgatgagaaaatatcttctgtgactcttgacaactgcacaactaatgatgcggtaatctcttctcttgtgaggaatattggaaagcacaaacttatgaatgatggaaaattgctacatatgcgatgttctgcccatatccttaatttgatagtaaaggatggtttagaagtacttaaagatgcaattgagaacatccgtgatagtgttgcttattggacagccactccaaaaaggtttgaaaagtttgaggaaatagctaaatttgttaaagttgatatcaagacaaagataggatttgactgtaggactagatggaattcaactttcaccatgcttgccactgcagtgccttacaaggctattttcataagagcaagtcgtgtagataggcagtacacgtgtttgcccactgaggatgagtggaaatttgctaaggatgttgtggagaggcttagattgtttaatgacattactacactattttttggaactgattatgtcactgctaacgtctacttcactagaattgctaagattagaaatcagattaggttgtggtcatcatgtggcaatccgttggtagaagaaatgttagtgaatatggtagccaaatttgacaagtactggactgacattcaagggctcatgggcattgcaactattcttgaccctcgattcaaaactgcagtcctattgatatgttatgaggacttacttgttgtgtccggtagtgaatgtgaagatagagttgctaatgtgaagaacttgctagctgatttgatgaatgagtaccatataactgagaatattgagaacaatgagtcatcaacaccatcagttggaaacagtgatgacttcttatctgacattagtgcccgtattgcaagtagaaggccaacaagcatggggctcaaatctgagctagaccggtacttggatgaagaaatggtgaacatgcaaaccaaaaacttcaatgttttagattggtagaaggtagctggaactcggtttcctattttaagaaggattgcaagagacatatatgttatccctgttacaactgttgcttcagaagctgctttcagcactagtggtagagtacttagtgagcatcgcagtaggcttacttcaaagatgttggaggctctcatgtgctctcaagattggcttaggaacaaatacaaagttgatgagaaaactaaacaacctgccaccttttggtcctgtctccaagacatgcaagagggcctccaggaacttgcactttgacattttcatttcaaggatttaggtggcgttaatcttttggctgttgacatgtagtgaacaagtcaagtacaagtagcaattgacaagatcacaagaaccttttggctctcatgaacacttgatatggatcttttggttctcatgtttttactcaatggtgaacttgtaatgaacttgtaacagatgtgcttttgggagcggtttgcacatctgttgatgcgcacctatgttgtaagcacattgtatgtgttaatttggaaatttggatgtttaatgtggtgaactagtggcgccatgctaggggtggtggacactaactggatattaatctagctgtgaacatctgatgtctgatgtgatcaatggtgttatgatttgtgaaacacttaacattgaccactctatcagtcttattgttgatgtttctta

SEQ ID NO: 211339 - DNA, 3074 bp, Zea Mays
cagtaaccctagagtccagttgcctagttgccttctctggtagtccagtctaacgctgtccaaccatttgtggcggctgccgcaacaggctcaacgctcacgcgcacacacaatccatagccgcctcccacatctcactctcgttccgagcttccggccatggcggtgacctccggcgcccccaacgacaacggccgtattggtactgagtactgacccatcgagccgtcccgaagggacgctggcgccgctgcgactgacgatgagcaccgcgtggatctggaagttaggcacaaggacgccggcactagggactcgccagcaccgatagcggcagctgcgcctgcgtcccaatcccgagtggctggaaagcttggcccctcagatccaaagcacctcatctatgcgggatccaaattaaagcatattaaagctgcacctgctgcaccagacaagaatcgccgaccacctttgtctccaccagcacctgccgtcaatcgtggtcgtggatctgtgcgcacacctttgggattaaaaaaatgtctaccgaaagtggcagtcaatccccattatctcaagcatcacaagcaccgatgtctccatctcatgaacctgaatcgtctcgtcctgagtcagataatgactcgatgccaatttaaatagatgacaatgacaacattgaagtagaagaggaagaatacgacgctgaagctggttctaagagaaagctcacctcaactgtttggaaagagttcaagagagtgaagttcaatggcacagtccgggcaaagtgcaactattgcttcaagcaactttctgcgtcaagtaataatgggacaaaacatcttcatgttcatttaaaaagttgtgtgcaaaggaagattaagttgaacgggaagacattggcacaagcttctttgagatttggtagaacggatggtggaacagtttcaatagagaattacacatttgatcaagaaatagctagaaatgaacttgctgcgatgatagttctgcatgaataccccttaagcatggttgatcatgtgggtttccgaagatttgttggtgctcttcaaccacttttcaagatcggaaccagaaacatgataagatctgatattatgaagcattatgaggtggagaagaaaaaagccattgaatacatggctggaatccagtccagggtagcggtcaccacagatttgtggacgtctgacaaccaaaaaagaggttacatggccataacagctcactttattgatgaatcctggactcttagaaatattataatgaggtttatctatgttcctgctcctcatactgctgacgtcattggtgaagaattgtatgagtcattggttgaatggaatcttgatgagaaaatatcttctgtgactcttgacaactgcacaactaatgatgcggtaatctcttctcttgtgaggaatattggaaagcacaaacttatgaatgatggaaaattgctacatatgcgatgttctgcccatatccttaatttgatagtaaaggatggtttagaagtacttaaagatgcaattgagaacatccgtgatagtgttgcttattggacagccactccaaaaaggtttgaaaagtttgaggaaatagctaaatttgttaaagttgatatcaagacaaagataggatttgactgtaggactagatggaattcaactttcaccatgcttgccactgcagtgccttacaaggctattttcataagagcaagtcgtgtagataggcagtacacgtgtttgcccactgaggatgagtggaaatttgctaaggatgttgtggagaggcttagattgtttaatgacattactacactattttttggaactgattatgtcactgctaacgtctacttcactagaattgctaagattagaaatcagattaggttgtggtcatcatgtggcaatccgttggtagaagaaatgttagtgaatatggtagccaaatttgacaagtactggactgacattcaagggctcatgggcattgcaactattcttgaccctcgattcaaaactgcagtcctattgatatgttatgaggacttacttgttgtgtccggtagtgaatgtgaagatagagttgctaatgtgaagaacttgctagctgatttgatgaatgagtaccatataactgagaatattgagaacaatgagtcatcaacaccatcagttggaaacagtgatgacttcttatctgacattagtgcccgtattgcaagtagaaggccaacaagcatggggctcaaatctgagctagaccggtacttggatgaagaaatggtgaacatgcaaaccaaaaacttcaatgttttagattggtagaaggtagctggaactcggtttcctattttaagaaggattgcaagagacatatatgttatccctgttacaactgttgcttcagaagctgctttcagcactagtggtagagtacttagtgagcatcgcagtaggcttacttcaaagatgttggaggctctcatgtgctctcaagattggcttaggaacaaatacaaagttgatgagaaaactaaacaacctgccaccttttggtcctgtctccaagacatgcaagagggcctccaggaacttgcactttgacattttcatttcaaggatttaggtggcgttaatcttttggctgttgacatgtagtgaacaagtcaagtacaagtagcaattgacaagatcacaagaaccttttggctctcatgaacacttgatatggatcttttggttctcatgtttttactcaatggtgaacttgtaatgaacttgtaacagatgtgcttttgggagcggtttgcacatctgttgatgcgcacctatgttgtaagcacattgtatgtgttaatttggaaatttggatgtttaatgtggtgaactagtggcgccatgctaggggtggtggacactaactggatattaatctagctgtgaacatctgatgtctgatgtgatcaatggtgttatgatttgtgaaacacttaacattgaccactctatcagtcttattgttgatgtttctta

SEQ ID NO: 211340 - DNA, 431 bp, Zea Mays
atatattcagctgttaaaataaagtttacaaggcaaaaaatagaggattgcggagctgagaacaccctgaagcccggagatgtcatccagtgccgtgaatgtggctaccgcatcctctacaagaagcggacccgccggattgtccaatatgaagcgcgctgaagagtgaagacaagggaaaacactgaagatggttgatctattactcgccacattacctatgtaaacagtcttctgggggaaatgaaaatgtcagacttaacgtttgtatgtcgtgtgcctcctttgaacctgagctgtataatttgtaacgcttgaactggggactgatttgagaactgagacactgcagcaatatgttgatgggtcctaaaagaaaaaaaagcaaaacgtcttataaatacgaaatagattgagtacacaaagaaaca

SEQ ID NO: 211341 - DNA, 322 bp, Zea Mays
aatatattcagctgttaaaataaagtttacaaggcaaaaaatagaggattgcggagctgagaacaccctgaagcccggagatgtcatccagtgccgtgaatgtggctaccgcatcctctacaagaagcggacccgccggattgtccaatatgaagcgcgctgaagagtgaagacaagggaaaacactgaagatggttgatctattactcgccacattacctatgtaaacagtcttctgggggaaatgaaaatgtcagacttaacgtttgaggcaagcagaccaaatcaccgcatgcagggcgcccacaacaagctgtcgtcc

SEQ ID NO: 211342 - DNA, 2450 bp, Zea Mays
catctagtaggccttggtacaataagccggactcctccacacaggcctagcccaatgagagggttccatggaaaccctaatcctcgcggtatataaccttccgcgcggccgccactcttccctgacttgtgcgccatcacacacaagacacaaccccactcacccggcagggaggccctcttcgtcggcggaggccatggtttccctcaagccgcagaagaggctcgccgcgggagtcctaaaatgtggcaaggggaaggtgtggcttgaccccaacgaggtctacgagatctcgatggctaactcgcgtaagaccaccaccgcttgctctccgcctcctccccccgcccatttcgtgtttgctgggcgtcgaatccgttcgtcgatgagcaacggcgtccgagtggtccgaccacggacgcccttttcaccccttgatcgttcagttcggttgacgtcgtaggagtatgtctgtgtttctgcgcgtatctattggttttgttaccttcttgtttatttttgcattctgttgctgcaggtgtccataatagctcactcactgcttgccacctcatatagctgtgttgcttatcttagcgcacatgattttaaactgttaattgtatctatgttatttttgctattatactttatttccttctaatgtgcagtctaggttatctgtatatctagttttgtgacaatgtttgctatgtgatgcaattgtgcatagagtttattgtgtcttttgattatttcgtgcactgctgatgattcgcaaagaattgtttatttagcaatacatattctgttcatggcgtacttgcaaactgtaccttctgtcctacttggtttattactttgtttttgctatgactgctattactttcatggtctgctgatgatttagaagtatgattttatcttagtctgaggtgttgtgctcaggcttttatttttcatgcatttgtttttctgtttggtttagcactgatatcgccatgcatgtctctgcagttttatgtgattagatggaggtgagatagttattatattactcagtgttgtcgcgggtacttgttttctctattctttgtgctcgttcaattttgatcagtgttatgtttgaacttttgttggagcattgaaatcttgtttcactgctttgaaacgcaaggaacataagtatgacatttctatacaacttactttacaggtcagaacattcgtaagctggtgaaggatggattcataattaagaagccacagaaaatccactcaaggtcccgggcaaggagggcccatgaggccaagcagaaggggaggcactctggttacggtaagcgcaggggtaccagggaggctaggctccccaccaagatcctttggatgcgcaggatgcgtgtcctcaggcgtctgctgcgcaagtatcgtgaagcaaagaaaatcgacaaacacatgtaccacgatatgtatatgaaagtaaaaggaaacatgtttaaaaataagagggtactcatggagagcatccacaagtcaaaggccgagaaggccagagagaagactctctcggatcagtttgaggccaagcgagccaagagcaaggcttcccgtgagagaaagattgcaaggagggaggagagattggctcaggtaagacaatgtctcaatgccatgaaactgtatatttttattgtcattgaacctgctgtgttatgatatggattgatggtaattaaatttactaacttccattagtttgttgatctgttcaatattgaaactacgcttgattttttttcatctcgctacattgttgcatatgattgtcctttggccatgtgttttaatttagtgtactatcattgtttttcaaagtgtcatgttatggcttgtagtttgttttaaactgttagattttgtgtatattttttgctgacagattgtggcattttgatgtacctgtttcttccatcttttgtgttctatgttgaaatgcttgtttcatctttgtgtagggcccaagggaacctgcggcagcaccagtatcagctactgctccgtttgcagctgcaccaaagaaggcgaagaagtgaaaaaggtggtcttctagttctaggacctaattttggagcgccccaactcttttgctgttacatatccaagctgtcagatatctgtaataacatcttatctcgtttttcatgttggacaatgtagtagagttgtttgtcccaagtgtatttggaacgaattttcacagaatctgcttaatgcttcggtggaacccagttctggttttgctattttaccttgtagatctggccgctgtggctagcctccgtgcttttttgcttcgatgttccataaccttgtctggtgttgacccgcgatgacgcaggttttgtagtgttctttggtgaattatgagctctgatgtgatattgata

SEQ ID NO: 211343 - DNA, 1061 bp, Zea Mays
catctagtaggccttggtacaataagccggactcctccacacaggcctagcccaatgagagggttccatggaaaccctaatcctcgcggtatataaccttccgcgcggccgccactcttccctgacttgtgcgccatcacacacaagacacaaccccactcacccggcagggaggccctcttcgtcggcggaggccatggtttccctcaagccgcagaagaggctcgccgcgggagtcctaaaatgtggcaaggggaaggtcccgggcaaggagggcccatgaggccaagcagaaggggaggcactctggttacggtaagcgcaggggtaccagggaggctaggctccccaccaagatcctttggatgcgcaggatgcgtgtcctcaggcgtctgctgcgcaagtatcgtgaagcaaagaaaatcgacaaacacatgtaccacgatatgtatatgaaagtaaaaggaaacatgtttaaaaataagagggtactcatggagagcatccacaagtcaaaggccgagaaggccagagagaagactctctcggatcagtttgaggccaagcgagccaagagcaaggcttcccgtgagagaaagattgcaaggagggaggagagattggctcagggcccaagggaacctgcggcagcaccagtatcagctactgctccgtttgcagctgcaccaaagaaggcgaagaagtgaaaaaggtggtcttctagttctaggacctaattttggagcgccccaactcttttgctgttacatatccaagctgtcagatatctgtaataacatcttatctcgtttttcatgttggacaatgtagtagagttgtttgtcccaagtgtatttggaacgaattttcacagaatctgcttaatgcttcggtggaacccagttctggttttgctattttaccttgtagatctggccgctgtggctagcctccgtgcttttttgcttcgatgttccataaccttgtctggtgttgacccgcgatgacgcaggttttgtagtgttctttggtgaattatgagctctgatgtgatattgata

SEQ ID NO: 211344 - DNA, 1163 bp, Zea Mays
caccacccggccctacctccagttcgacacgcagagcaaaaattcagaaaggcccaattaggacagttagaataaaggcgccataggatcacggatcaccggaggcgttttgcgtgattgattgcgtttcgggggagggcgtacgacgacgtggacgcaccgtcaaaggcaccaggctgagcaacccctctctctctccctcttatccccaaggcgaggagcggagcggagaggagggcccttctgcttgtttctccgctttgcaagatgtcgtccccgagcaagcgccgcgagatggaccttatgaagctgatgatgagcgactacaaggtggagatggtgaacgacgggatgcaggaattcttcgtcgaattcaagggcccggccgaaagtatctaccaaggtggtgtctggaaggttcgggtagaactgcctgatgcatacccttacaaatccccgtccatcggcttcatcaacaagatttatcacccgaatgtcgatgagatgtctggctctgtctgtttggatgtcataaaccagacatggagcccaatgtttgatctagtaaatgtttttgaagtattccttccacagctgttgctgtacccaaatccttctgatccattaaatggggaggctgcagcactgatgatgcgtgatcggcctgtttatgaacagaaagtgaaagaatattgtgaaaagtatgctaaaccagaggacgctggcatcaccccggaagacaagtccagtgacgaagagcttagcgatgacgacgacgacgacaacgactccggggacgaagctatacttggcaatcctgatccttagtctgagtaggaaacagcgcagtcagctcatcaatacattgtccaattgcagaaactgcaagtaaacaaaaactgaaaaactaaaaaaaaaacctctggatgtcatgtaaataagtgtactttgtatgttctccaatgttgtttccttcatttgtctgattgaatttctagttgctgttgcatgcctgtgctttggtttcaaggaaaggcaaaaacaaggttgtggcttcgtccattggatgtggattgcttgcctgtttaagcaacgtaagggtattttgggaatatctgttaggcctcaagccaaccgctgtttggttcgcaaattcttttgtg

SEQ ID NO: 211345 - DNA, 2462 bp, Zea Mays
gttaggcatgccttccccgatggctcgcatcttccaccgccatctcctcctcgccgtcgtcaccttagccgtggccgcttctctccttcgcccagctgccgcagtgcgcccatttgttttggttctctccggtgaggacttcctcaaggatccggccgcgcacccgtcccttccctctgccgactccgacgacgacgatgggtgggacgacttcgccgacgattcaccggccgccgacccgctactctctccgtcctcctgggcccccctcctcgacccaaccatctctctcccctctggcgatgagacggactcgccggccgacgcgctcttcgtcgcgggcacccgcgcgatgctatccgcagcgtctgatggagacgacgcggcgttcaccacggctgccgcgcagatcgaggcctcggcagaggcggggcacccgggcgcgcagtctgcgctcgcgttccttaccggcgccgggatgacgcgtccggcatcccggtcgctcgcgttcctgctgcacaagttcgccgccgacgcaggagatctccagtcaaagatggccctcgcgtactcctacttccgccaggagatgtatgaagaagctgttatactatacgctgaacttgcagaagctgccctaacaagctccttgatatcaaaggagccaccagtgattgaaccaatccgtcttcacagtgggactgaagaaaataaagaggccttgaggaagtcccgaggtgaggacgatgaagatttccaaatcacagagtatcaggcacagcgaggcaacgctgccaacatgtacaaattagggcttctgtattactatggactacgtgggctccgccgtgattatggaaaagcatttcattggttttctaaggctgttgagaaaggcgagacacgggcattggagcttctgggtgagatctatgctagaggtgctggagtggaaaggaactatactgaagcgtacaagtggttggcacttgctgccaagcagcaacattactcagcttacaatggattgggttatctatatgttaaaggctatggggtggagaagaaaaacttgacaaaagcaagggaacttttcgaacttgcagccgagaataaggaagccgttaatgctgggcaaccaaaagctatttatcaggtggcgaagctgttccagaaaggcattggtcttaagaggaatctccatatggcaacaatgctgtacaagtctattgctgagaggggaccctggagttcactgtccagatgggctctggagtcttatttgaaaggcgatgtagggaaagcattgctcttgtattccagaatggcagatcttggatatgaggttgcacagagcaatgctgcctggattctggataggtatagtgatcaaagtatttgcatgggagaatctagtttttgcacagatatggaaagacatcttcgtgcacatgctttgtggtggcatgcatccgagcagggtaatgagcatgctgctttgttgattggcgatgcctactactatggccggggcgtcgcaagggactatgaacgtgcagcagaggcatatatgcatgctcggtcacagtctaatgctcaagctatttttaaccttgggtacatgcatgagcatggtcatggactcccccttgatttgcacttggcaaaaagatattatgatcaagccgttgaggtggattcagctgctaagctccctgtcatgcttgcattaacaagtttatggctaaggacgaactatgcagacagttttttggttggttttatcgattcacttccagaaatgtatcctgttgttaaggaatgggtggaagatgttctcatggatgaagggaatgcaacaattttgactctctttgcttgccttgtaactgtcctctacttgcgagaacgccaaaggcgtcaagtagcagcagcagccaaccccctaacaacatgatgatgtggccatgtaaatgtcggttttcatgacatgggcaggccttttgcttgagggaactcgagatgtaaaatgatggctcattgacatgactcgcgcactaaattgagtagagggacatgaaagccgctggagactcagacaatgtttgctgcctggcgaatattcacctctccaagacttagggagctatgcttgtaaaggacaacaattcttggaaactggctgctcagaaatacagtttagaaatctcacagatgttgaaaagcatgctccccccttgttgcgcatatgcatggccatggaatttcgacaagcacacacggagaacatttctggaagaggcaactttacaattggtagtttagcgatcggctttcggagttgaaccgatgatgtgacaccgcttcgctccgtggtccacgccagtagctctcaaagctggctaaaaaaaaccccaacctgaatgaaaacggtaattggccgggggcggcgaggctgggtg

SEQ ID NO: 211346 - DNA, 2531 bp, Zea Mays
tcagaaaaatgatataggtggagaaatttagagggaatcgctgcggatagcgttaggcatgccttccccgatggctcgcatcttccaccgccatctcctcctcgccgtcgtcaccttagccgtggccgcttctctccttcgcccagctgccgcagtgcgcccatttgttttggttctctccggtgaggacttcctcaaggatccggccgcgcacccgtcccttccctctgccgactccgacgacgacgatgggtgggacgacttcgccgacgattcaccggccgccgacccgctactctctccgtcctcctgggcccccctcctcgacccaaccatctctctcccctctggcgatgagacggactcgccggccgacgcgctcttcgtcgcgggcacccgcgcgatgctatccgcagcgtctgatggagacgacgcggcgttcaccacggctgccgcgcagatcgaggcctcggcagaggcggggcacccgggcgcgcagtctgcgctcgcgttccttaccggcgccgggatgacgcgtccggcatcccggtcgctcgcgttcctgctgcacaagttcgccgccgacgcaggagatctccagtcaaagatggccctcgcgtactcctacttccgccaggagatgtatgaagaagctgttatactatacgctgaacttgcagaagctgccctaacaagctccttgatatcaaaggagccaccagtgattgaaccaatccgtcttcacagtgggactgaagaaaataaagaggccttgaggaagtcccgaggtgaggacgatgaagatttccaaatcacagagtatcaggcacagcgaggcaacgctgccaacatgtacaaattagggcttctgtattactatggactacgtgggctccgccgtgattatggaaaagcatttcattggttttctaaggctgttgagaaaggcgagacacgggcattggagcttctgggtgagatctatgctagaggtgctggagtggaaaggaactatactgaagcgtacaagtggttggcacttgctgccaagcagcaacattactcagcttacaatggattgggttatctatatgttaaaggctatggggtggagaagaaaaacttgacaaaagcaagggaacttttcgaacttgcagccgagaataaggaagccggtggacattataaccttgttaatgctgggcaaccaaaagctatttatcaggtggcgaagctgttccagaaaggcattggtcttaagaggaatctccatatggcaacaatgctgtacaagtctattgctgagaggggaccctggagttcactgtccagatgggctctggagtcttatttgaaaggcgatgtagggaaagcattgctcttgtattccagaatggcagatcttggatatgaggttgcacagagcaatgctgcctggattctggataggtatagtgatcaaagtatttgcatgggagaatctagtttttgcacagatatggaaagacatcttcgtgcacatgctttgtggtggcatgcatccgagcagggtaatgagcatgctgctttgttgattggcgatgcctactactatggccggggcgtcgcaagggactatgaacgtgcagcagaggcatatatgcatgctcggtcacagtctaatgctcaagctatttttaaccttgggtacatgcatgagcatggtcatggactcccccttgatttgcacttggcaaaaagatattatgatcaagccgttgaggtggattcagctgctaagctccctgtcatgcttgcattaacaagtttatggctaaggacgaactatgcagacagttttttggttggttttatcgattcacttccagaaatgtatcctgttgttaaggaatgggtggaagatgttctcatggatgaagggaatgcaacaattttgactctctttgcttgccttgtaactgtcctctacttgcgagaacgccaaaggcgtcaagtagcagcagcagccaaccccctaacaacatgatgatgtggccatgtaaatgtcggttttcatgacatgggcaggccttttgcttgagggaactcgagatgtaaaatgatggctcattgacatgactcgcgcactaaattgagtagagggacatgaaagccgctggagactcagacaatgtttgctgcctggcgaatattcacctctccaagacttagggagctatgcttgtaaaggacaacaattcttggaaactggctgctcagaaatacagtttagaaatctcacagatgttgaaaagcatgctccccccttgttgcgcatatgcatggccatggaatttcgacaagcacacacggagaacatttctggaagaggcaactttacaattggtagtttagcgatcggctttcggagttgaaccgatgatgtgacaccgcttcgctccgtggtccacgccagtagctctcaaagctggctaaaaaaaaccccaacctgaatgaaaacggtaattggccgggggcggcgaggctgggtg

SEQ ID NO: 211347 - DNA, 1731 bp, Zea Mays
tttttttttcgaacacacatgagagttgtgtaccattttacacattttgtaaagaagacaaatggaaacaaagaagtgtgtgtgtgtgtggttgtggtggaactaaaccatatactaattacaccaggtctgacaacagaggcttaaaatacaattaaacatgattcacgtaatatatctactctaaatgctcatgaacctaggaaattaccatccttgttgttgttgcaggcaagggaacttttcgaacttgcagccgagaataaggaagccgttaatgctgggcaaccaaaagctatttatcaggtggcgaagctgttccagaaaggcattggtcttaagaggaatctccatatggcaacaatgctgtacaagtctattgctgagaggggaccctggagttcactgtccagatgggctctggagtcttatttgaaaggcgatgtagggaaagcattgctcttgtattccagaatggcagatcttggatatgaggttgcacagagcaatgctgcctggattctggataggtatagtgatcaaagtatttgcatgggagaatctagtttttgcacagatatggaaagacatcttcgtgcacatgctttgtggtggcatgcatccgagcagggtaatgagcatgctgctttgttgattggcgatgcctactactatggccggggcgtcgcaagggactatgaacgtgcagcagaggcatatatgcatgctcggtcacagtctaatgctcaagctatttttaaccttgggtacatgcatgagcatggtcatggactcccccttgatttgcacttggcaaaaagatattatgatcaagccgttgaggtggattcagctgctaagctccctgtcatgcttgcattaacaagtttatggctaaggacgaactatgcagacagttttttggttggttttatcgattcacttccagaaatgtatcctgttgttaaggaatgggtggaagatgttctcatggatgaagggaatgcaacaattttgactctctttgcttgccttgtaactgtcctctacttgcgagaacgccaaaggcgtcaagtagcagcagcagccaaccccctaacaacatgatgatgtggccatgtaaatgtcggttttcatgacatgggcaggccttttgcttgagggaactcgagatgtaaaatgatggctcattgacatgactcgcgcactaaattgagtagagggacatgaaagccgctggagactcagacaatgtttgctgcctggcgaatattcacctctccaagacttagggagctatgcttgtaaaggacaacaattcttggaaactggctgctcagaaatacagtttagaaatctcacagatgttgaaaagcatgctccccccttgttgcgcatatgcatggccatggaatttcgacaagcacacacggagaacatttctggaagaggcaactttacaattggtagtttagcgatcgggtaactttccatcagcatttacacgcactgtatagttttctctggatgtgttagttgaaaaggggcggtgcatgttgtgagcagcaattttgcaatagtatccatcagagtttgaagtataaacacattttttgaatagcctgaaaatagatcttacagcagagggtgttgaatgacgacggcagccgcgcgcgcggagcagccattgccgggcggcagaagtgtgcatagcgtggttctctgtagcag

SEQ ID NO: 211348 - DNA, 2650 bp, Zea Mays
tcagaaaaatgatataggtggagaaatttagagggaatcgctgcggatagcgttaggcatgccttccccgatggctcgcatcttccaccgccatctcctcctcgccgtcgtcaccttagccgtggccgcttctctccttcgcccagctgccgcagtgcgcccatttgttttggttctctccggtgaggacttcctcaaggatccggccgcgcacccgtcccttccctctgccgactccgacgacgacgatgggtgggacgacttcgccgacgattcaccggccgccgacccgctactctctccgtcctcctgggcccccctcctcgacccaaccatctctctcccctctggcgatgagacggactcgccggccgacgcgctcttcgtcgcgggcacccgcgcgatgctatccgcagcgtctgatggagacgacgcggcgttcaccacggctgccgcgcagatcgaggcctcggcagaggcggggcacccgggcgcgcagtctgcgctcgcgttccttaccggcgccgggatgacgcgtccggcatcccggtcgctcgcgttcctgctgcacaagttcgccgccgacgcaggagatctccagtcaaagatggccctcgcgtactcctacttccgccaggagatgtatgaagaagctgttatactatacgctgaacttgcagaagctgccctaacaagctccttgatatcaaaggagccaccagtgattgaaccaatccgtcttcacagtgggactgaagaaaataaagaggccttgaggaagtcccgaggtgaggacgatgaagatttccaaatcacagagtatcaggcacagcgaggcaacgctgccaacatgtacaaattagggcttctgtattactatggactacgtgggctccgccgtgattatggaaaagcatttcattggttttctaaggctgttgagaaaggcgagacacgggcattggagcttctgggtgagatctatgctagaggtgctggagtggaaaggaactatactgaagcgtacaagtggttggcacttgctgccaagcagcaacattactcagcttacaatggattgggttatctatatgttaaaggctatggggtggagaagaaaaacttgacaaaagcaagggaacttttcgaacttgcagccgagaataaggaagccggtggacattataaccttgttaatgctgggcaaccaaaagctatttatcaggtggcgaagctgttccagaaaggcattggtcttaagaggaatctccatatggcaacaatgctgtacaagtctattgctgagaggggaccctggagttcactgtccagatgggctctggagtcttatttgaaaggcgatgtagggaaagcattgctcttgtattccagaatggcagatcttggatatgaggttgcacagagcaatgctgcctggattctggataggtatagtgatcaaagtatttgcatgggagaatctagtttttgcacagatatggaaagacatcttcgtgcacatgctttgtggtggcatgcatccgagcagggtaatgagcatgctgctttgttgattggcgatgcctactactatggccggggcgtcgcaagggactatgaacgtgcagcagaggcatatatgcatgctcggtcacagtctaatgctcaagctatttttaaccttgggtacatgcatgagcatggtcatggactcccccttgatttgcacttggcaaaaagatattatgatcaagccgttgaggtggattcagctgctaagctccctgtcatgcttgcattaacaagtttatggctaaggacgaactatgcagacagttttttggttggttttatcgattcacttccagaaatgtatcctgttgttaaggaatgggtggaagatgttctcatggatgaagggaatgcaacaattttgactctctttgcttgccttgtaactgtcctctacttgcgagaacgccaaaggcgtcaagtagcagcagcagccaaccccctaacaacatgatgatgtggccatgtaaatgtcggttttcatgacatgggcaggccttttgcttgagggaactcgagatgtaaaatgatggctcattgacatgactcgcgcactaaattgagtagagggacatgaaagccgctggagactcagacaatgtttgctgcctggcgaatattcacctctccaagacttagggagctatgcttgtaaaggacaacaattcttggaaactggctgctcagaaatacagtttagaaatctcacagatgttgaaaagcatgctccccccttgttgcgcatatgcatggccatggaatttcgacaagcacacacggagaacatttctggaagaggcaactttacaattggtagtttagcgatcgggtaactttccatcagcatttacacgcactgtatagttttctctggatgtgttagttgaaaaggggcggtgcatgttgtgagcagcaattttgcaatagtatccatcagagtttgaagtataaacacattttttgaatagcctgaaaatagatcttacagcagagggtgttgaatgacgacggcagccgcgcgcgcggagcagccattgccgggcggcagaagtgtgcatagcgtggttctctgtagcag

SEQ ID NO: 211349 - DNA, 2632 bp, Zea Mays
tcagaaaaatgatataggtggagaaatttagagggaatcgctgcggatagcgttaggcatgccttccccgatggctcgcatcttccaccgccatctcctcctcgccgtcgtcaccttagccgtggccgcttctctccttcgcccagctgccgcagtgcgcccatttgttttggttctctccggtgaggacttcctcaaggatccggccgcgcacccgtcccttccctctgccgactccgacgacgacgatgggtgggacgacttcgccgacgattcaccggccgccgacccgctactctctccgtcctcctgggcccccctcctcgacccaaccatctctctcccctctggcgatgagacggactcgccggccgacgcgctcttcgtcgcgggcacccgcgcgatgctatccgcagcgtctgatggagacgacgcggcgttcaccacggctgccgcgcagatcgaggcctcggcagaggcggggcacccgggcgcgcagtctgcgctcgcgttccttaccggcgccgggatgacgcgtccggcatcccggtcgctcgcgttcctgctgcacaagttcgccgccgacgcaggagatctccagtcaaagatggccctcgcgtactcctacttccgccaggagatgtatgaagaagctgttatactatacgctgaacttgcagaagctgccctaacaagctccttgatatcaaaggagccaccagtgattgaaccaatccgtcttcacagtgggactgaagaaaataaagaggccttgaggaagtcccgaggtgaggacgatgaagatttccaaatcacagagtatcaggcacagcgaggcaacgctgccaacatgtacaaattagggcttctgtattactatggactacgtgggctccgccgtgattatggaaaagcatttcattggttttctaaggctgttgagaaaggcgagacacgggcattggagcttctgggtgagatctatgctagaggtgctggagtggaaaggaactatactgaagcgtacaagtggttggcacttgctgccaagcagcaacattactcagcttacaatggattgggttatctatatgttaaaggctatggggtggagaagaaaaacttgacaaaagcaagggaacttttcgaacttgcagccgagaataaggaagccgttaatgctgggcaaccaaaagctatttatcaggtggcgaagctgttccagaaaggcattggtcttaagaggaatctccatatggcaacaatgctgtacaagtctattgctgagaggggaccctggagttcactgtccagatgggctctggagtcttatttgaaaggcgatgtagggaaagcattgctcttgtattccagaatggcagatcttggatatgaggttgcacagagcaatgctgcctggattctggataggtatagtgatcaaagtatttgcatgggagaatctagtttttgcacagatatggaaagacatcttcgtgcacatgctttgtggtggcatgcatccgagcagggtaatgagcatgctgctttgttgattggcgatgcctactactatggccggggcgtcgcaagggactatgaacgtgcagcagaggcatatatgcatgctcggtcacagtctaatgctcaagctatttttaaccttgggtacatgcatgagcatggtcatggactcccccttgatttgcacttggcaaaaagatattatgatcaagccgttgaggtggattcagctgctaagctccctgtcatgcttgcattaacaagtttatggctaaggacgaactatgcagacagttttttggttggttttatcgattcacttccagaaatgtatcctgttgttaaggaatgggtggaagatgttctcatggatgaagggaatgcaacaattttgactctctttgcttgccttgtaactgtcctctacttgcgagaacgccaaaggcgtcaagtagcagcagcagccaaccccctaacaacatgatgatgtggccatgtaaatgtcggttttcatgacatgggcaggccttttgcttgagggaactcgagatgtaaaatgatggctcattgacatgactcgcgcactaaattgagtagagggacatgaaagccgctggagactcagacaatgtttgctgcctggcgaatattcacctctccaagacttagggagctatgcttgtaaaggacaacaattcttggaaactggctgctcagaaatacagtttagaaatctcacagatgttgaaaagcatgctccccccttgttgcgcatatgcatggccatggaatttcgacaagcacacacggagaacatttctggaagaggcaactttacaattggtagtttagcgatcgggtaactttccatcagcatttacacgcactgtatagttttctctggatgtgttagttgaaaaggggcggtgcatgttgtgagcagcaattttgcaatagtatccatcagagtttgaagtataaacacattttttgaatagcctgaaaatagatcttacagcagagggtgttgaatgacgacggcagccgcgcgcgcggagcagccattgccgggcggcagaagtgtgcatagcgtggttctctgtagcag

SEQ ID NO: 211350 - DNA, 2945 bp, Zea Mays
ctacgggcagggccgcctctcgctcaagccctacgactggacctacctgcgcgttgagctcccgccgtcgttctcttctgtcaccatggatttcgctgctgacatagaccttagggagcgcttgaaaggcattccaagaaacaagcttgctattatctgtttgatgaattccaaccctcctattcctgatatatctgattcttatctggacaatttatgaaggttctttattgcagtatcaaactctctcccagatggaccttttggtaatagcaatataattaatcagccaaatctggtgcaatgcataccatttcagaaaaacacaacgttagtgctaacaaatgaccaggtatctcccggggtatggtacattgggtactttcatggccttggccctgctcgcacgcaatcaaagatgattagccgaggaaaagcacacttggtgagcactcgcattactgtaagaggatgtgccacttcagcattttggggaccctactgcaaccagacagttgacatgattggttgttctcaaccttcaatagataataactcaaggaatcttctagatctgaaagctgagaggaggaacagtttgtatactagagagcacaataggcgtattaatatcttatcacggccgaacggtttagtagaacaagaagttgcatctaacgccacgaccttggtgagaatggaaaactcgatcagttgttccatttccaatgactcaatatgcatcagacaaggcgacatgaagttctacttcttggatgtagtcaacctagcattgcagtttaaaattacagctacaaattttggagctctagggccatccttgatttgctacctgcggcataatgcctttcctcaaagagatctgcatgactattcaggtgatatcagccatgatcctttggttgtcaagttgccgaatattgggcgttggtatattgcaattgaaactgtcaacaaaacacagacgaatgttacagcatcaacacctgttctagacacaacatgtttctcattgaagtggcaattaactggatgcttgaatggaaaaactggaaccaattgctcttgggaggcatatgggctccatagggttcccaagagaagtccttctgtcccttttgagtcatattatgttcctactgatggaacagcatcactggaagatagtcacttctacttggaacaatttttaagcaattcatcccatgaacagtttgcatggacttatttctttttggatgttcctcaaggttcagccggtgcccttatccatgtccagcttaagtcagataaagacttgaactacgagttgtactcgaaatatggtggcttaccatctaatgatacttgggattattatgccagtaggacaagcagcagtaatggttcagtatttttttcattacagaattccacggattcggacatggatctatcgattttttatgctaaagagggaacttggtgctttggggtgaagcatccaagtgatacggcaaattctcaaacatacatgtctatatctcttcagggatgccataggaactgcaatcagaaaggtgtgtgtcattcctcagttgatgaaagtgggctgactttctacagcttctgcacatgtgatcgcgatcatggtggctttgattgcagcgatgagctagtttcccctaatgggcacatttggcagtctgtttttctaatcgcatcaaatggtgcagctattttacctgccttctgggccctccgacaaaaggcatttgcagaatggattctttacacatctagtggaatttccagtgcattataccattcatgtgatgttggcacttggtgcattctgtcttttcgtgtattgcagtttttggacttctggctttccttcatggctgtcgtgggtacgttcatatatatggctacaattgatgaagtttcaaagagagcaatgcatactgctgtatttatcctcactgctcttttagccgcaactggtgcaacaagatctgcaaatattggaattgttattgccattggttctgttggcctgcttatggggtggctattggagttctctacagcacgaaggtttatatgctggccctcacgaattaaccttaatatgcctcaaagttggccaagcctcagaactttgttccagattactctggagatggtgaacaaacggttccgttggatattcttacttttgggtttcatgacactgtcttttgcggctatcagctggaagctggaatcaaataacaactactggatttggcacagcatatggcacataaccatttatacttcttcattcttcttcctgtgctcaatgcgtgtcagcacaaggaacagcagtccagagtcaaactatgagctaacgaggcaagactctatgccgagatccgagccaagggaaacctaggtttgtttgtgtaggtacatgattatctgttgcagtccggagcgtaataacatatgaccaatcacacaagagggatttgggaaccacgtgtggtcagtctccgcagctgcatcgcatgagaactgtaaatagcacggggcaggtaaaacatctatttgtgggatgttcatcgagaacattgataatcatgtaaatgtgttgtaaaagtaaatccaaaatggaccgtctcttgaggttagctcatgcatcatgagtttggcacttgtcgtagtacgagtctcatacaagctttgatgtggggaacgtatccggtgaaaatcaacctctccgtgcaaccatgtaaacttctaatctgaaccacatgatgttgatccaaatagacgtgcggaggagtgagagaggggatttgaaaaaatgtgattagcaaaggacggttaagtgtaaaattatctacgctcttgcgtcccttgatcaacatcattgatcaacatcatgtagttcagat

SEQ ID NO: 211351 - DNA, 3418 bp, Zea Mays
cagcagcagattagattagcgccgtgccggaaaaacagctcctcgcctctctcccccattccccggtacctgaataaacagtgtgctggtgcagtgtgactgcgagcgcgtgggtttagtcagagcttcgcggatttcgcgggtgcttcggtcgttggactctgatggccgcggcgcggcggcaggccgcggtgctggtgctggtgctggcgttggtgatgggcgcggggttggcgccgggtccccgcggatgcgctgcgcagggggaggctgtggtggtgtccagctacgggcagggccgcctctcgctcaagccctacgactggacctacctgcgcgttgagctcccgccgtcgttctcttctgtcaccatggatttcgctgctgacatagaccttcagagggagcgcttgaaaggcattccaagaaacaagcttgctattatctgtttgatgaattccaaccctcctattcctgatatatctgattcttatctggacaatttatgaaggttctttattgcagtatcaaactctctcccagatggaccttttggtaatagcaatataattaatcagccaaatctggtgcaatgcataccatttcagaaaaacacaacgttagtgctaacaaatgaccaggtatctcccggggtatggtacattgggtactttcatggccttggccctgctcgcacgcaatcaaagatgattagccgaggaaaagcacacttggtgagcactcgcattactgtaagaggatgtgccacttcagcattttggggaccctactgcaaccagacagttgacatgattggttgttctcaaccttcaatagataataactcaaggaatcttctagatctgaaagctgagaggaggaacagtttgtatactagagagcacaataggcgtattaatatcttatcacggccgaacggtttagtagaacaagaagttgcatctaacgccacgaccttggtgagaatggaaaactcgatcagttgttccatttccaatgactcaatatgcatcagacaaggcgacatgaagttctacttcttggatgtagtcaacctagcattgcagtttaaaattacagctacaaattttggagctctagggccatccttgatttgctacctgcggcataatgcctttcctcaaagagatctgcatgactattcaggtgatatcagccatgatcctttggttgtcaagttgccgaatattgggcgttggtatattgcaattgaaactgtcaacaaaacacagacgaatgttacagcatcaacacctgttctagacacaacatgtttctcattgaagtggcaattaactggatgcttgaatggaaaaactggaaccaattgctcttgggaggcatatgggctccatagggttcccaagagaagtccttctgtcccttttgagtcatattatgttcctactgatggaacagcatcactggaagatagtcacttctacttggaacaatttttaagcaattcatcccatgaacagtttgcatggacttatttctttttggatgttcctcaaggttcagccggtgcccttatccatgtccagcttaagtcagataaagacttgaactacgagttgtactcgaaatatggtggcttaccatctaatgatacttgggattattatgccagtaggacaagcagcagtaatggttcagtatttttttcattacagaattccacggattcggacatggatctatcgattttttatgctaaagagggaacttggtgctttggggtgaagcatccaagtgatacggcaaattctcaaacatacatgtctatatctcttcagggatgccataggaactgcaatcagaaaggtgtgtgtcattcctcagttgatgaaagtgggctgactttctacagcttctgcacatgtgatcgcgatcatggtggctttgattgcagcgatgagctagtttcccctaatgggcacatttggcagtctgtttttctaatcgcatcaaatggtgcagctattttacctgccttctgggccctccgacaaaagaatggattctttacacatctagtggaatttccagtgcattataccattcatgtgatgttggcacttggtgcattctgtcttttcgtgtattgcaggtaagctacttagcacccacttgttgaatgctagtgtaaagattgttgggcatggtactggtattcatcagtactagtcatgtctatccaaatcaaggtaggctaaatatatttgttttaccaattctgttgattgtgtatcccatttgctggactttctaatcattcacaattcttctattccacattatattgtatctgagtccagtttttggacttctggctttccttcatggctgtcgtgggtacgttcatatatatggctacaattgatgaagtttcaaagagagcaatgcatactgctgtatttatcctcactgctcttttagccgcaactggtgcaacaagatctgcaaatattggaattgttattgccattggttctgttggcctgcttatggggtggctattggagttctctacagcacgaaggtttatatgctggccctcacgaattaaccttaatatgcctcaaagttggccaagcctcagaactttgttccagattactctggagatggtgaacaaacggttccgttggatattcttacttttgggtttcatgacactgtcttttgcggctatcagctggaagctggaatcaaataacaactactggatttggcacagcatatggcacataaccatttatacttcttcattcttcttcctgtgctcaatgcgtgtcagcacaaggaacagcagtccagagtcaaactatgagctaacgaggcaagactctatgccgagatccgagccaagggaaacctaggtacatgattatctgttgcagtccggagcgtaataacatatgaccaatcacacaagagggatttgggaaccacgtgtggtcagtctccgcagctgcatcgcatgagaactgtaaatagcacggggcaggtaaaacatctatttgtgggatgttcatcgagaacattgataatcatgtaaatgtgttgtaaaagtaaatccaaaatggaccgtctcttgaggttagctcatgcatcatgagtttggcacttgtcgtagtacgagtctcatacaagctttgatgtggggaacgtatccggtgaaaatcaacctctccgtgcaaccatgtaaacttctaatctgaaccacatgatgttgatccaaatagacgtgcggaggagtgagagaggggatttgaaaaaatgtgattagcaaaggacggttaagtgtaaaattatctacgctcttgcgtcccttgatcaacatcattgatcaacatcatgtagttcagat

SEQ ID NO: 211352 - DNA, 3072 bp, Zea Mays
cagcagcagattagattagcgccgtgccggaaaaacagctcctcgcctctctcccccattccccggtacctgaataaacagtgtgctggtgcagtgtgactgcgagcgcgtgggtttagtcagagcttcgcggatttcgcgggtgcttcggtcgttggactctgatggccgcggcgcggcggcaggccgcggtgctggtgctggtgctggcgttggtgatgggcgcggggttggcgccgggtccccgcggatgcgctgcgcagggggaggctgtggtggtgtccagctacgggcagggccgcctctcgctcaagccctacgactggacctacctgcgcgttgagctcccgccgtcgttctcttctgtcaccatggatttcgctgctgacatagaccttcagagggagcgcttgaaaggcattccaagaaacaagcttgctattatctgtttgatgaattccaaccctcctattcctgatatatctgattcttatctggacaatttatgaaggttctttattgcagtatcaaactctctcccagatggaccttttggtaatagcaatataattaatcagccaaatctggtgcaatgcataccatttcagaaaaacacaacgttagtgctaacaaatgaccaggtatctcccggggtatggtacattgggtactttcatggccttggccctgctcgcacgcaatcaaagatgattagccgaggaaaagcacacttggtgagcactcgcattactgtaagaggatgtgccacttcagcattttggggaccctactgcaaccagacagttgacatgattggttgttctcaaccttcaatagataataactcaaggaatcttctagatctgaaagctgagaggaggaacagtttgtatactagagagcacaataggcgtattaatatcttatcacggccgaacggtttagtagaacaagaagttgcatctaacgccacgaccttggtgagaatggaaaactcgatcagttgttccatttccaatgactcaatatgcatcagacaaggcgacatgaagttctacttcttggatgtagtcaacctagcattgcagtttaaaattacagctacaaattttggagctctagggccatccttgatttgctacctgcggcataatgcctttcctcaaagagatctgcatgactattcaggtgatatcagccatgatcctttggttgtcaagttgccgaatattgggcgttggtatattgcaattgaaactgtcaacaaaacacagacgaatgttacagcatcaacacctgttctagacacaacatgtttctcattgaagtggcaattaactggatgcttgaatggaaaaactggaaccaattgctcttgggaggcatatgggctccatagggttcccaagagaagtccttctgtcccttttgagtcatattatgttcctactgatggaacagcatcactggaagatagtcacttctacttggaacaatttttaagcaattcatcccatgaacagtttgcatggacttatttctttttggatgttcctcaaggttcagccggtgcccttatccatgtccagcttaagtcagataaagacttgaactacgagttgtactcgaaatatggtggcttaccatctaatgatacttgggattattatgccagtaggacaagcagcaggatgccataggaactgcaatcagaaaggtgtgtgtcattcctcagttgatgaaagtgggctgactttctacagcttctgcacatgtgatcgcgatcatggtggctttgattgcagcgatgagctagtttcccctaatgggcacatttggcagtctgtttttctaatcgcatcaaatggtgcagctattttacctgccttctgggccctccgacaaaagaatggattctttacacatctagtggaatttccagtgcattataccattcatgtgatgttggcacttggtgcattctgtcttttcgtgtattgcagtttttggacttctggctttccttcatggctgtcgtgggtacgttcatatatatggctacaattgatgaagtttcaaagagagcaatgcatactgctgtatttatcctcactgctcttttagccgcaactggtgcaacaagatctgcaaatattggaattgttattgccattggttctgttggcctgcttatggggtggctattggagttctctacagcacgaaggtttatatgctggccctcacgaattaaccttaatatgcctcaaagttggccaagcctcagaactttgttccagattactctggagatggtgaacaaacggttccgttggatattcttacttttgggtttcatgacactgtcttttgcggctatcagctggaagctggaatcaaataacaactactggatttggcacagcatatggcacataaccatttatacttcttcattcttcttcctgtgctcaatgcgtgtcagcacaaggaacagcagtccagagtcaaactatgagctaacgaggcaagactctatgccgagatccgagccaagggaaacctaggtttgtttgtgtaggtacatgattatctgttgcagtccggagcgtaataacatatgaccaatcacacaagagggatttgggaaccacgtgtggtcagtctccgcagctgcatcgcatgagaactgtaaatagcacggggcaggtaaaacatctatttgtgggatgttcatcgagaacattgataatcatgtaaatgtgttgtaaaagtaaatccaaaatggaccgtctcttgaggttagctcatgcatcatgagtttggcacttgtcgtagtacgagtctcatacaagctttgatgtggggaacgtatccggtgaaaatcaacctctccgtgcaaccatgtaaacttctaatctgaaccacatgatgttgatccaaatagacgtgcggaggagtgagagaggggatttgaaaaaatgtgattagcaaaggacggttaagtgtaaaattatctacgctcttgcgtcccttgatcaacatcattgatcaacatcatgtagttcagat

SEQ ID NO: 211353 - DNA, 3321 bp, Zea Mays
cagcagcagattagattagcgccgtgccggaaaaacagctcctcgcctctctcccccattccccggtacctgaataaacagtgtgctggtgcagtgtgactgcgagcgcgtgggtttagtcagagcttcgcggatttcgcgggtgcttcggtcgttggactctgatggccgcggcgcggcggcaggccgcggtgctggtgctggtgctggcgttggtgatgggcgcggggttggcgccgggtccccgcggatgcgctgcgcagggggaggctgtggtggtgtccagctacgggcagggccgcctctcgctcaagccctacgactggacctacctgcgcgttgagctcccgccgtcgttctcttctgtcaccatggatttcgctgctgacatagaccttcagagggagcgcttgaaaggcattccaagaaacaagcttgctattatctgtttgatgaattccaaccctcctattcctgatatatctgattcttatctggacaatttatgaaggttctttattgcagtatcaaactctctcccagatggaccttttggtaatagcaatataattaatcagccaaatctggtgcaatgcataccatttcagaaaaacacaacgttagtgctaacaaatgaccaggtatctcccggggtatggtacattgggtactttcatggccttggccctgctcgcacgcaatcaaagatgattagccgaggaaaagcacacttggtgagcactcgcattactgtaagaggatgtgccacttcagcattttggggaccctactgcaaccagacagttgacatgattggttgttctcaaccttcaatagataataactcaaggaatcttctagatctgaaagctgagaggaggaacagtttgtatactagagagcacaataggcgtattaatatcttatcacggccgaacggtttagtagaacaagaagttgcatctaacgccacgaccttggtgagaatggaaaactcgatcagttgttccatttccaatgactcaatatgcatcagacaaggcgacatgaagttctacttcttggatgtagtcaacctagcattgcagtttaaaattacagctacaaattttggagctctagggccatccttgatttgctacctgcggcataatgcctttcctcaaagagatctgcatgactattcaggtgatatcagccatgatcctttggttgtcaagttgccgaatattgggcgttggtatattgcaattgaaactgtcaacaaaacacagacgaatgttacagcatcaacacctgttctagacacaacatgtttctcattgaagtggcaattaactggatgcttgaatggaaaaactggaaccaattgctcttgggaggcatatgggctccatagggttcccaagagaagtccttctgtcccttttgagtcatattatgttcctactgatggaacagcatcactggaagatagtcacttctacttggaacaatttttaagcaattcatcccatgaacagtttgcatggacttatttctttttggatgttcctcaaggttcagccggtgcccttatccatgtccagcttaagtcagataaagacttgaactacgagttgtactcgaaatatggtggcttaccatctaatgatacttgggattattatgccagtaggacaagcagcagtaatggttcagtatttttttcattacagaattccacggattcggacatggatctatcgattttttatgctaaagagggaacttggtgctttggggtgaagcatccaagtgatacggcaaattctcaaacatacatgtctatatctcttcagggatgccataggaactgcaatcagaaaggtgtgtgtcattcctcagttgatgaaagtgggctgactttctacagcttctgcacatgtgatcgcgatcatggtggctttgattgcagcgatgagctagtttcccctaatgggcacatttggcagtctgtttttctaatcgcatcaaatggtgcagctattttacctgccttctgggccctccgacaaaagaatggattctttacacatctagtggaatttccagtgcattataccattcatgtgatgttggcacttggtgcattctgtcttttcgtgtattgcaggtaagctacttagcacccacttgttgaatgctagtgtaaagattgttgggcatggtactggtattcatcagtactagtcatgtctatccaaatcaagtttttggacttctggctttccttcatggctgtcgtgggtacgttcatatatatggctacaattgatgaagtttcaaagagagcaatgcatactgctgtatttatcctcactgctcttttagccgcaactggtgcaacaagatctgcaaatattggaattgttattgccattggttctgttggcctgcttatggggtggctattggagttctctacagcacgaaggtttatatgctggccctcacgaattaaccttaatatgcctcaaagttggccaagcctcagaactttgttccagattactctggagatggtgaacaaacggttccgttggatattcttacttttgggtttcatgacactgtcttttgcggctatcagctggaagctggaatcaaataacaactactggatttggcacagcatatggcacataaccatttatacttcttcattcttcttcctgtgctcaatgcgtgtcagcacaaggaacagcagtccagagtcaaactatgagctaacgaggcaagactctatgccgagatccgagccaagggaaacctaggtttgtttgtgtaggtacatgattatctgttgcagtccggagcgtaataacatatgaccaatcacacaagagggatttgggaaccacgtgtggtcagtctccgcagctgcatcgcatgagaactgtaaatagcacggggcaggtaaaacatctatttgtgggatgttcatcgagaacattgataatcatgtaaatgtgttgtaaaagtaaatccaaaatggaccgtctcttgaggttagctcatgcatcatgagtttggcacttgtcgtagtacgagtctcatacaagctttgatgtggggaacgtatccggtgaaaatcaacctctccgtgcaaccatgtaaacttctaatctgaaccacatgatgttgatccaaatagacgtgcggaggagtgagagaggggatttgaaaaaatgtgattagcaaaggacggttaagtgtaaaattatctacgctcttgcgtcccttgatcaacatcattgatcaacatcatgtagttcagat

SEQ ID NO: 211354 - DNA, 3226 bp, Zea Mays
cagcagcagattagattagcgccgtgccggaaaaacagctcctcgcctctctcccccattccccggtacctgaataaacagtgtgctggtgcagtgtgactgcgagcgcgtgggtttagtcagagcttcgcggatttcgcgggtgcttcggtcgttggactctgatggccgcggcgcggcggcaggccgcggtgctggtgctggtgctggcgttggtgatgggcgcggggttggcgccgggtccccgcggatgcgctgcgcagggggaggctgtggtggtgtccagctacgggcagggccgcctctcgctcaagccctacgactggacctacctgcgcgttgagctcccgccgtcgttctcttctgtcaccatggatttcgctgctgacatagaccttcagagggagcgcttgaaaggcattccaagaaacaagcttgctattatctgtttgatgaattccaaccctcctattcctgatatatctgattcttatctggacaatttatgaaggttctttattgcagtatcaaactctctcccagatggaccttttggtaatagcaatataattaatcagccaaatctggtgcaatgcataccatttcagaaaaacacaacgttagtgctaacaaatgaccaggtatctcccggggtatggtacattgggtactttcatggccttggccctgctcgcacgcaatcaaagatgattagccgaggaaaagcacacttggtgagcactcgcattactgtaagaggatgtgccacttcagcattttggggaccctactgcaaccagacagttgacatgattggttgttctcaaccttcaatagataataactcaaggaatcttctagatctgaaagctgagaggaggaacagtttgtatactagagagcacaataggcgtattaatatcttatcacggccgaacggtttagtagaacaagaagttgcatctaacgccacgaccttggtgagaatggaaaactcgatcagttgttccatttccaatgactcaatatgcatcagacaaggcgacatgaagttctacttcttggatgtagtcaacctagcattgcagtttaaaattacagctacaaattttggagctctagggccatccttgatttgctacctgcggcataatgcctttcctcaaagagatctgcatgactattcaggtgatatcagccatgatcctttggttgtcaagttgccgaatattgggcgttggtatattgcaattgaaactgtcaacaaaacacagacgaatgttacagcatcaacacctgttctagacacaacatgtttctcattgaagtggcaattaactggatgcttgaatggaaaaactggaaccaattgctcttgggaggcatatgggctccatagggttcccaagagaagtccttctgtcccttttgagtcatattatgttcctactgatggaacagcatcactggaagatagtcacttctacttggaacaatttttaagcaattcatcccatgaacagtttgcatggacttatttctttttggatgttcctcaaggttcagccggtgcccttatccatgtccagcttaagtcagataaagacttgaactacgagttgtactcgaaatatggtggcttaccatctaatgatacttgggattattatgccagtaggacaagcagcagtaatggttcagtatttttttcattacagaattccacggattcggacatggatctatcgattttttatgctaaagagggaacttggtgctttggggtgaagcatccaagtgatacggcaaattctcaaacatacatgtctatatctcttcagggatgccataggaactgcaatcagaaaggtgtgtgtcattcctcagttgatgaaagtgggctgactttctacagcttctgcacatgtgatcgcgatcatggtggctttgattgcagcgatgagctagtttcccctaatgggcacatttggcagtctgtttttctaatcgcatcaaatggtgcagctattttacctgccttctgggccctccgacaaaaggtaagctacttagcacccacttgttgaatgctagtgtaaagattgttgggcatggtactggtattcatcagtactagtcatgtctatccaaatcaagtttttggacttctggctttccttcatggctgtcgtgggtacgttcatatatatggctacaattgatgaagtttcaaagagagcaatgcatactgctgtatttatcctcactgctcttttagccgcaactggtgcaacaagatctgcaaatattggaattgttattgccattggttctgttggcctgcttatggggtggctattggagttctctacagcacgaaggtttatatgctggccctcacgaattaaccttaatatgcctcaaagttggccaagcctcagaactttgttccagattactctggagatggtgaacaaacggttccgttggatattcttacttttgggtttcatgacactgtcttttgcggctatcagctggaagctggaatcaaataacaactactggatttggcacagcatatggcacataaccatttatacttcttcattcttcttcctgtgctcaatgcgtgtcagcacaaggaacagcagtccagagtcaaactatgagctaacgaggcaagactctatgccgagatccgagccaagggaaacctaggtttgtttgtgtaggtacatgattatctgttgcagtccggagcgtaataacatatgaccaatcacacaagagggatttgggaaccacgtgtggtcagtctccgcagctgcatcgcatgagaactgtaaatagcacggggcaggtaaaacatctatttgtgggatgttcatcgagaacattgataatcatgtaaatgtgttgtaaaagtaaatccaaaatggaccgtctcttgaggttagctcatgcatcatgagtttggcacttgtcgtagtacgagtctcatacaagctttgatgtggggaacgtatccggtgaaaatcaacctctccgtgcaaccatgtaaacttctaatctgaaccacatgatgttgatccaaatagacgtgcggaggagtgagagaggggatttgaaaaaatgtgattagcaaaggacggttaagtgtaaaattatctacgctcttgcgtcccttgatcaacatcattgatcaacatcatgtagttcagat

SEQ ID NO: 211355 - DNA, 1469 bp, Zea Mays
cagcagcagattagattagcgccgtgccggaaaaacagctcctcgcctctctcccccattccccggtacctgaataaacagtgtgctggtgcagtgtgactgcgagcgcgtgggtttagtcagagcttcgcggatttcgcgggtgcttcggtcgttggactctgatggccgcggcgcggcggcaggccgcggtgctggtgctggtgctggcgttggtgatgggcgcggggttggcgccgggtccccgcggatgcgctgcgcagggggaggctgtggtggtgtccagctacgggcagggccgcctctcgctcaagccctacgactggacctacctgcgcgttgagctcccgccgtcgttctcttctgtcaccatggatttcgctgctgacatagaccttcagagggagcgcttgaaaggcattccaagaaacaagcttgctattatctgtttgatgaattccaaccctcctattcctgatatatctgattcttatctggacaatttatgaaggttctttattgcagtatcaaactctctcccagatggaccttttggtaatagcaatataattaatcagccaaatctggtgcaatgcataccatttcagaaaaacacaacgttagtgctaacaaatgaccaggtatctcccggggtatggtacattgggtactttcatggccttggccctgctcgcacgcaatcaaagatgattagccgaggaaaagcacacttggtgagcactcgcattactgtaagaggatgtgccacttcagcattttggggaccctactgcaaccagacagttgacatgattggttgttctcaaccttcaatagataataactcaaggaatcttctagatctgaaagctgagaggaggaacagtttgtatactagagagcacaataggcgtattaatatcttatcacggccgaacggtttagtagaacaagaagttgcatctaacgccacgaccttggtgagaatggaaaactcgatcagttgttccatttccaatgactcaatatgcatcagacaaggcgacatgaagttctacttcttggatgtagtcaacctagcattgcagtttaaaattacagctacaaattttggagctctagggccatccttgatttgctacctgcggcataatgcctttcctcaaagagatctgcatgactattcaggtgatatcagccatgatcctttggttgtcaagttgccgaatattgggcgttggtatattgcaattgaaactgtcaacaaaacacagacgaatgttacagcatcaacacctgttctagacacaacatgtttctcattgaagtggcaattaactggatgcttgaatggaaaaactggaaccaattgctcttgggaggcatatgggctccattggaagacggcggtccgtagacaagagcaagacccaaaggccatctttcagaatcgtcggtgcatgagcatg

SEQ ID NO: 211356 - DNA, 1442 bp, Zea Mays
ccaggcccagtgtgcgaggacgaggacgacgcgggcgcacgcagcagcaagctctgaccctgaaagctgaaaccgctccacgccctccccctccgcgcagagccagccaagccaaccagccagtcagaagaggaaccggggagcggcagctgcagcggccgagggcggagcacgcgagataccaaagggtagagaagcctcggaatgacacgccaatcagccagaatgagatcagaatcactactcaggggaggatgaggaactatatcagctatgggatgtcgctgcttgaggaaaatggacatgatgagattagtatcaaggccatgggacgggccataaataagacagttatggttgttgaattgatcaagagaagggttggaggtcttcatcagaacactgctactgaatctgttgatatcacagacacatgggaacctttggaagaaggccttctcccactagagacaactcgccatgtgtcgatgatcactgtgacactgtcaaagaaccctctggatacatcatctccaggataccagccacctatcccagctgaagaggtgaaacctgcttttgactatgatcatgaagaatcgtatcccactggtcgtggaagaggacgtggtggtggcagaagaggcaggggaagaggcatgagcaatggcccccctccacctgcttatggttacaacgaagagtgggaggaggaaggagattattataacagagggcgcgggagagggcggctacgtggacgaggtgggagagggcgtggtggctactacggaggtgggaggcgtggtggctacggttatgattatggctatgcccccagaggcgggtactatgaagagcaagacgaatactatgatgagcccgaggaatatgctcctccccctggccgcggacgtggcagagggagaaggggcggcatgccttggcgtgggcgtggaggccgcgggccaccgcgcggtggccgagggagctactactaggcgcgagaaatgcgacgtgccgaatgcgtgtgcttattagttatctgttagcgtttgctgcagtgctcttctatggagctccgaccccggactggaattatctcgtaggcccttccaggtgctactctacttcagctgctgtccctgtgcaactcgtccgggcaagttttgtggctcgctcgtggttttgtagctaggttaagcgagtgaagttacactcggtagcgcagtatttcctgcgagattgtttattcttctgttaatgtacctaccttactatttcgtttggattatggatactgggtgcatccgtttcatgtttattctcctggtaatctgtagctttaccgacagtgtgtacgctgatgcctgctgccatacggggcagaagttttttttatgctgcagaacagagcagcagggaaaaaaagtcacaataca

SEQ ID NO: 211357 - DNA, 2321 bp, Zea Mays
ggctctgttaatgattttctggagtctggacggaagccgtagccgatagggaagtattcgtgttcgtgtccgactccagtggacaaggcatggcggggagaggcggcggcggcaaaggcgccgcagggaggatgatgtcgctgcaggaattcgtgtcctgcatgcagccgctcatcgatctcgagaaggcggcggagatatcggcggagtccgagacgagcgctaagagcctggagaggagggggtgcgtcattgccaacctcaagtgcactgatgcccagaatagacgggactgatggggaagacgctcctggagttccaacccaacaaaggcgacgttctcccgtctcacaagtttggaacacatgatgtggttgccctgaagccaaataaggcagatgctggatctgcttcacttggtcaaggtgtagtttatcgcttaaaggattcttccattactgttgcttttgatgatattcctgaagatggcttaaacagccctctgcgtcttgagaagcttgcaaatgaggtcacttatcgcaggatgaaggatgcactaattgaacttagcaaggctgtccaaacaggaccttgtgcaaaccttgttcctgttttatttggagagaaggcacccatgcgctccaaggatgctatgaaattcagtccattcaacaagaacttggatgattcacagaaagaggctatttcgaaggctcttggatcaagggatgttttcttgcttcacggacctcctggaactgggaaaacaacaactattattgagataatattgcaggaggtcaagcgtggatcaaagattcttgcctgtgctgcttccaatattgctgtggataatattgttgagcgacttgcacgatacagaacaaaattggtgaggttagggcaccctgctcgtttactgcctcaagtgctcgacagcgctcttgatgcacaggttttacgagctgataatagtagcttggcaggagacattcgcaaggaaatgaaggtgctcaatagcaaattgctgaaggctaaagataggaacactaaacgggacatcaggaaagagctcaaaacgcttgcaaaagaggagagaaaacgacagcagcttgcagtcactgatgtactgaaaaatgcagatgttgtgctgaccactctgactggtgcatcttcgaaaaagttaaacggaattacatttgatttggttgttattgatgaagctgcccaggcacttgaggtggcatgctggatagccttgttgaaagggccgagatgtattcttgctggagaccatcttcaacttcctccaacaattcaaagtgttgaggctgaaaagaaggggatgggaaagacactctttgaacgccttactgaagcttatggagaggaaatcacatccatgctcactgtgcagtacagaatgcacgagcacattatgagctggtcatctaaagaactttacaataataagatcaaagcacattctagtgttgctgggcatatgctctatgatctagaagaagtcactagatcttcttcaacagaaccaactattgtactcattgacactacagggtgtgatatggaagaagtaaaagatgaagaggagagcaccatgaatgagggcgaggcagcagtatccattgctcatgccaagttgcttgttgagagtggcgttaatgcttctgatattggaataattacgccttacgctgcacaggtaacctgcttgaagatgatgagaaacaaagatgccaagttgaaagatttagagatatctacagttgatgggtttcaaggccgggagaaagaagccatcatcatttctatggtccggtctaactcaaagaaagaggtggggttcttgagcgatcacaggcggatgaacgtggcggtgacgcgagccaggaggcagtgctgcctggtgtgcgacgtggagaccgtgagcagcgacaggttcctgaaacgcttggtcgaatacttcgaggagaacggggagtacttgagtgcttcagaataccagagcagctgactggcgtcgatcagatccattcagctcttcttctagtggctcgtggtggcatctggctggcatgtccgtggagcaagtggataggatccgcatggagtcttggagaacacaatatcaagctttggttcctagatatctcagcttttcttttcttttctcttggtgaacgcataaatgatgtattgttgtgacgttgccaatgccatgggaatgagatctttaacaaaacaaaaaacaaaaaaacaagagggcagtggagaatgtgctgtggcatagtgtgtgtgct

SEQ ID NO: 211358 - DNA, 2281 bp, Zea Mays
tagccgatagggaagtattcgtgttcgtgtccgactccagtggacaaggcatggcggggagaggcggcggcggcaaaggcgccgcagggaggatgatgtcgctgcaggaattcgtgtcctgcatgcagccgctcatcgatctcgagaaggcggcggagatatcggcggagtccgagacgagcgctaagagcctggagaggagggggtgcgtcattgccaacctcaagtgcactgatgcccagaatagacgggactgatggggaagacgctcctggagttccaacccaacaaaggcgacgttctcccgtctcacaagttggaacacatgatgtggttgccctgaagccaaataaggcagatgctggatctgcttcacttggtcaaggtgtagtttatcgcttaaaggattcttccattactgttgcttttgatgatattcctgaagatggcttaaacagccctctgcgtcttgagaagcttgcaaatgaggtcacttatcgcaggatgaaggatgcactaattgaacttagcaaggctgtccaaacaggaccttgtgcaaaccttgttcctgttttatttggagagaaggcacccatgcgctccaaggatgctatgaaattcagtccattcaacaagaacttggatgattcacagaaagaggctatttcgaaggctcttggatcaagggatgttttcttgcttcacggacctcctggaactgggaaaacaacaactattattgagataatattgcaggaggtcaagcgtggatcaaagattcttgcctgtgctgcttccaatattgctgtggataatattgttgagcgacttgcacgatacagaacaaaattggtgaggttagggcaccctgctcgtttactgcctcaagtgctcgacagcgctcttgatgcacaggttttacgagctgataatagtagcttggcaggagacattcgcaaggaaatgaaggtgctcaatagcaaattgctgaaggctaaagataggaacactaaacgggacatcaggaaagagctcaaaacgcttgcaaaagaggagagaaaacgacagcagcttgcagtcactgatgtactgaaaaatgcagatgttgtgctgaccactctgactggtgcatcttcgaaaaagttaaacggaattacatttgatttggttgttattgatgaagctgcccaggcacttgaggtggcatgctggatagccttgttgaaagggccgagatgtattcttgctggagaccatcttcaacttcctccaacaattcaaagtgttgaggctgaaaagaaggggatgggaaagacactctttgaacgccttactgaagcttatggagaggaaatcacatccatgctcactgtgcagtacagaatgcacgagcacattatgagctggtcatctaaagaactttacaataataagatcaaagcacattctagtgttgctgggcatatgctctatgatctagaagaagtcactagatcttcttcaacagaaccaactattgtactcattgacactacagggtgtgatatggaagaagtaaaagatgaagaggagagcaccatgaatgagggcgaggcagcagtatccattgctcatgccaagttgcttgttgagagtggcgttaatgcttctgatattggaataattacgccttacgctgcacaggtaacctgcttgaagatgatgagaaacaaagatgccaagttgaaagatttagagatatctacagttgatgggtttcaaggccgggagaaagaagccatcatcatttctatggtccggtctaactcaaagaaagaggtggggttcttgagcgatcacaggcggatgaacgtggcggtgacgcgagccaggaggcagtgctgcctggtgtgcgacgtggagaccgtgagcagcgacaggttcctgaaacgcttggtcgaatacttcgaggagaacggggagtacttgagtgcttcagaataccagagcagctgactggcgtcgatcagatccattcagctcttcttctagtggctcgtggtggcatctggctggcatgtccgtggagcaagtggataggatccgcatggagtcttggagaacacaatatcaagctttggttcctagatatctcagcttttcttttcttttctcttggtgaacgcataaatgatgtattgttgtgacgttgccaatgccatgggaatgagatctttaacaaaacaaaaaacaaaaaaacaagagggcagtggagaatgtgctgtggcatagtgtgtgtgct

SEQ ID NO: 211359 - DNA, 964 bp, Zea Mays
gatagggaagtattcgtgttcgtgtccgactccagtggacaaggcatggcggggagaggcggcggcggcaaaggcgccgcagggaggatgatgtcgctgcaggaattcgtgtcctgcatgcagccgctcatcgatctcgagaaggcggcggagatatcggcggagtccgagacgagcgctaagagcctggagaggagggggtgcgtcattgccaacctcaagtgcactgatgcccagacgggactgatggggaagacgctcctggagttccaacccaacaaaggcgacgttctcccgtctcacaagtttggaacacatgatgtggttgccctgaagccaaataaggcagatgctggatctgcttcacttggtcaaggtgtagtttatcgcttaaaggattcttccattactgttgcttttgatgatattcctgaagatggcttaaacagccctctgcgtcttgagaagcttgcaaatgaggtcacttatcgcaggatgaaggatgcactaattgaacttagcaaggctgtccaaacaggaccttgtgcaaaccttgttcctgttttatttggagagaaggcacccatgcgctccaaggatgctatgaaattcagtccattcaacaagaacttggatgattcacagaaagaggctatttcgaaggctcttggatcaagggatgttttcttgcttcacggacctcctggaactgggaaaacaacaactattattgagataatattgcaggaggtcaagcgtggatcaaagattcttgcctgtgctgcttccaatattgctgtggataatattgttgagcgacttgcacgatacagaacaaaattggtgaggttagggcaccctgctcgtttactgcctcaagtgctcgacagcgctcttgatgcacagaagtcatatgatctttgacctgtgatacctccatgtgttcatatgacttctgggacca

SEQ ID NO: 211360 - DNA, 2590 bp, Zea Mays
gatagggaagtattcgtgttcgtgtccgactccagtggacaaggcatggcggggagaggcggcggcggcaaaggcgccgcagggaggatgatgtcgctgcaggaattcgtgtcctgcatgcagccgctcatcgatctcgagaaggcggcggagatatcggcggagtccgagacgagcgctaagagcctggagaggagggggtgcgtcattgccaacctcaagtgcactgatgcccagacgggactgatggggaagacgctcctggagttccaacccaacaaaggcgacgttctcccgtctcacaagtttggaacacatgatgtggttgccctgaagccaaataaggcagatgctggatctgcttcacttggtcaaggtgtagtttatcgcttaaaggattcttccattactgttgcttttgatgatattcctgaagatggcttaaacagccctctgcgtcttgagaagcttgcaaatgaggtcacttatcgcaggatgaaggatgcactaattgaacttagcaaggctgtccaaacaggaccttgtgcaaaccttgttcctgttttatttggagagaaggcacccatgcgctccaaggatgctatgaaattcagtccattcaacaagaacttggatgattcacagaaagaggctatttcgaaggctcttggatcaagggatgttttcttgcttcacggacctcctggaactgggaaaacaacaactattattgagataatattgcaggaggtcaagcgtggatcaaagattcttgcctgtgctgcttccaatattgctgtggataatattgttgagcgacttgcacgatacagaacaaaattggtgaggttagggcaccctgctcgtttactgcctcaagtgctcgacagcgctcttgatgcacaggttttacgagctgataatagtagcttggcaggagacattcgcaaggaaatgaaggtgctcaatagcaaattgctgaaggctaaagataggaacactaaacgggacatcaggaaagagctcaaaacgcttgcaaaagaggagagaaaacgacagcagcttgcagtcactgatgtactgaaaaatgcagatgttgtgctgaccactctgactggtgcatcttcgaaaaagttaaacggaattacatttgatttggttgttattgatgaagctgcccaggcacttgaggtggcatgctggatagccttgttgaaagggccgagatgtattcttgctggagaccatcttcaacttcctccaacaattcaaagtgttgaggctgaaaagaaggggatgggaaagacactctttgaacgccttactgaagcttatggagaggaaatcacatccatgctcactgtgcagtacagaatgcacgagcacattatgagctggtcatctaaagaactttacaataataagatcaaagcacattctagtgttgctgggcatatgctctatgatctagaagaagtcactagatcttcttcaacagaaccaactattgtactcattgacactacagggtgtgatatggaagaagtaaaagatgaagaggagagcaccatgaatgagggcgaggcagcagtatccattgctcatgccaagttgcttgttgagagtggcgttaatgcttctgatattggaataattacgccttacgctgcacaggtttttggtcccttagactccctatgcatattcaagataatagctaattttaccagtcatgcactcatgcctgcagcacatgatcttctggtgaataatcatgctttatacttcctgtattgtcgtcatgactccctatgcatatgtctacattcatttgaatgtagacggaagaaaatagggctagaaaatatgtctacattttcttgcaattgagcttttaattcatctggttgttttgcatttatttatggttggcttcttgagggcttcacctagttctgaaggcctgaattattgaatggctcaataccataggtaacctgcttgaagatgatgagaaacaaagatgccaagttgaaagatttagagatatctacagttgatgggtttcaaggccgggagaaagaagccatcatcatttctatggtccggtctaactcaaagaaagaggtggggttcttgagcgatcacaggcggatgaacgtggcggtgacgcgagccaggaggcagtgctgcctggtgtgcgacgtggagaccgtgagcagcgacaggttcctgaaacgcttggtcgaatacttcgaggagaacggggagtacttgagtgcttcagaataccagagcagctgactggcgtcgatcagatccattcagctcttcttctagtggctcgtggtggcatctggctggcatgtccgtggagcaagtggataggatccgcatggagtcttggagaacacaatatcaagctttggttcctagatatctcagcttttcttttcttttctcttggtgaacgcataaatgatgtattgttgtgacgttgccaatgccatgggaatgagatctttaacaaaacaaaaaacaaaaaaacaagagggcagtggagaatgtgctgtggcatagtgtgtgtgct

SEQ ID NO: 211361 - DNA, 1475 bp, Zea Mays
gtttttgcctctgttatgcaggacaattctttgtttccctttggttagatcaccttttgcctatgttattacagggcgattatttcttttcccagcatcaagaaatgaggttttacgagctgataatagtagcttggcaggagacattcgcaaggaaatgaaggtgctcaatagcaaattgctgaaggctaaagataggaacactaaacgggacatcaggaaagagctcaaaacgcttgcaaaagaggagagaaaacgacagcagcttgcagtcactgatgtactgaaaaatgcagatgttgtgctgaccactctgactggtgcatcttcgaaaaagttaaacggaattacatttgatttggttgttattgatgaagctgcccaggcacttgaggtggcatgctggatagccttgttgaaagggccgagatgtattcttgctggagaccatcttcaacttcctccaacaattcaaagtgttgaggctgaaaagaaggggatgggaaagacactctttgaacgccttactgaagcttatggagaggaaatcacatccatgctcactgtgcagtacagaatgcacgagcacattatgagctggtcatctaaagaactttacaataataagatcaaagcacattctagtgttgctgggcatatgctctatgatctagaagaagtcactagatcttcttcaacagaaccaactattgtactcattgacactacagggtgtgatatggaagaagtaaaagatgaagaggagagcaccatgaatgagggcgaggcagcagtatccattgctcatgccaagttgcttgttgagagtggcgttaatgcttctgatattggaataattacgccttacgctgcacaggtaacctgcttgaagatgatgagaaacaaagatgccaagttgaaagatttagagatatctacagttgatgggtttcaaggccgggagaaagaagccatcatcatttctatggtccggtctaactcaaagaaagaggtggggttcttgagcgatcacaggcggatgaacgtggcggtgacgcgagccaggaggcagtgctgcctggtgtgcgacgtggagaccgtgagcagcgacaggttcctgaaacgcttggtcgaatacttcgaggagaacggggagtacttgagtgcttcagaataccagagcagctgactggcgtcgatcagatccattcagctcttcttctagtggctcgtggtggcatctggctggcatgtccgtggagcaagtggataggatccgcatggagtcttggagaacacaatatcaagctttggttcctagatatctcagcttttcttttcttttctcttggtgaacgcataaatgatgtattgttgtgacgttgccaatgccatgggaatgagatctttaacaaaacaaaaaacaaaaaaacaagagggcagtggagaatgtgctgtggcatagtgtgtgtgct

SEQ ID NO: 211362 - DNA, 1082 bp, Zea Mays
gcatcctgctacaggcagttgtttagacgggccgagatgtattcttgctggagaccatcttcaacttcctccaacaattcaaagtgttgaggctgaaaagaaggggatgggaaagacactctttgaacgccttactgaagcttatggagaggaaatcacatccatgctcactgtgcagtacagaatgcacgagcacattatgagctggtcatctaaagaactttacaataataagatcaaagcacattctagtgttgctgggcatatgctctatgatctagaagaagtcactagatcttcttcaacagaaccaactattgtactcattgacactacagggtgtgatatggaagaagtaaaagatgaagaggagagcaccatgaatgagggcgaggcagcagtatccattgctcatgccaagttgcttgttgagagtggcgttaatgcttctgatattggaataattacgccttacgctgcacaggtaacctgcttgaagatgatgagaaacaaagatgccaagttgaaagatttagagatatctacagttgatgggtttcaaggccgggagaaagaagccatcatcatttctatggtccggtctaactcaaagaaagaggtggggttcttgagcgatcacaggcggatgaacgtggcggtgacgcgagccaggaggcagtgctgcctggtgtgcgacgtggagaccgtgagcagcgacaggttcctgaaacgcttggtcgaatacttcgaggagaacggggagtacttgagtgcttcagaataccagagcagctgactggcgtcgatcagatccattcagctcttcttctagtggctcgtggtggcatctggctggcatgtccgtggagcaagtggataggatccgcatggagtcttggagaacacaatatcaagctttggttcctagatatctcagcttttcttttcttttctcttggtgaacgcataaatgatgtattgttgtgacgttgccaatgccatgggaatgagatctttaacaaaacaaaaaacaaaaaaacaagagggcagtggagaatgtgctgtggcatagtgtgtgtgct

SEQ ID NO: 211363 - DNA, 1763 bp, Zea Mays
aactgatttatggatatttacattctggaagacactagagaatatagttgcagaggcgatgtggcagatgaatttggaagaagccatggaactggggccatacccagagcgtgttggtgagccagactgtagctattacatgaggactggcatgtgcaggtttgggatgacctgtaaatttaatcacccagcagaccgaaagctggctgttgctgctgcaagaatgaagggagaatatcctcaaagaattgggcagcctgaatgtcaatactatctgaagactggcacgtgcaagtttggagcaacttgcaagtttcatcatccccgagaaaaggctgcaatggcaactcgagttcagttgaatgaactgggctacccactccgcccgaatgaaaaagagtgtgcttattatttaagaacagggcagtgcaagtttggaagcacatcatgcttaccaaggggctgtaacaagctggcccttgtcgagatctgcttctttcattgcaagtccaaggtggccaggtcattcaagttatgcacaagtgattgttcctcccgggcttgttcaggtcccagggtggagtccttatactgcgcaaattggttcttcatcctcggaggaccaacaacggacacctggagctgctcaatactatactggctcacgccaaagtggtactagtataggcgatcaaggaatgttttcatcctaccaagcaggttctgttcctgttggactttatgcagtacagagggagaatttatttccagagagacctgaccaacctgaatgtcagttctatatgaagaccggagactgtaagtttggtgctgtatgcaagttccatcatcccagggagcgaataattcctactcccaattgtgcactgagtccattaggcctacctttgcgcccgggagagccaatatgcagtttctacaatcgctacggcatgtgcaagttcggtccaaattgcaaattcgatcacccaatgggaaatgccatgtacggccaggctccatcgccagctagcgaggccccagctcctcggcgcatgctggcacatgtaccgccgtcgcacccagaagcatcgcctgatggtggttccggaaggtctaggaggattgcccactctgattcccagcaaataccctctggtgaaaggagcgctgagagagaggcgtcctaggccatcctcggtgtcttcgttccccattcttgactggagtaaccatctgcaaccaacaacattcgaggatccgaagctgtacaggtcttttgccccacctctgagctttacataccggagcttgcttcaacgtgtattgcattcaggcaggaaaaagttcttgcctgttcgggatgctcatttgctcccccactgaaacgggaacaaacctaccttatttaaaacatatgtatggatggaacctactcacctctggacattcaaacccattcgagtcatgtgcactggtcccggtgctgtagttatagagctgtctttgcatggacaaagctgttgcgaaactgactggggatgcgcaagcataacctcttttgttaattattgtctcgttttttttttctcggcatttatctctttttcataagggcagccccgcactctgaaagtgtgcgttttgaagattgggaaaataataggttgccatcgtatgctctgtattacccaccatgctttaaactcagttatttgagagtcgtttttatcttggtggtcctgacagggactgtttatttt

SEQ ID NO: 211364 - DNA, 988 bp, Zea Mays
aaaacatcagctttctattagagaagagagaataacaatcccagaaatattagaggatgagtggttcaaaaagggctacaagcgcccagaatttgatgaacaatatgacaccacattggatgatgtggatgccgtcttcaatgattcagaagagcaccatgtgacagaaaagaaagaagaagaaccagtagctctgaacgcattcgaactgatttcgatgtcagcgggcctaaaccttggaaacttatttgactcagagcaggagttcaaaagagaaacaaggtttacatcaaaatgtccccccaaagaaattgtccgcaagatcgaggaagctgcaaaacctctaggatttgatgttcagaagaaaaattacaagttgaggctcgaaaaggtaaaggcagggaggaagggaaacctcaacgttgctactgagatactgcaagttgcgccctctctccacatggtagaagtccgaaaagcaaagggtgacactctggaatttcataagttctacaagaacctttccaagaccttgaaggacgtcgtctggaaatccgacgatcttcaaacgcaacatgcttcttagcagaacctcagagaggaggaatggcaaactattttgtgcaccatcctttcaagcaaactattctgcatgtaacggtgggtgcccaggaaattgcgctggtgctccaccatcgttgtatatgctgcgtcttgagttgcttgctgtagctgaagggaagttcattcagtaggttttgagtatgagttttgtatatccgtatatgcctatgactatgagccgtgctggaacactatgatcagaaactgcgaaatggagcccagaatgttcttgccatcttgctccagttctcagcaccgggcttaacttgccttgcattttttgaagaagaaaaatggactactgaattgggaactcgtattagtattcggccatcatttcagtagtctttttttttgtaccatg

SEQ ID NO: 211365 - DNA, 3291 bp, Zea Mays
agaaaatcattaacagagccgtggtggactgagcccacgttgtccaaagtgaccgatcaaagcagtgttgttagttattacaggccaaaagactcggcccatgtcgatgccgtggcccgtgtggatcagatgacttggcggctacgaagggttctctctttccattcctccgcgccgccactagctgtcctaaaccctaccaccacttgagcctccaccttctccgcgtctcaccttcttctccgttctccttccgctcccctcttcacaacgaagccctagtgtcccgcgacatggcatctggtctggaggagaaactcgcggggctctcaacgggcggcgacgggcaaaatcctccgccggcgggtgagggcggagaggagccgcagctctcgaagaatgcgaagaagagagaggagaagaggaagaagctggaagaggagcggaggctcaaggaggaagagaagaagaacaaggctgcggctgccagtggaaaacctcagaaggcatctgctgctgacgatgatgacatggatcccactcaatactatgagaataggctcaaggctcttgattcactgaaggccacaggtgtaaacccctatccccataagttcccggttggcatttctgtacccgaatacattgagaagtacaggaccttgagcgagggggagaagcttacagatgtggcagagtgtttagctgggaggatcatgaacaagagaacatcgtcgtcgaagctattcttttatgatctttatggtggtggcatgaaggttcaagtgatggctgatgccaggacctcagagttggatgaagctgaattttctaagtaccactcaggtgtgaagcgaggtgatattgttggcatatgtggatatccaggaaaaagcaaccgaggggagcttagtgtatttccaaagagatttgtcgtcctctctccatgtcttcatatgatgcctcgacagaagggtgaaggaagtgcagtgcctgtaccgtggactccaggaatgggtaggaacatcgaaaattatgttttgagggaccaggaaactcggtatcgtcaaaggtatcttgatcttatggtaaaccatgaagtgaggcacatcttcaagacacgatctaaaattgtctcatttatccgaaagtttcttgatgaccgtgaatttttggaggtggagactccgatgatgaacatgattgctggtggagcagctgcaaggccttttgttacacatcacaatgaattaaacatgcggctttttatgcgcattgctcctgaattatatctgaaggaactggttgttggtggattggaccgtgtttatgaaattggaaagcaattcaggaatgaaggaattgatttaacacacaatcctgaattcacaacttgtgaattttatatggcgtatgcagattataatgatttgatggagcttactgaaaccatgttgtcaggcatggttaaggacctgacaggtggctataagataaaatatcatgcaaatggagttactaaccccccaatagaaattgatttcacgcctcccttcagaaggatagatatgattaaagatttggaggctatggccaatctcagtataccaaaagatctatcaagtgatgaagcgaatcgttatttgatagaagcatgtgtgaagtatgatgtgaaatgtccacctccccaaacgacatcgcggttgcttgacaagttggttggccatttcttggaggagacatgtgtgaatccaacatttatcatcaatcatccagagataatgagtccattagcaaagtggcataggtcccgacctggattgactgagaggttcgagttgtttgttaacaaacatgaggtgtgcaacgcatacacagagttgaacgatcctgttgtgcagaggcaacggtttgaggaacaactaaaggaccgtcaatctggtgatgacgaagctatggctttggacgaaacattctgtactgcccttgagtatggtttggcaccaacaggtggttggggcttgggaattgatcgcctcacgatgttgctaacagattctcagaacattaaggaagtacttctattcccggctatgaagcctcaagagtagtaatccacagccaaaagccacaaaagggtatgcttacgagtctgtaacttttaagactctttgtttgctcggttgaaaacattaaagcatgtaaggcattttttctatgcatttttcaagttgaaagaacatttaaataatgcacctttctgaggtatggtttagagttagggtgtctataattcaatacacatttttaggccaagtgacctcttaacgtttttctgcatttagactgtgctcaggatcgttcaactctgtgtatgtgtataggtgttctcacagactttttaaggttgtataaaattatgacttccaccacagaaattataaacaagattatattttgttataatgtatgtgatcagaaaataactgctagcaacccacaattaggtgggtccaattgagatagaacattaaaagctacattaccattttcatcgtgactaatgagtaatgacattgacatcccatattttacccccatgccttggcaccagcaaagaacgatgattgcctattaccctgtgctgggcttgaggtggatgagggaacatacaccctacactatggtgatatttcaagatatctgtatgattctagattcactgggcgtgctgtgtccattgttctactttattggaagttctgtttgagatgctgcatcttcagttgtctactgccccggtgctgattatgttgtataattcagacgtgctcattgttgattttgtacacgagtttgcactgcataggcagataggctggaggatacgctaacttggatatttgtgtcacagctcaaagcaaacatgatgctacataggctggaggatacatcaaagttggacctgttgtgaattatacttatttttgctcttgtgcgtgcgaggtttccatttttcattatttgtatttcccagcagacagttattaactaaatactgtaacgtcacagtaagttcagtttaacttcaaacattgtagttttgaggagattgcaaatatttcgggtcaatgcaattggtgcttttgatagccatgcaaaatgcctcttctcgtcatgatcgtgtttgctttatgctgatgttcagccatcattcaggttaaactggcatgtaaatgtaaaccgtgcaatcagctgggtttgatattataaattttaattggcaataca

SEQ ID NO: 211366 - DNA, 3668 bp, Zea Mays
tagaggtgaatccaacggcgtaacacccttctccctccacacccttcctctccaaaaaacgaacatcaaaatgcgcgagagaaacggagcaaagtcgaaaggggaaaaatgagttaaacccaaatcgacaccaaacccactccaggaacacccgcctccgccgccgccgccgccatcgccggcggccactacaagcgcggcgtccggagacagtactgcgctaccaacccctagagcctggattctgatgagccctccatggcctgtcatatctgtcccctcttcaatctccgactcttgctgctgctcggcgcggttctcgggaacggcggcctcggccggggcggcggagcggaggcttcagatcgggcggacccggacccgtactcgatcctgatgtggcacgactactcgccgccgtcgcccccgctcccgcccccggacccgccgtcgccgacggcgacatgtgagggggacctccacgggaagggtgacttccacacgcgctgcgaggtctccgaggaagtggagctggacggcgacgtctacatcacggggaacggcagcctcgtgctcctctctggcgcctccctgacctgcgagaagtacgggtgcgttatatccgccaatttctcaggcgaggtgcgcctcagccgcggcgtccgcgtcacagccggcagggtctcgctggttgccaccaacatcacggtcgccgacacggtcgtcgtgaataccaccgcgctcgctggtgatccgccagaccggaccagtggcgttcccacggggacgcacggcgacggtggcgggcacggtggtcgtggcgccagctgcttcgtcaaggaagggcagacgcaggaggattcatggggcggcgatgcctatgcatggtctgacctcgaacacccctggagctacgggagcaaagggggctcgaccagcgttgagaaggactatggtggtgacggtggtggcatcgtgtggctgtttgctgaggacctggtcatgaatggcacagttctcgccaacggtggggatagcaatgagaagggtggtggtggttctggagggagcatctttataagggctgcatcgatgcatggtggtggcaagatcagtgcctctgggggtgatggtttggctgggggaggtggagggcgagtttctattaacgtttttagtagacatgatgacacccagatttttgttcacgggggaaggagttcaggctgtccagataatgcaggagctgctggaactctttatgaagcagtaccaaaaagtcttattgtcagtaacaacaatctgagtacacaaacagacactcttcttttggagtttccaaatcaaccactgtggacaaatgtttttgtaagaaatcgtgccaaagttgctgtccccttgctctggagtcgcgttcaggtcgaagggcaacttagccttctttctggtgctattctaacttttggtctcactcgttatccatactcggagtttgaactgatggctgaggagcttcttatgagtgactcaacaatcaaggtgttcggtgctttgagaatgtctgtaaagatgctccttatgtggaactccagaatggaaattgatggcggtggagattcgatagttgcaacatctttgttggatgctagcaacctgatagttctgaaggaatcatctgtgatacactctaatgctaatcttggagttcggggccaaggtctcctaaatttgtctggggacggagacacaattgaggcgcaacaccttattctttcgctgttctacagcatacaagttggacctggttctgttttacggggcccacttgtaaacagaagtagcgatgatgtggccccaaagctgaattgtgaagctgatagctgccctgtggaaataattcatccaccagaagattgcaatctaaattcttcattgtcatttacccttcaggtctgtcgtgttgaagatattgatgtctggggtctcgtacaaggaactgtaattcatttcaatagggcaagaagtgtcactgtgcatacatctggaaccatcagcgcatcaggcttgggctgtcgaactggagtagggcaagggaaaatgttaagcagaggtatatgtggtggtggtggacatggtggaaaaggcggggatggtttttataagggaaaccttgctgagggtggagctatctatggcaatgctgatctaccttgtgaacttggcagtggcagtgggaatgactctaccgagttgtccacagctggcgatgggctcatgggagtattctttgccaagtcttgccctctatggctcagtagaatcaaatggtggtagctatactaatggctctgttggaggacctggtggtggttctgggggcacaattcttctatttgtgcatactttgtccttagctgaaagctctgtcctctcaagtgttggtggcttcggaaatgctggtagtggtggaggtggagggggaaggattcatttccattggtctaacattcctactggagatgagtatgtgcctgttgcagctgttaagggatcaatacttgcaagtggaggagtcagcaaagggctgggatattctggtggcaatggaacggtcacaggaaaagcttgcccaaagggtctttatggaacattttgcaaggaatgccctttgggaacatacaaaaatgttactggatcttctaaatctttatgctttccatgccctcctggtgaactccctcaccgtgctatatacataaatgtcagagttcttagtggagggtctgttcttttttttggtggtcatgggtgtcatgagctcgcgtccgtgctgggcacgctgagcaacgtggaagggttcgcgttccagcgcgacgtgtcctacacggcgttccttgaccgggtgcacggcgaggaggtggcgctcaacaagctggggctgtggcgggtgccgcacccgtggctcaacatgttcgtgccgcgctcgcgcatcgccgacttcgaccgcggcgtcttcaagggcatcttgcagggcaccgacatcgtcggcccgctcatcgtctaccccctcaacaaatccatgtgggacgacggcatgtcggcggcgacgccgtcggaggacgtgttctacgcggtgtcgctgctcttctcgtcggtggcgcccaacgacctggcgaggctgcaggagcagaacaggaggatcctgcgcttctgcgacctcgccgggatccagtacaagacctacctggcgcggcacacggaccgcagtgactgggtccgccacttcggcgccgccaagtggaatcgcttcgtggagatgaagaacaagtacgaccccaagaggctgctctcccccggccaggacatcttcaactgatgatagcccatgcatgcatgcatgttttagtttcttgggacaataatgtgaataactcccagctagcggctattaattaatctgtatatagattgatcactgcactgattgtatgtcaaggtcattatttacgttatggtaaaaaaaataccctcgtcgtatattctcgtttcatctgcccaacccccagagttttaaaaatgcacgttgagagcaaaatttccacaccgtttatccatgtagattgggtgtatattgaatccgtttaaatatatagcaagacaaaatttat

SEQ ID NO: 211367 - DNA, 3171 bp, Zea Mays
tagaggtgaatccaacggcgtaacacccttctccctccacacccttcctctccaaaaaacgaacatcaaaatgcgcgagagaaacggagcaaagtcgaaaggggaaaaatgagttaaacccaaatcgacaccaaacccactccaggaacacccgcctccgccgccgccgccgccatcgccggcggccactacaagcgcggcgtccggagacagtactgcgctaccaacccctagagcctggattctgatgagccctccatggcctgtcatatctgtcccctcttcaatctccgactcttgctgctgctcggcgcggttctcgggaacggcggcctcggccggggcggcggagcggaggcttcagatcgggcggacccggacccgtactcgatcctgatgtggcacgactactcgccgccgtcgcccccgctcccgcccccggacccgccgtcgccgacggcgacatgtgagggggacctccacgggaagggtgacttccacacgcgctgcgaggtctccgaggaagtggagctggacggcgacgtctacatcacggggaacggcagcctcgtgctcctctctggcgcctccctgacctgcgagaagtacgggtgcgttatatccgccaatttctcaggcgaggtgcgcctcagccgcggcgtccgcgtcacagccggcagggtctcgctggttgccaccaacatcacggtcgccgacacggtcgtcgtgaataccaccgcgctcgctggtgatccgccagaccggaccagtggcgttcccacggggacgcacggcgacggtggcgggcacggtggtcgtggcgccagctgcttcgtcaaggaagggcagacgcaggaggattcatggggcggcgatgcctatgcatggtctgacctcgaacacccctggagctacgggagcaaagggggctcgaccagcgttgagaaggactatggtggtgacggtggtggcatcgtgtggctgtttgctgaggacctggtcatgaatggcacagttctcgccaacggtggggatagcaatgagaagggtggtggtggttctggagggagcatctttataagggctgcatcgatgcatggtggtggcaagatcagtgcctctgggggtgatggtttggctgggggaggtggagggcgagtttctattaacgtttttagtagacatgatgacacccagatttttgttcacgggggaaggagttcaggctgtccagataatgcaggagctgctggaactctttatgaagcagtaccaaaaagtcttattgtcagtaacaacaatctgagtacacaaacagacactcttcttttggagtttccaaatcaaccactgtggacaaatgtttttgtaagaaatcgtgccaaagttgctgtccccttgctctggagtcgcgttcaggtcgaagggcaacttagccttctttctggtgctattctaacttttggtctcactcgttatccatactcggagtttgaactgatggctgaggagcttcttatgagtgactcaacaatcaaggtgttcggtgctttgagaatgtctgtaaagatgctccttatgtggaactccagaatggaaattgatggcggtggagattcgatagttgcaacatctttgttggatgctagcaacctgatagttctgaaggaatcatctgtgatacactctaatgctaatcttggagttcggggccaaggtctcctaaatttgtctggggacggagacacaattgaggcgcaacaccttattctttcgctgttctacagcatacaagttggacctggttctgttttacggggcccacttgtaaacagaagtagcgatgatgtggccccaaagctgaattgtgaagctgatagctgccctgtggaaataattcatccaccagaagattgcaatctaaattcttcattgtcatttacccttcaggtctgtcgtgttgaagatattgatgtctggggtctcgtacaaggaactgtaattcatttcaatagggcaagaagtgtcactgtgcatacatctggaaccatcagcgcatcaggcttggtggaggagtcagcaaagggctgggatattctggtggcaatggaacggtcacaggaaaagcttgcccaaagggtctttatggaacattttgcaaggaatgccctttgggaacatacaaaaatgttactggatcttctaaatctttatgctttccatgccctcctggtgaactccctcaccgtgctatatacataaatgtcagagttcttagtggagggtctgttcttttttttggtggtcatgggtgtcatgagctcgcgtccgtgctgggcacgctgagcaacgtggaagggttcgcgttccagcgcgacgtgtcctacacggcgttccttgaccgggtgcacggcgaggaggtggcgctcaacaagctggggctgtggcgggtgccgcacccgtggctcaacatgttcgtgccgcgctcgcgcatcgccgacttcgaccgcggcgtcttcaagggcatcttgcagggcaccgacatcgtcggcccgctcatcgtctaccccctcaacaaatccatgtgggacgacggcatgtcggcggcgacgccgtcggaggacgtgttctacgcggtgtcgctgctcttctcgtcggtggcgcccaacgacctggcgaggctgcaggagcagaacaggaggatcctgcgcttctgcgacctcgccgggatccagtacaagacctacctggcgcggcacacggaccgcagtgactgggtccgccacttcggcgccgccaagtggaatcgcttcgtggagatgaagaacaagtacgaccccaagaggctgctctcccccggccaggacatcttcaactgatgatagcccatgcatgcatgcatgttttagtttcttgggacaataatgtgaataactcccagctagcggctattaattaatctgtatatagattgatcactgcactgattgtatgtcaaggtcattatttacgttatggtaaaaaaaataccctcgtcgtatattctcgtttcatctgcccaacccccagagttttaaaaatgcacgttgagagcaaaatttccacaccgtttatccatgtagattgggtgtatattgaatccgtttaaatatatagcaagacaaaatttat

SEQ ID NO: 211368 - DNA, 3640 bp, Zea Mays
tagaggtgaatccaacggcgtaacacccttctccctccacacccttcctctccaaaaaacgaacatcaaaatgcgcgagagaaacggagcaaagtcgaaaggggaaaaatgagttaaacccaaatcgacaccaaacccactccaggaacacccgcctccgccgccgccgccgccatcgccggcggccactacaagcgcggcgtccggagacagtactgcgctaccaacccctagagcctggattctgatgagccctccatggcctgtcatatctgtcccctcttcaatctccgactcttgctgctgctcggcgcggttctcgggaacggcggcctcggccggggcggcggagcggaggcttcagatcgggcggacccggacccgtactcgatcctgatgtggcacgactactcgccgccgtcgcccccgctcccgcccccggacccgccgtcgccgacggcgacatgtgagggggacctccacgggaagggtgacttccacacgcgctgcgaggtctccgaggaagtggagctggacggcgacgtctacatcacggggaacggcagcctcgtgctcctctctggcgcctccctgacctgcgagaagtacgggtgcgttatatccgccaatttctcaggcgaggtgcgcctcagccgcggcgtccgcgtcacagccggcagggtctcgctggttgccaccaacatcacggtcgccgacacggtcgtcgtgaataccaccgcgctcgctggtgatccgccagaccggaccagtggcgttcccacggggacgcacggcgacggtggcgggcacggtggtcgtggcgccagctgcttcgtcaaggaagggcagacgcaggaggattcatggggcggcgatgcctatgcatggtctgacctcgaacacccctggagctacgggagcaaagggggctcgaccagcgttgagaaggactatggtggtgacggtggtggcatcgtgtggctgtttgctgaggacctggtcatgaatggcacagttctcgccaacggtggggatagcaatgagaagggtggtggtggttctggagggagcatctttataagggctgcatcgatgcatggtggtggcaagatcagtgcctctgggggtgatggtttggctgggggaggtggagggcgagtttctattaacgtttttagtagacatgatgacacccagatttttgttcacgggggaaggagttcaggctgtccagataatgcaggagctgctggaactctttatgaagcagtaccaaaaagtcttattgtcagtaacaacaatctgagtacacaaacagacactcttcttttggagtttccaaatcaaccactgtggacaaatgtttttgtaagaaatcgtgccaaagttgctgtccccttgctctggagtcgcgttcaggtcgaagggcaacttagccttctttctggtgctattctaacttttggtctcactcgttatccatactcggagtttgaactgatggctgaggagcttcttatgagtgactcaacaatcaaggtgttcggtgctttgagaatgtctgtaaagatgctccttatgtggaactccagaatggaaattgatggcggtggagattcgatagttgcaacatctttgttggatgctagcaacctgatagttctgaaggaatcatctgtgatacactctaatgctaatcttggagttcggggccaaggtctcctaaatttgtctggggacggagacacaattgaggcgcaacaccttattctttcgctgttctacagcatacaagttggacctggttctgttttacggggcccacttgtaaacagaagtagcgatgatgtggccccaaagctgaattgtgaagctgatagctgccctgtggaaataattcatccaccagaagattgcaatctaaattcttcattgtcatttacccttcaggtctgtcgtgttgaagatattgatgtctggggtctcgtacaaggaactgtaattcatttcaatagggcaagaagtgtcactgtgcatacatctggaaccatcagcgcatcaggcttgggctgtcgaactggagtagggcaagggaaaatgttaagcagaggtatatgtggtggtggtggacatggtggaaaaggcggggatggtttttataagggaaaccttgctgagggtggagctatctatggcaatgctgatctaccttgtgaacttggcagtggcagtgggaatgactctaccgagttgtccacagctggtgggggtataatagcgatgggctcatgggagtattctttgccaagtcttgccctctatggctcagtagaatcaaatggtggtagctatactaatggctctgttggaggacctggtggtggttctgggggcacaattcttctatttgtgcatactttgtccttagctgaaagctctgtcctctcaagtgttggtggcttcggaaatgctggtagtggtggaggtggagggggaaggattcatttccattggtctaacattcctactggagatgatggaggagtcagcaaagggctgggatattctggtggcaatggaacggtcacaggaaaagcttgcccaaagggtctttatggaacattttgcaaggaatgccctttgggaacatacaaaaatgttactggatcttctaaatctttatgctttccatgccctcctggtgaactccctcaccgtgctatatacataaatgtcagagttcttagtggagggtctgttcttttttttggtggtcatgggtgtcatgagctcgcgtccgtgctgggcacgctgagcaacgtggaagggttcgcgttccagcgcgacgtgtcctacacggcgttccttgaccgggtgcacggcgaggaggtggcgctcaacaagctggggctgtggcgggtgccgcacccgtggctcaacatgttcgtgccgcgctcgcgcatcgccgacttcgaccgcggcgtcttcaagggcatcttgcagggcaccgacatcgtcggcccgctcatcgtctaccccctcaacaaatccatgtgggacgacggcatgtcggcggcgacgccgtcggaggacgtgttctacgcggtgtcgctgctcttctcgtcggtggcgcccaacgacctggcgaggctgcaggagcagaacaggaggatcctgcgcttctgcgacctcgccgggatccagtacaagacctacctggcgcggcacacggaccgcagtgactgggtccgccacttcggcgccgccaagtggaatcgcttcgtggagatgaagaacaagtacgaccccaagaggctgctctcccccggccaggacatcttcaactgatgatagcccatgcatgcatgcatgttttagtttcttgggacaataatgtgaataactcccagctagcggctattaattaatctgtatatagattgatcactgcactgattgtatgtcaaggtcattatttacgttatggtaaaaaaaataccctcgtcgtatattctcgtttcatctgcccaacccccagagttttaaaaatgcacgttgagagcaaaatttccacaccgtttatccatgtagattgggtgtatattgaatccgtttaaatatatagcaagacaaaatttat

SEQ ID NO: 211369 - DNA, 6505 bp, Zea Mays
caaacatccattccagcgccacagcaaccaagaccagtttcttgctcttcctgtcaatctgctggccacgttgagtgcaagtggtgtgcaggaacaggcttctttatccttggtgacaacatattgtgtgaagtaccctcaagaaattcaaaatgtgtgatatgctctggaaagggcttcacaagttgtgctgattgccaagggacaggttttcgtgccaagtggctggaagaacctcctattgacaaatgaggaagtcaatcatactgtaaaatttaccatttcacagtaaactagctacttttatgcttttctgtccatatccttcaatgtaactctgataatattattttccttttcctgtaattgcatcaattccatattatgacatgttcttaattattcaacatacattttctgtaagaacatgagtatcaagaggtattttttgctctaacttgcaagttttgcctcagcatcctgcatcttttcttgtgcagtgcccaacatgcagaaaattaggatataccagtttctctctctcttgcttgttttgtacgtaagcagataaaaatgcatactaccattctgagctgtattattttgacaaaacggtcaggaaataaaactatttatgtttaagttattcataatcagtgtttcccgctaaacaatcactcacctaccgttagcctggtgaaacagccgtttaaatgggataaatggctgattaaacagacatggtgtaccactgtttagactttagagtttaatgggataaatgactatctagagccactttggtagagctctccttgattcttgagctttacttcttgtaggaccttgtacctttctccttattaatataatgatacacaactctctgcgtgttcgagaaaaaaaagattttctaatggactgattcttgtgaggagcaggcgagaagtgattctggtggtgaactggtgattgaatggggagcattttttagctcccagtttgtagtgtagattgagaagtgattcttgttagctccccactagaatccagttgcattttaaccatttggtgggagcccacaaaatccaccatgttgtttttgtttaacaaactacataattgtgagattagataatttataggagtagagatagagatatttcctttggtcatgacatggaaaaatgccatatatgtctaaaaatagtgaaaataaactgcaatttaaatttaaatttcatcatcaaatggtagagtggtctcatctcatgttagcacaagcaaataacttgacgattgaaggtaaaatgtgtaaaggccccaaagtaagatgaaaaagatagtagatagtttaacagctatgaatgccaagtttacttagttttatcttgtaggacctttcttttctctctctaatataaaagatgcacaactctcttgcgcattcgagaaaaaaacaaataagcccttgcagaactggaattctttggttaagtagtgatattcactcttgtgtattccttttacttgttgcttttttatcgaaatacctcagtgcatgttacaaccatggcgaaagggtctctagctgagttgattaggttatctgagtagcattcctcatgttttgggtttgactctctgtgggagcgaatttcaggctgtagttaaaaaaaccctcgtttgtcctacgttaaagcacaagtctaaggtctggccctggtcacggtcgttctcacatggactacggtgtcactgtgtatgggtggggcaagggtttgggggttttctcgacctgcatgagaaggtattcttcttaatataatgtcatggggcgatcttaccctccatagttattaaggcgtcacgctaaagtgatcaggcgagggccgcgaggctacagggcaagtcgtcgcggtcgccttaatcgtcggcgtaaggcgtcagccttaggctagagcgtcgcctttggggcgcaaggcgttcataaggcattggatactggacgccttggccttgggtagggttggtgacagggtacaaatggaggcacagactgcggacctttggtggtggcggtggcttttctgttgacggcggtgacccttctttgccttctgctgtggcgtgggcgcacagggtcttgctccgctcaccagtccgcccttccacgacggcacagctctaccctcccttccacggttgtgcggctcggtccttccttcgcggaggcgctggcacatgtcctcctctctctatctcttagacggtcaacaacctcccctcctccctctcctctctctggtggttgcaaggtggcagctcccctcccttcctcgaggggtactatggagcaggataagttaggtcaagtagtgggctggctgggccgagaaacagcaggccggtggcccatctcctttattttttcttttctttttacttctctattaaaccagtaaatctattagttatgtattcattttttcctaatattctactactatctattagttatgttggatttttaattctattatgttggtttatgttgaacttgtactcctatttggtattattatccctacctatttaagaatatgttcctatatttatatattagtaaggtgtcgcctcaccttacaccttaccactgaaaagataaaaagggggccggctcccttacccccttaactcgtccggtgggggaaagaccgcccccacggtattatattaagaaaaagttcaatcggagccccgatcaataaaaggtcacaaaagctagtcccccgtgcaacatgagggttcgccccccccccctatagatcagatttttactcgtgctttgagctctcccagcccccacccgaggatccgccctctataggttagtccatctcgtatgcacacaatcaggggaaccagtgagtgaccttttttaaccttagcctaaaattcgctccagctgggattcgaactaaggacataaggaatgctactcagaccaactaaccaactcagctagaggccctatgcttacccccacaggtcgagtttttttatgttacaaccatgaaatcttgtaaagtttttaagccaaatcatctttggaaacacagatgtgtcctttttgtaattgcatattgttctttgcaattgcagtattgaatcttgtttttcatttgaattgatgtgcagaaaatgttgctagtttagaacagcgtcagattagctgtctacaaatccttgtgctttgtagtttctacaagaacaaaatattttggaatttggaagggatatggtacttttgtattaagcaaacgaacctgtacaaagctgccataatacttttttgacaacttatctaaaaataatttgagtatgtgcctttctttgtcagtgtgcttgcacatattctgatgattatttggcaccatatttgcacatggctgtatttggtactttcttctcatatgggagggttaggttttatatgtattttactaggaacaaattttagaacccacttgatttgaagttcatcggataggaaccttggatgagctggcttgtagaaatgaaatttgatgagagcaaagctatccaatgtaaatagtcatggtgtattttttgtgttttgtgatagttgactatttgaagatgtcaaaatccctttccgcaccactttgaggtccacagcatatctttcgttaaatgaatttatgatgtcattaatggacttactgctgtgtgctgtgacttaaaatatagcattccatagctgtttcctggacaaaattattagttggctttggcactgtcacttaacctatacatcagggccaagtacgcaaaagacaatgtttctatgtaccctatgcttactattttcttcatttataagttaatgaagttatccgtaagatttgaagggatgacattgtcaagtacaaatcgtcaagcttgcaacattgttgtagcgctatggacaagcttgttatttgtccccagcaattatggcttttattctagggatgattttgtttacttggttgtccattcggttagggttggtttggtgacccggaaattggaggggatccataaagtagaaatccccttgatatattcattaaatagcaaagggattcctcctccatagacccccaccaattccctggtcaccaaactagcctttgggctcatttgagagcccgaaaaccgggattgaaggagctaaaatcaccttcttatttaatttgaataagaaggtgattttagcccctctaatccccttcagttttcggactcccaaactagcccttaatgtcttgtaaattccatggtggccatttaatatgagggttgagtactgcatattaccctttgtaattgcaatattcacagcgttaatgaatcaacaatgactgcgtttactgttcaaatttattttttaatgtagcttttgcttgtcctgattaacttgaaattgcaattttggactgtgtgcattgtatgtggctggtgcagtggtgagagctgtttcactaagtcatcaggttacgggttcgaaacagtcaatctgcatttgtgggagaaggttcgccccagtttattccttccctagaccttacttatgtggaagcctccgtcattgcatctgccattttttattgtatttggctttatgcattgactgttgcactgttgtaccatgccatcaaatttatctttgagagcattaccttaggaaaaactaaagaagagcaattttgtggaaaataagatgatgcattgatacctggaactccttgatatttcattgttttgtcatttctattttgttgtgggctattttatcttttctgttgggctcattctatctgtggtagagatgctgtcagcagttaagacaaaaaatgtaccaaggattggactgctttgagcaatacaacacagatcctccaaatggaagtagccaaagttgtttgtttatttgccattgctattgatagaacttacagtgcaaaacaaacgacaattgattggagttgtatgaattgattgtgacttttatggcatatttctgcattatcctgacttgttaaagttctaggttggatacttggaatttatgcagccttcgtgcaaaacaatgtatcagtatataggattatgtagttactgatctttggcaagggcttgaagttagatgtcttaatgactagagctaccttgattttttttcctgaaagacctgccttgatgattttttttgcagctttgcttctagatttgctgtattttagctttgtttctagattttctgtatccagaaaaaaatggtgtagtatcaaattatcaaaatttacacttatgttatgtgatgattgattgggacacctttaagaaatttatgagatcaaaataagcaagatattcaaggtcatttttaattagtcaataaatagttatgatgttacaagcctactcttcatatcttcaggtacattctcaaaccatccttgctccctgtcaggaataaaaagatggattgctatttattatttctttaatgttcctctagagaattggttgaaaatgacgtgtacattgggaaactttgtcatgcaccatatagcactttgcacggtccattagctcacgattcaaatacatgaatgggatccaattgcttgttggttagggaatcttgaggggttgtcggaattggtgttagcacttggcaaaataatggtgcagagttgggtttgcgttgcgtgtggtgctggtttacgctgcctagttcaaaataacaaacatgactagtccatttggtgcatgctgagcgagccatgctgaacctggttgatccctggaagctgctggggcgtcgtatgactgacgatcaggggttgctttaaagcacaggtgtgggaatgcggaactgtccatctacaaaatcagtggcagggatcctctcattataaagttatctatagagagcaaggacaagaaagaaaatagatatcttggctattcttttgtccagctgggcaatcgacaaggtgatgaacgcagcagttggacagaatgagtgtagttcaaaatcttcgttgtggagtagcttcacaaataatggagttggaatacggaaggtgtttggcttggagattagctcgagctctaggaatacaattcaagagggttttgtgggaattatctagtgtgctctgcttttgtatgtacgccattttgatgcacctaagcatttatgcatttgtaaatgataagtgctcctttggatagcaggaactttggagtatttgaatcattagaattattttttttcataaggaattcttctgggttgccattcttaaccccaattccatagagagatcaaacatgagcttgaacctcaaatttagagaagtcagctacattttcccctttttattggtctactctcttacaaattacaatgcaccatccctccaaa

SEQ ID NO: 211370 - DNA, 1799 bp, Zea Mays
ccaggacgaagcagccgccgcaggcccgctcccgcccgcgcctgacggcacatccgccccggccgcctccgaccccgcccccgcccccggccccgcccgccgtgcccacctcgcggtccggctggccttgcctcctcctcctcgcttctctcagcctcaggccaacacgcagcccagggccgccgtcgccacggaggtgaggtggaaggagcgtagggcctccgcgcttggctcgctgcagcgagccgcggtcaggcgcaactgcacacgggaggacgccggcgtggcgtgggaggaggagttcgagagcgtcgtcaccctcgcggcgatgtcggagcgagagggcgccgcgttccacccatgggagctcgccttctgcgtcatcagcatgaggatattaacaaaggcccaaagaacaaaccatcaattctgggaactgtttctctcaatctagcagattatgcattgacggctggagagacaattgagataattcttccgttgtctatacctggtggtgcacctgaacgagcctcatcccttcatctcactctgagtatggttgaattaagagcttttcaagaaacatctgatgcatcacagcgatctgctgcaaccttgccattgtccccatcacctagtgattctcttcctggaggaaaatatgaggttttggttattaaagcagggttgaggaaggtaaaaattctcacagatctggtgtcgacacgaaggcctaagaagacttgccagggaggtggcgaagataagttctgtgttaacagtgatagtgttgaatatccatgcgatactgagtctcttgatgacgatctagatgacagagttgaggaagatgaatttggagattcaactatcaggaagtctttcagttatgggtatctgcaatctgtcaactatgttggtggcctagtttatgcccatgcaaagattgatggggagcatgaggactggatatattatagtaaccgaaaaactgatgtcggtttccatgtagagaaagtattgccatcaaccacagagaatggttgctaactgctaagcgcagtatacttccttggagaaagaggaaactgagtttacggtcgttgaaggctaaaggtgaacctctcttgaaaaaggcatatgggggaagagggaggtgatgatattgactaggatcgacgcttgctaacatcatctgatgaatctgtttcagagggatcaagaggatatggattagcaaatactatggtgtcagaatttggtgatgacaattttgtcattgaaaattgggagttgaaggagataattagttgtgatggtcgtatgaagctttcatcccagatgttctttgcatcaatagaccagagaagtgagcgagcagctggggagactgcatgtacatcacttgtagctattattgcagactggttccaagcaaatcagaatattatgcctatccagtcacagtttgacagccttatccgtgaaggatcactagagtggagaaacctttgtgagaacgagacatatagaaagcgttttcctgataagcactttgatcttgaaactgtccttcataccaaaattcacccgctgacagtttcccccagcaatcttttatttgatctgtcttattatgactatggatgagacttttgtgatataattgatgagactatggatttaaatattgttatgtgattatgtgtgagatgttttatgtgaaaatatgttgtgctatatagttgttgatatatttgttatgttgtggaatgtggtgtaaaataaaaataaac

SEQ ID NO: 211371 - DNA, 2402 bp, Zea Mays
ctgcgcactaacgctcacccgcgcctccgggttctgggctttagcgctcgctcgccggtcggccccaccattccgcgcagttccgcgtgcgaggaacaggaaccgctgctgctctctgcctccgctccgatcctgcttgcgctcgagaaccgcgacgccgacgcccttccttgacgcgttgttgatctgcgagctcagatctgcatattagagaagatttttcgtatattttggtgaacatgaagagaaaggcgcagtcaggaaaatctcgctcatggtggtgggacaatcatattagtccacaaaattctaagtggctctctaaaaatctagaagaaatggagaagcaggtgaaacaaatgttggggctcattggcgaaggagagttttctgcagaaaaagcggaggtgttctatgagaagcggcctttacttattactcatgtggagaacttctattgcatgtatcgtgctcttgctgcccgatatgacgatgtaactggacaactacgcaaaaacattccatcatctcttcaatcatatggctcggttggtgtctctgaatcagattctgagacacaatgtttcacatctccagagtttgatatgccacagcaaaagcaaaagcctggaccagatttccttgatttttccattggctctggtgttagctctgatgtatcaaagaagggtagtgaaaggtcttcatcatcttcagattctgattcagagcttgatgaggccaaagaggaaaatggcagtatgttttatgccttgagccaaaaaaatattgagctagaagatgagcttcaagaagtaaggggaaaacttgatgctttagaggaaaaacatgctcattgccaaagagatttgagtaccaactcaaaagatactgaacatgaagaaaacctgcacacttcagatgtggaatccaacacccttcagaaggatgcagaagaaacagattttgctttagagagctcaacagaagtcaacagcgaaaaggaagcattggaagctgtgctgtttgagcggaaaaatgagattgaaatgctgaaaggtgcaatggcctcagctgctaagcagtttgaagttgaattggcacatcgtgatcttgaaattggtaagtgcaagcatgaacttggagtactctcggagaagtatttgcatgataagtctactctcgaggatgagcttagaaggctccatggaataatcaagaatatggaaggtgacttagaaaaaatttcacaggagagattgcagctcaggtctcggattaaagagctcgagcaggcagctcacagcttagactattcagcttccgagatagttgagctacaagaagtaataaggaatacacaagcagaattagaaaaggtcacaaaggagaaagaagtgctcaaagaacacgctaacgaatttgagcaacttttaaagggccttgaggtctcaggtacagaggttgcaaagctaccagaaactatcaagaacctggaagcccagctagaaagatccttcgaagagaaatcagtactccaagaccagatcaagcagctggagcaggttatgtctgaatcttcggagaaacattcacatgagcagttctctcttactgcggatcttttgaagttatctgaagtgaacgcttctcttgaagacaaattgtccgatgtggcggcagagcttatccaagtttatgctgacaaggaagaagaatctctcgataatgagaagcaaatttctgtcctcagtaaagatattgctgatctcaggagaaagcttgaattgttgtcatctgagaaaaccacagttgatgatgagttggccaaactgctagctgatattatgattcgtgacgaaaagatgaagcaaatggatgaccacctaaatcagcttcagttagagcatgccaagctgatggcagaatttgacagtgcacacaggtccttgtcagagctgcatgcgcaggtttctgagctggaagacgaggtagagaagcagaagcttgtgatatccgagagtgcagagggaaagcgggaggccatcaggcagctgtgcttctccattgaacactaccgcagcgggtatcagcagctgaggcagctgctgcaaggccacaggaggccgttggtgatggcaacctgataaatgaacaaagtccgtttgccaacaaattgcgcagttgcttgtctctgggcgtgttctatttgtagctctgttctttcacaacttgtgccgtgtagtttatgttataaagaattctgtgtggtatgtgtgtagaatgtaatgggatgggatatttatgttgttccttcatactcctgtggctgttttctttttccttgctgtccgctgatgaatgttatgatatgcttgaaccttcgtcttttcaaaaaaaat

SEQ ID NO: 211372 - DNA, 2491 bp, Zea Mays
gctcacccgcgcctccgggttctgggctttagcgctcgctcgccggtcggccccaccattccgcgcagttccgcgtgcgaggaacaggaaccgctgctgctctctgcctccgctccgatcctgcttgcgctcgagaaccgcgacgccgacgcccttccttgacgcgttgttgatctgcgagctcaggcaagagtgcaagaccaactctgttggctagagtattgcatttatacagatctgcatattagagaagatttttcgtatattttggtgaacatgaagagaaaggcgcagtcaggaaaatctcgctcatggtggtgggacaatcatattagtccacaaaattctaagtggctctctaaaaatctagaagaaatggagaagcaggtgaaacaaatgttggggctcattggcgaaggagagttttctgcagaaaaagcggaggtgttctatgagaagcggcctttacttattactcatgtggagaacttctattgcatgtatcgtgctcttgctgcccgatatgacgatgtaactggacaactacgcaaaaacattccatcatctcttcaatcatatggctcggttggtgtctctgaatcagattctgagacacaatgtttcacatctccagagtttgatatgccacagcaaaagcaaaagcctggaccagatttccttgatttttccattggctctggtgttagctctgatgtatcaaagaagggtagtgaaaggtcttcatcatcttcagattctgattcagagcttgatgaggccaaagaggaaaatggcagtatgttttatgccttgagccaaaaaaatattgagctagaagatgagcttcaagaagtaaggggaaaacttgatgctttagaggaaaaacatgctcattgccaaagagatttgagtaccaactcaaaagatactgaacatgaagaaaacctgcacacttcagatgtggaatccaacacccttcagaaggatgcagaagaaacagattttgctttagagagctcaacagaagtcaacagcgaaaaggaagcattggaagctgtgctgtttgagcggaaaaatgagattgaaatgctgaaaggtgcaatggcctcagctgctaagcagtttgaagttgaattggcacatcgtgatcttgaaattggtaagtgcaagcatgaacttggagtactctcggagaagtatttgcatgataagtctactctcgaggatgagcttagaaggctccatggaataatcaagaatatggaaggtgacttagaaaaaatttcacaggagagattgcagctcaggtctcggattaaagagctcgagcaggcagctcacagcttagactattcagcttccgagatagttgagctacaagaagtaataaggaatacacaagcagaattagaaaaggtcacaaaggagaaagaagtgctcaaagaacacgctaacgaatttgagcaacttttaaagggccttgaggtctcaggtacagaggttgcaaagctaccagaaactatcaagaacctggaagcccagctagaaagatccttcgaagagaaatcagtactccaagaccagatcaagcagctggagcaggttatgtctgaatcttcggagaaacattcacatgagcagttctctcttactgcggatcttttgaagttatctgaagtgaacgcttctcttgaagacaaattgtccgatgtggcggcagagcttatccaagtttatgctgacaaggaagaagaatctctcgataatgagaagcaaatttctgtcctcagtaaagatattgctgatctcaggagaaagcttgaattgttgtcatctgagaaaaccacagttgatgatgagttggccaaactgctagctgatattatgattcgtgacgaaaagatgaagcaaatggatgaccacctaaatcagcttcagttagagcatgccaagctgatggcagaatttgacagtgcacacaggtccttgtcagagctgcatgcgcaggtttctgagctggaagacgaggtagagaagcagaagcttgtgatatccgagagtgcagagggaaagcgggaggccatcaggcagctgtgcttctccattgaacactaccgcagcgggtatcagcagctgaggcagctgctgcaaggccacaggaggccgttggtgatggcaacctgataaatgaacaaagtccgtttgccaacaaattgcgcagttgcttgtctctgggcgtgttctatttgtagctctgttctttcacaacttgtgccgtgtagtttatgttataaagaattctgtgtggtatgtgtgtagaatgtaatgggatgggatatttatgttgttccttcatactcctgtggctgttttctttttccttgctgtccgctgatgaatgttatgatatgcttgaaccttcgtcttttcagtcacgactttatgtggtcaataactgaactgcacaatggaactcccttttcaatctaag

SEQ ID NO: 211373 - DNA, 2495 bp, Zea Mays
ctcacccgcgcctccgggttctgggctttagcgctcgctcgccggtcggccccaccattccgcgcagttccgcgtgcgaggaacaggaaccgctgctgctctctgcctccgctccgatcctgcttgcgctcgagaaccgcgacgccgacgcccttccttgacgcgttgttgatctgcgagctcagtgcaggcaagagtgcaagaccaactctgttggctagagtattgcatttatacagatctgcatattagagaagatttttcgtatattttggtgaacatgaagagaaaggcgcagtcaggaaaatctcgctcatggtggtgggacaatcatattagtccacaaaattctaagtggctctctaaaaatctagaagaaatggagaagcaggtgaaacaaatgttggggctcattggcgaaggagagttttctgcagaaaaagcggaggtgttctatgagaagcggcctttacttattactcatgtggagaacttctattgcatgtatcgtgctcttgctgcccgatatgacgatgtaactggacaactacgcaaaaacattccatcatctcttcaatcatatggctcggttggtgtctctgaatcagattctgagacacaatgtttcacatctccagagtttgatatgccacagcaaaagcaaaagcctggaccagatttccttgatttttccattggctctggtgttagctctgatgtatcaaagaagggtagtgaaaggtcttcatcatcttcagattctgattcagagcttgatgaggccaaagaggaaaatggcagtatgttttatgccttgagccaaaaaaatattgagctagaagatgagcttcaagaagtaaggggaaaacttgatgctttagaggaaaaacatgctcattgccaaagagatttgagtaccaactcaaaagatactgaacatgaagaaaacctgcacacttcagatgtggaatccaacacccttcagaaggatgcagaagaaacagattttgctttagagagctcaacagaagtcaacagcgaaaaggaagcattggaagctgtgctgtttgagcggaaaaatgagattgaaatgctgaaaggtgcaatggcctcagctgctaagcagtttgaagttgaattggcacatcgtgatcttgaaattggtaagtgcaagcatgaacttggagtactctcggagaagtatttgcatgataagtctactctcgaggatgagcttagaaggctccatggaataatcaagaatatggaaggtgacttagaaaaaatttcacaggagagattgcagctcaggtctcggattaaagagctcgagcaggcagctcacagcttagactattcagcttccgagatagttgagctacaagaagtaataaggaatacacaagcagaattagaaaaggtcacaaaggagaaagaagtgctcaaagaacacgctaacgaatttgagcaacttttaaagggccttgaggtctcaggtacagaggttgcaaagctaccagaaactatcaagaacctggaagcccagctagaaagatccttcgaagagaaatcagtactccaagaccagatcaagcagctggagcaggttatgtctgaatcttcggagaaacattcacatgagcagttctctcttactgcggatcttttgaagttatctgaagtgaacgcttctcttgaagacaaattgtccgatgtggcggcagagcttatccaagtttatgctgacaaggaagaagaatctctcgataatgagaagcaaatttctgtcctcagtaaagatattgctgatctcaggagaaagcttgaattgttgtcatctgagaaaaccacagttgatgatgagttggccaaactgctagctgatattatgattcgtgacgaaaagatgaagcaaatggatgaccacctaaatcagcttcagttagagcatgccaagctgatggcagaatttgacagtgcacacaggtccttgtcagagctgcatgcgcaggtttctgagctggaagacgaggtagagaagcagaagcttgtgatatccgagagtgcagagggaaagcgggaggccatcaggcagctgtgcttctccattgaacactaccgcagcgggtatcagcagctgaggcagctgctgcaaggccacaggaggccgttggtgatggcaacctgataaatgaacaaagtccgtttgccaacaaattgcgcagttgcttgtctctgggcgtgttctatttgtagctctgttctttcacaacttgtgccgtgtagtttatgttataaagaattctgtgtggtatgtgtgtagaatgtaatgggatgggatatttatgttgttccttcatactcctgtggctgttttctttttccttgctgtccgctgatgaatgttatgatatgcttgaaccttcgtcttttcagtcacgactttatgtggtcaataactgaactgcacaatggaactcccttttcaatctaag

SEQ ID NO: 211374 - DNA, 1159 bp, Zea Mays
gaaattctgttgcattccttaacattgcatttttcttgacagcctgttacactggaacttggtggaaaaagtcctatagtagtatttgatgatgttgacattgacaaagctgtcgagtggactctgtttgggtgcttttggaccaatggtcagatttgcagcgcaacatctcgtcttcttatccatacaaaaattgctaaaaaatttaatgagaggatggttgcatgggccaaaaatattaaggtttcggatccacttgaagagggttgcaggcttgggccagttgttagtgaaggacagtatgtttttacagcaagagctatggtatggattaatgtttatggtcatactggattatgagaaaatgacaccctaatcaccaccatattgtatgagaagattaagaagttcatatcgaatgccaaaagccaaggtgctactattctgactggaggtgttagacctgcgcatcttgagaaggggttctttattgaaccaactattattactgatatcaccacatcaatggaaatctggagggaggaagtctttggtccagtcctgtgcgttaaagaatttagcactgaagatgaagccatcgaacttgccaacgatacacagtatggtttggctggtgctgtaatttctggtgatcgggagcgctgccagaggttatctgaggagattgacgctggatgcatctgggtaaactgctcgcaaccctgcttctgccaagctccctggggcgggaacaagcgcagtggatttggacgtgagcttggagaagggggcattgataactacctgagcgtcaagcaagtcacggagtacatctctgatgagccgtggggatggtaccaatccccctccaagctgtaaactggcaagacgaaaatttgtctgtttcggtagaataaatatatctcgatgctatacagaacgaacccgtgtatcacattgaatgacatggtgaaaaaggcacatctgcaggataaaggcgagagttgagttgaaaccaaaaattttggaactgtgccattataagaggtggattttgtcaatgggccttgtctagacttcgttatcagcaaagacagatttgcccctatcttatctggacagaatcccggcacggggtccgtcatgagcccaagacaag

SEQ ID NO: 211375 - DNA, 2671 bp, Zea Mays
gttgtctgctgtttgaaaaggaggagaagcggggaggacggaagggggtgccgtggcggatgacgctgagcctggcttaccagagtctcggcgtggtgtacggcgacctcagcacatcgccgctgtacgtctacaaggcggcgttcgcggaggacatccagcacacggagagcaacgaggagatcctcggcgtgctctccttcgtcttctggacgctcacgctcgtcccgctcctcaagtacgtctgtgtcgtcctccgcgccgacgaccacggcgagggcggcaccttcgcgctctactccctcctctgccgccacgcgcgcgccgcgctcctcccgccaggacgaaccgccgcctgggacgaggaccagttctcggacggagccggcggtggcaccaacaaggctacggcgcagaatggcaatgctgtgacgctgggagggggcgccgccgccagcgtcaggaggctgctggagcggcacaaagtgctgcagcgggttctgctcgtgctggcgctggtgggcacctgcatggtgatcggcgacggcgtgctcacgccggccatctccgtgttctctgcggtctccgggctggagctgtccatggcgaaagaacatcataaatatgtggaacttcctattgcctgtatcatactggtttgcctgtttgcactgcaacactacggtacacaccgggttggcttcatttttgctccagtggtgatcacatggctcctatgtataaccctgatcggtgtttacaatattattcactgggaacccactgtatatcgagcattatctccgtattacatgtacaagttcttgaggaagacacagagaggaggttggatgtccctgggaggaatactgttatgtgtaaccggttctgaagcaatgtttgctgatctggggcatttcaaccagttgtcaatacagattgcttttacatgcatggtgtatccagcattgatccttgcatacatgggacaagctgcttatctgtgtaagcatcatatcatggaaagtgactacaggatcggattctatgtgtctgtgccagagaaaattaggtggcccattatggcaattggtattcttgcagcagttgtgggaagccaagccgtcatcactggtacattctcaatgatcaagcagtgcgcttctctgggctgctttcctcgggtgaagataatccatacatctgccaaagtacacgggcaaatatacatccctgagatcaattggattatgatgatactgtgcttagctgtaaccattggttttaggaacacaaaacacttgggaaatgcatcaggattggctattataaccgtcatgctggtcacaacgtgcctgatgtccctggtgatagtcctgtgctggcataagagcatattccttgcgattggcttcatcctgttctttgggaccattgaggcactgtacttctcagccgcactcatcaagttcagggagggagcctgggtcccaatcgttcttgctctcatcttcatcctgataatgtgcgtctggcactatggcaccatcaagaagtacgagttcgacgtccagagcaaggtctccatcaactggctccttggtctcagcccgaaccttggcattgtccgcgtccgtggcattggcctcatccacaccgagctcgaaaccggcatcccagctatcttctcgcatttcgtcaccaacttgcctgcctttcaccaggtactcatatttatgtgcatcaagaacgtgccgataccacatgtccggcctgaagagcggttcctcgtcggaaggatcggccccaagcagtacagaatctaccggtgcatcgtcaggtacggctaccaagacttccacaaggacgacgtggagttcgagaaggagctggtgtgcagcgtggccgagttcatccggtcagggtcgtccaagctgaacggcacggctgaggaggtcgacgaggaggaggagcagcgcatggcggtcgtccgctccaacagcgtccgcatgctggaggaagaggccacggtgcagaacaccgtcggggtcggcccgtcgtcgcgggccagcagggagatacagtcgccgtcgccggccccggcgactggggttgggcccaagaacaagaagcgggtgcggttcgtgctgccggcagcgagcccgaagccggacgccggcgcgcaggaggagctgcaggagctgtcggacgcgcgggaggccggcatggcgttcatcctgggccgctcgcacgtgaaggcgaagagcgggtccggcttcctccgccggctcgtgatcaacttctgctacgacttcctgcggaggaacagccggggaccccgctacgccgtcaccgtcccgcacgcctccacgctggaggtcggtatggtgtactttatctgactggactgaactgaacagccccctgaaactaactctgggagtgagaaactcagaaacataggaacatgaaaagataagatgaggtgaaacaaaaaaaaaggttttcagctgtatatgctaggttttgtaactgctggtgagtttcgttgtaaaatgcagccctgttttcttgttaggcgttcagcttctctcgtaatccactagaaaatttattattatgggctagtttggtaatatattttttcgaggtatttctatttttcgatgga

SEQ ID NO: 211376 - DNA, 1781 bp, Zea Mays
gttttatccttctgtgggaaacatgtctattattttcttgaaaaatccaaccacttaaaatgtacttttacatatttacagtatgctcagagaagtaaggaaacctgacagcttcagctgcttctgacataccttcagaatgggatatccgaacagtggcagaagataccttccattattgttgtttttgctgcagaagcatctttgacgctactggatggctcacatgctcaatttactgtcatgagatttttttaatgcattccacttctgtcagactgcagagcattccattatttccaaccttattgcagagcagttctgtgcattttaaagcggaacgtttgtggatgcttcggttattatctgctggatcaaatctagctgatgatgctaaaatatacaagagaggaagagtcttagaacttgctcttgccttctgttcttcacctgtttcagattttgaatcgaaggttttagtccttaagcagcacaggggaacgactgacccgctgcggcagtcgtgggggcaagttgctaccatgattggcatcgccaacatatttgatgattaccttgaactttcatatagtccaaggttgtatattccagaagcactgtcttcctcgaaggagagttgttcctcagcctttgcatcggtgaaggtcagagctctctgtagcttttttgaagagaaaacctccacatctgccatgtacacatctgtcattgctaagcttgttgatcaagctcttgcctcaggaaagatttatgatggagatgggttcaattacatcaaagaatcttttgaaaatggtactcttcaccttattaggttgttgagtgatggtggtgtccactcccgccttgaccaactacagttaagttacaagcgtaccacaagatttacttttatttgctctatccagttacttctgaaaggtgtcagtgagagaggagcaaaaaaattcgtgtgcacatccttaccaatgggcgtgacatttttggatggaagcaatgttggtttcgtggagaccctagagaatgatcttttggagcttcgaggcaagggtattgatgcacagattgcatctggtggtggaaggatgtatgttaccatggaccgttatgagaatgactgggatgtggttaaacgtggctgggatgctcaggtgctcggagaagcaccctacaaattcaaaagtgcacttgaggctgtgaaaacactgagagcacagcccaaggctaatgatcaatacttgcccccatttgtgatagttgatgacatcggcaaagctgttggacctgtattagatggtgatgcagttgtcactatcaacttctgggctgatcgcatggttatgcttgcgaaagcactaacagggcacttgtcttctggaaagataatgtcgcaagctatctccactatcttatactgcataggaatggaacttcgatttcgatgggaccaggtcgcaacatccgttgagcagccagatggcttccctgttcagctagagagaacgatattgttgcttccgccctgtctctacatggacggcctcgcttccgcaatcaccgcgcttcggacctgcaccgatgtcgcgcacctcacgcacgtgctcctgcagttccgcctcgcctggtgcggcaagctcgtccgggacgcccacgccatcgccgcgcactacacctactccgtcaagggcctctgcttcgacctcttcatcattaggggtggaatcagagctttccatgcatgttggaggtgcacgatgtga

SEQ ID NO: 211377 - DNA, 1061 bp, Zea Mays
cgtaaaccctagcttccgtcacccacacagccggcgaggtggcttccatctcgctcgtgggccgatctcactgagcccccgccgttcttctctccacttcctgcgttctccagccgccgtcttcgctgataggctacgccgcccgctggcctgcgcgcgccgcagccttaccctgtgtgcaccctgttcctaaccctgcgtgtggccgccgccgactggcttgcgtgcgcccgcgcctccgcctaaccctgctagcttgcgcgcccaacgccagatgccctgagcccaccgccggctgtctgtgcacgcaagtgaacccatccggctacctgggcacgccatccgacctccctgcgaacctctgtatcggccgatattcctcaagaacacagtgcaaacagtaagttctggagacagcaaaaccttaaggtaacacatcagcaagttcgagactgccaaaaatatgcaaggcagctggctggaaagaaccatcatttgactttgaagaacaaggacctccgcataacagagtattcacatgcaaggtgaccgtccacctggatgaactggtcaacaccattatggagtgtttcagcgaccccaaacctaagaagaaagctgcacgggagaacgccgcacaaggggcattatggtgccttgagcgctctggttatgtcaagtcatcttcagatgttcctgacctgtgcggccatcagcccttctgctagccagatctacccttgtaggagtattaatgttggtagacgggtgcagcttgttgctgtggcacagtggttatccatgcactgatgccatgatactcttgagaagttgagtcccttatgaatcttgagccggctgtgttggctcgtgtacctagtctctagctcgtttggttacatgcccaacgcctgcacttgtactgtgtaaaatactgaactccggcgatcaatgcaatcaaactggaactcctagccgagctctgtcttgcaattcgatgtccggccttctcctgttggatgttaaacaggagccacggaatccgttaatcatggggcgag

SEQ ID NO: 211378 - DNA, 1043 bp, Zea Mays
agtgtgggcagcgtaaaccctagcttccgtcacccacacagccggcgaggtggcttccatctcgctcgtgggccgatctcactgagcccccgccgttcttctctccacttcctgcgttctccagccgccgtcttcgctgataggctacgccgcccgctggcctgcgcgcgccgcagccttaccctgtgtgcaccctgttcctaaccctgcgtgtggccgccgccgactggcttgcgtgcgcccgcgcctccgcctaaccctgctagcttgcgcgcccaacgccagatgccctgagcccaccgccggctgtctgtgcacgcaagtgaacccatccggctacctgggcacgccatccgacctccctgcgaacctctgtatcggccgatattcctcaagaacacagtgcaaacagtaacacatcagcaagttcgagactgccaaaaatatgcaaggcagctggctggaaagaaccatcatttgactttgaagaacaaggacctccgcataacagagtattcacatgcaaggtgaccgtccacctggatgaactggtcaacaccattatggagtgtttcagcgaccccaaacctaagaagaaagctgcacgggagaacgccgcacaaggggcattatggtgccttgagcgctctggttatgtcaagtcatcttcagatgttcctgacctgtgcggccatcagcccttctgctagccagatctacccttgtaggagtattaatgttggtagacgggtgcagcttgttgctgtggcacagtggttatccatgcactgatgccatgatactcttgagaagttgagtcccttatgaatcttgagccggctgtgttggctcgtgtacctagtctctagctcgtttggttacatgcccaacgcctgcacttgtactgtgtaaaatactgaactccggcgatcaatgcaatcaaactggaactcctagccgagctctgtcttgcaattcgatgtccggccttctcctgttggatgttaaacaggagccacggaatccgttaatcatggggcgag

SEQ ID NO: 211379 - DNA, 1283 bp, Zea Mays
ctccaatcgtccaatctgacaatctccatcctcagatagaacagcctcccaagcgacagaacagcctcaggaggcacccccgcggttagtctcgaagcttccgttcggaaccagggttagggtttcgcgtcctcccgtcgtcatcctcagccatgtccgggcgcgaggtccgcgagtacaccaatctcagcgaccccaaagacaggaagtttggtaaagggaaggataagatcgacgatgaggacatcaccttccagcgcatggttgcaaagggattttggttctctactcggtggttgataccaacagatgcaagaggttgctggtgataggggaggctaccttcacggacgaggagcgatgatttgctttacctgaaagagcaaatggaagctgaagaagatgcagagcgccttcttcgtcatactgagaagcgggcatttgctgcttttaagaaagcagcaattttagctgattctacacctgctgtccctgtggctcttcgtgttgaacctaaacctaaaagtgatataaggcaacaagatcttttgaagaacattgttgggatcaaaccaaagcgaccaaaagttagcagcccttcacagccaccagatagcaataagcctaaacatacggaagaagaccctgtcggcgagttgtcgccatcacggaatccgttgggaccatctcatgggactgtgaatcctgaccacacagcgccaaggttagatgaaccaacagaggtgaagcaacagaacagagctggaagtttgcttggtttagcttatgagagttcggatgaagaatagttgatcatgcgattccaatgggaactggactatttcttgtcagatgtctgcattccaaacgacaggcctggtgtattgatgagagctctcactgagtcatcctcaggttacgggtttgaaacagcgtgggtttggaacagtcagtcaccaggtcatgccaggagtttgaaacattgtgggtttaaaacggccttccttcatatttgcagaggaaggctgcctcattttatcctctttagtatttagctgtgtaattggttttataattagattatatttaatattcataataaacattcaaacatccgatatatatagactaaattttagtgctggaaccaaacatcccctatattacagtacatcagtttgagggtttgaagaaatctctctaaattttagtgctggaaccaaacaccccctaaattacagtacatcagtttgcggggttgaagaaatctctctgcattcgtg

SEQ ID NO: 211380 - DNA, 1583 bp, Zea Mays
gtagctgaaccaccatgactttttccattattgggacagggtggatggataccctgtgtatagcatggcaacacccactattgatggagcgagtgatgttttgtcgtatctgggctctaaagacacaaccggaagaaacattgcacagaaggtggtcgtcacagatcttagagaggaagtggttgtttacatcaagggatcgccatttgttttgagagaactagatcaacctgttgatactttgaagcatgttggcattagtggtccaatggtagagaacatagagacaaggctaaaggaggatatactctctgaagttaaacagctaggtggtcggttactgcttcatcaagaagaatttaatgcagccacaaatcaatgtagtgtggtaggttactgggaacacatagatctggaggacgtgatgacaccagctgaagtgtacagcacattgagagacaagggctattgtatcgagtacaaaagaatacctctaaccagggaaagagaagcattagctgccgatgtagatgctatacaatcatcaattgatgaatctgctaggtactatctctttatttcacacactggatatggaggtgttgcttatgcgatggccattacctgcctgggactgagtgcagatgcaaagtttgtaatggaagaaacagcagaaacacactttgtatcaacatctcttgcgaaaaatgtgtccatcaaaactaaaactgacatagcacttaagcagggtgactaccgtgacatattaaaccttactagagtgttggtacatgggcccaagagcaaagaagaggttgacacagttattgacaggtgttctggtgctggtcatctgcgcgaagatattatgcattacaggaaagcactgcaagattgttcacatgacgacgacgacgactgtgatgaggaacactcttatctcactgatatgggcacaaaagctttgaggcgttacttttttctgatcaccttcagatcctacctatacagcacgacatcatgcaaaacaacatttacatcatggatgaaggcaaggcctgaacttggccacctttgcgacaatctaaagctggacaaataggccatcttcatgtgacgtgattatgtagttgtgtcacttccttggacacattcacccagagtttcaaaaaggaaggagactaaaagaacgggtagagaggaagcagtggttatgggagttgtggacaatgaaagagcagcttaggctgtccgaaagtagggcattgtactatacttgtcggtgttaattgacaccagcaagcatgtatatattgtcaggcgtattatagatgaacatattagatatttctattgtagtattttctcaaattttaaaagaatcatttcatgcagttcattctcatgtatgtatctgatatgcttgctttttcagcagcgtttttttagacaaagctcttcggcagctttgatttttgacttctctgccttctgggcgtcaatatggccgcagccttttctaggagttgtattgagctaggatgaagcttgaaagaaatacgatgtcttgtttctaaagcccc

SEQ ID NO: 211381 - DNA, 3133 bp, Zea Mays
agactttgccgtgtttcaaccaagacgttttgtcttgaaggctccctggcctccaccaaatggctattgagaagagatccaatgggtgctcttggttactcaagttcaaaaccccctcttacaaaaattgttgagtctgctaatgggcgtccacaagatatggacgttgttgctgccatgaggaatggagaagttcttgggcgtctaactgttttaaaaagcgaccactgcccaggcagccacagccttaatttacccgagagggtggagggtgcaccaaattttcgggaaatccctgggtttccagtctatggtgttgcaaatcctacagttgatggtattcgagctgttatccagtgcatcagtacaagcaagggagggcgacctgtgctatggcataatatgagagaagaaccagttatctacataaatggaaaaccatatgtgctacgcgaagtggaaagaccttgcaagaatatgctggagtacacagggattgatcgtgatagggtcgaacgcatggaagctcggctgaaggaggacattttacgcgaggcagaaagatatggtggagcgataatggttattcatgaaactgacgatggagagatctttgacacatgggaaaatgtagataatgaagctgttctgactccgttggaggtatacaaaaacttggtgagtgaaggccttccgatcaaatatgcacgggtgcccattactgatggtaaagctcccaaaagttcagactttgacacgatagccttcaatgttactgctgctagcaagggcactgctttcgtattcaattgccagatgggcaggggcagaacaactacaggaactgtgattgcttgcttgctgaaacttcgaattgatcatggcagacctattagaatcccagtttgtcaatatgaccatgaagatgatgctatttactcaactggaggagatgcaacagatcacaatggtcacttgaattcagaatcatggaaacctcgtactttgacgaagttaaattctggatttggaatcaatgacattcttctgctgcgaaaaattacaagattatttgataatggaattgagtgtaggcagactttggatactgttattgatagatgttcagctttgcagaatattcggcaagctgttttgaactacacaagagtaattaatcaacaacatgttgagcctagagttaggagggttgcattaaatcgtggcgctgaatatttggagagatacctcaaattaattgccttttctgcataccttggtagtgaagcatttgatggtttctgtggacaaggacaaacaaagatctcatttaaaggatggctgcaacagcggccagagatccaaaccatgaaatggagcataagactgcgacctggccgttttttcactgtgccgcatgagcagaaagcaacatatccacctccacaaggtgatgtaacaatggaaaccattgtcaaagctcgtagtggttctgttctgggaaagggatcaatactcaaaatgtacttctttcctggacagaaaaggtcaagcagtgtgaatttccggggtgcacctcatgttattaaggtggatggataccctgtgtatagcatggcaacacccactattgatggagcgagtgatgttttgtcgtatctgggctctaaagacacaaccggaagaaacattgcacagaaggtggtcgtcacagatcttagagaggaagtggttgtttacatcaagggatcgccatttgttttgagagaactagatcaacctgttgatactttgaagcatgttggcattagtggtccaatggtagagaacatagagacaaggctaaaggaggatatactctctgaagttaaacagctaggtggtcggttactgcttcatcaagaagaatttaatgcagccacaaatcaatgtagtgtggtaggttactgggaacacatagatctggaggacgtgatgacaccagctgaagtgtacagcacattgagagacaagggctattgtatcgagtacaaaagaatacctctaaccagggaaagagaagcattagctgccgatgtagatgctatacaatcatcaattgatgaatctgctaggtactatctctttatttcacacactggatatggaggtgttgcttatgcgatggccattacctgcctgggactgagtgcagatgcaaagtttgtaatggaagaaacagcagaaacacactttgtatcaacatctcttgcgaaaaatgtgtccatcaaaactaaaactgacatagcacttaagcagggtgactaccgtgacatattaaaccttactagagtgttggtacatgggcccaagagcaaagaagaggttgacacagttattgacaggtgttctggtgctggtcatctgcgcgaagatattatgcattacaggaaagcactgcaagattgttcacatgacgacgacgacgactgtgatgaggaacactcttatctcactgatatgggcacaaaagctttgaggcgttacttttttctgatcaccttcagatcctacctatacagcacgacatcatgcaaaacaacatttacatcatggatgaaggcaaggcctgaacttggccacctttgcgacaatctaaagctggacaaataggccatcttcatgtgacgtgattatgtagttgtgtcacttccttggacacattcacccagagtttcaaaaaggaaggagactaaaagaacgggtagagaggaagcagtggttatgggagttgtggacaatgaaagagcagcttaggctgtccgaaagtagggcattgtactatacttgtcggtgttaattgacaccagcaagcatgtatatattgtcaggcgtattatagatgaacatattagatatttctattgtagtattttctcaaattttaaaagaatcatttcatgcagttcattctcatgtatgtatctgatatgcttgctttttcagcagcgtttttttagacaaagctcttcggcagctttgatttttgacttctctgccttctgggcgtcaatatggccgcagccttttctaggagttgtattgagctaggatgaagcttgaaagaaatacgatgtcttgtttctaaagcccc

SEQ ID NO: 211382 - DNA, 3302 bp, Zea Mays
tttagtattacaaactgatggcagctgattctacggagtatccctagaacgggctctattgggaaggtcttctatgctggaaatgatgtagacgattatatgcctagctcagaagaagcaatactcagaggcgaatatgctgtcattaggagtttagtccgagttctcgaaggtggtgttgaaggcaaaaggcaagtggacaaagttattgacaaatgcgactccatgcaggctattgagaagagatccaatgggtgctcttggttactcaagttcaaaaccccctcttacaaaaattgttgagtctgctaatgggcgtccacaagatatggacgttgttgctgccatgaggaatggagaagttcttgggcgtctaactgttttaaaaagcgaccactgcccaggcagccacagccttaatttacccgagagggtggagggtgcaccaaattttcgggaaatccctgggtttccagtctatggtgttgcaaatcctacagttgatggtattcgagctgttatccagtgcatcagtacaagcaagggagggcgacctgtgctatggcataatatgagagaagaaccagttatctacataaatggaaaaccatatgtgctacgcgaagtggaaagaccttgcaagaatatgctggagtacacagggattgatcgtgatagggtcgaacgcatggaagctcggctgaaggaggacattttacgcgaggcagaaagatatggtggagcgataatggttattcatgaaactgacgatggagagatctttgacacatgggaaaatgtagataatgaagctgttctgactccgttggaggtatacaaaaacttggtgagtgaaggccttccgatcaaatatgcacgggtgcccattactgatggtaaagctcccaaaagttcagactttgacacgatagccttcaatgttactgctgctagcaagggcactgctttcgtattcaattgccagatgggcaggggcagaacaactacaggaactgtgattgcttgcttgctgaaacttcgaattgatcatggcagacctattagaatcccagtttgtcaatatgaccatgaagatgatgctatttactcaactggaggagatgcaacagatcacaatggtcacttgaattcagaatcatggaaacctcgtactttgacgaagttaaattctggatttggaatcaatgacattcttctgctgcgaaaaattacaagattatttgataatggaattgagtgtaggcagactttggatactgttattgatagatgttcagctttgcagaatattcggcaagctgttttgaactacacaagagtaattaatcaacaacatgttgagcctagagttaggagggttgcattaaatcgtggcgctgaatatttggagagatacctcaaattaattgccttttctgcataccttggtagtgaagcatttgatggtttctgtggacaaggacaaacaaagatctcatttaaaggatggctgcaacagcggccagagatccaaaccatgaaatggagcataagactgcgacctggccgttttttcactgtgccgcatgagcagaaagcaacatatccacctccacaaggtgatgtaacaatggaaaccattgtcaaagctcgtagtggttctgttctgggaaagggatcaatactcaaaatgtacttctttcctggacagaaaaggtcaagcagtgtgaatttccggggtgcacctcatgttattaaggtggatggataccctgtgtatagcatggcaacacccactattgatggagcgagtgatgttttgtcgtatctgggctctaaagacacaaccggaagaaacattgcacagaaggtggtcgtcacagatcttagagaggaagtggttgtttacatcaagggatcgccatttgttttgagagaactagatcaacctgttgatactttgaagcatgttggcattagtggtccaatggtagagaacatagagacaaggctaaaggaggatatactctctgaagttaaacagctaggtggtcggttactgcttcatcaagaagaatttaatgcagccacaaatcaatgtagtgtggtaggttactgggaacacatagatctggaggacgtgatgacaccagctgaagtgtacagcacattgagagacaagggctattgtatcgagtacaaaagaatacctctaaccagggaaagagaagcattagctgccgatgtagatgctatacaatcatcaattgatgaatctgctaggtactatctctttatttcacacactggatatggaggtgttgcttatgcgatggccattacctgcctgggactgagtgcagatgcaaagtttgtaatggaagaaacagcagaaacacactttgtatcaacatctcttgcgaaaaatgtgtccatcaaaactaaaactgacatagcacttaagcagggtgactaccgtgacatattaaaccttactagagtgttggtacatgggcccaagagcaaagaagaggttgacacagttattgacaggtgttctggtgctggtcatctgcgcgaagatattatgcattacaggaaagcactgcaagattgttcacatgacgacgacgacgactgtgatgaggaacactcttatctcactgatatgggcacaaaagctttgaggcgttacttttttctgatcaccttcagatcctacctatacagcacgacatcatgcaaaacaacatttacatcatggatgaaggcaaggcctgaacttggccacctttgcgacaatctaaagctggacaaataggccatcttcatgtgacgtgattatgtagttgtgtcacttccttggacacattcacccagagtttcaaaaaggaaggagactaaaagaacgggtagagaggaagcagtggttatgggagttgtggacaatgaaagagcagcttaggctgtccgaaagtagggcattgtactatacttgtcggtgttaattgacaccagcaagcatgtatatattgtcaggcgtattatagatgaacatattagatatttctattgtagtattttctcaaattttaaaagaatcatttcatgcagttcattctcatgtatgtatctgatatgcttgctttttcagcagcgtttttttagacaaagctcttcggcagctttgatttttgacttctctgccttctgggcgtcaatatggccgcagccttttctaggagttgtattgagctaggatgaagcttgaaagaaatacgatgtcttgtttctaaagcccc

SEQ ID NO: 211383 - DNA, 3604 bp, Zea Mays
aaaaacagtagcatgagtgcatgaacacagacagtcgtgttgggaactgtcatgtggttgtggtcttttagtattacaaactgatggcagctgattctacggagtatccctagaacgggctctattgggaaggtcttctatgctggaaatgatgtagacgattatatgcctagctcagaagaagcaatactcagaggcgaatatgctgtcattaggagtttagtccgagttctcgaaggtggtgttgaaggcaaaaggcaagtggacaaagttattgacaaatgcgactccatgcagaacctaagagaagctattgctacttaccgcaataacattcttcggcaacctgatgagatgaaacgagaggcatcactttccttctttgtggagtacttggaacgttattacttccttatatgctttgctgtctatgtgcattcggtgagctctgctcaccaaacaacattatcagtagaagttagtttttctgattggatgagagcaaggcctgaactgtacagcattcttcgaaggctattgagaagagatccaatgggtgctcttggttactcaagttcaaaaccccctcttacaaaaattgttgagtctgctaatgggcgtccacaagatatggacgttgttgctgccatgaggaatggagaagttcttgggcgtctaactgttttaaaaagcgaccactgcccaggcagccacagccttaatttacccgagagggtggagggtgcaccaaattttcgggaaatccctgggtttccagtctatggtgttgcaaatcctacagttgatggtattcgagctgttatccagtgcatcagtacaagcaagggagggcgacctgtgctatggcataatatgagagaagaaccagttatctacataaatggaaaaccatatgtgctacgcgaagtggaaagaccttgcaagaatatgctggagtacacagggattgatcgtgatagggtcgaacgcatggaagctcggctgaaggaggacattttacgcgaggcagaaagatatggtggagcgataatggttattcatgaaactgacgatggagagatctttgacacatgggaaaatgtagataatgaagctgttctgactccgttggaggtatacaaaaacttggtgagtgaaggccttccgatcaaatatgcacgggtgcccattactgatggtaaagctcccaaaagttcagactttgacacgatagccttcaatgttactgctgctagcaagggcactgctttcgtattcaattgccagatgggcaggggcagaacaactacaggaactgtgattgcttgcttgctgaaacttcgaattgatcatggcagacctattagaatcccagtttgtcaatatgaccatgaagatgatgctatttactcaactggaggagatgcaacagatcacaatggtcacttgaattcagaatcatggaaacctcgtactttgacgaagttaaattctggatttggaatcaatgacattcttctgctgcgaaaaattacaagattatttgataatggaattgagtgtaggcagactttggatactgttattgatagatgttcagctttgcagaatattcggcaagctgttttgaactacacaagagtaattaatcaacaacatgttgagcctagagttaggagggttgcattaaatcgtggcgctgaatatttggagagatacctcaaattaattgccttttctgcataccttggtagtgaagcatttgatggtttctgtggacaaggacaaacaaagatctcatttaaaggatggctgcaacagcggccagagatccaaaccatgaaatggagcataagactgcgacctggccgttttttcactgtgccgcatgagcagaaagcaacatatccacctccacaaggtgatgtaacaatggaaaccattgtcaaagctcgtagtggttctgttctgggaaagggatcaatactcaaaatgtacttctttcctggacagaaaaggtcaagcagtgtgaatttccggggtgcacctcatgttattaaggtggatggataccctgtgtatagcatggcaacacccactattgatggagcgagtgatgttttgtcgtatctgggctctaaagacacaaccggaagaaacattgcacagaaggtggtcgtcacagatcttagagaggaagtggttgtttacatcaagggatcgccatttgttttgagagaactagatcaacctgttgatactttgaagcatgttggcattagtggtccaatggtagagaacatagagacaaggctaaaggaggatatactctctgaagttaaacagctaggtggtcggttactgcttcatcaagaagaatttaatgcagccacaaatcaatgtagtgtggtaggttactgggaacacatagatctggaggacgtgatgacaccagctgaagtgtacagcacattgagagacaagggctattgtatcgagtacaaaagaatacctctaaccagggaaagagaagcattagctgccgatgtagatgctatacaatcatcaattgatgaatctgctaggtactatctctttatttcacacactggatatggaggtgttgcttatgcgatggccattacctgcctgggactgagtgcagatgcaaagtttgtaatggaagaaacagcagaaacacactttgtatcaacatctcttgcgaaaaatgtgtccatcaaaactaaaactgacatagcacttaagcagggtgactaccgtgacatattaaaccttactagagtgttggtacatgggcccaagagcaaagaagaggttgacacagttattgacaggtgttctggtgctggtcatctgcgcgaagatattatgcattacaggaaagcactgcaagattgttcacatgacgacgacgacgactgtgatgaggaacactcttatctcactgatatgggcacaaaagctttgaggcgttacttttttctgatcaccttcagatcctacctatacagcacgacatcatgcaaaacaacatttacatcatggatgaaggcaaggcctgaacttggccacctttgcgacaatctaaagctggacaaataggccatcttcatgtgacgtgattatgtagttgtgtcacttccttggacacattcacccagagtttcaaaaaggaaggagactaaaagaacgggtagagaggaagcagtggttatgggagttgtggacaatgaaagagcagcttaggctgtccgaaagtagggcattgtactatacttgtcggtgttaattgacaccagcaagcatgtatatattgtcaggcgtattatagatgaacatattagatatttctattgtagtattttctcaaattttaaaagaatcatttcatgcagttcattctcatgtatgtatctgatatgcttgctttttcagcagcgtttttttagacaaagctcttcggcagctttgatttttgacttctctgccttctgggcgtcaatatggccgcagccttttctaggagttgtattgagctaggatgaagcttgaaagaaatacgatgtcttgtttctaaagcccc

SEQ ID NO: 211384 - DNA, 3879 bp, Zea Mays
actagatatgtttttcagcttaggaaagtgaaactgggacaaaacttttgccccacaaacaaaaaattgcgaaggaattaaccgggagagagtggaacaaatggagtttcgccttaaggaagatattcttcaggaagcttcaaggtatggtaataagatactggtcactgatgagctgccaagtggtcagatggtggatcagtgggaatcagttgtgtatgatacagttaagactccacttgaggtatatgaggagttgcaacatcaaggctacctagttgactacgaacgtgttccaattactgatgagaaagcaccaaaggaaggagattttgacaacctggtacgtcgaatctctcaagttgatatagaaacagaaattgtgtttaactgccaaatggggagggggcggacaactactggtatggttatagctacattggtttacctaaaccgaattggagcttcaggtatccctagaacgggctctattgggaaggtcttctatgctggaaatgatgtagacgattatatgcctagctcagaagaagcaatactcagaggcgaatatgctgtcattaggagtttagtccgagttctcgaaggtggtgttgaaggcaaaaggcaagtggacaaagttattgacaaatgcgactccatgcagaacctaagagaagctattgctacttaccgcaataacattcttcggcaacctgatgagatgaaacgagaggcatcactttccttctttgtggagtacttggaacgttattacttccttatatgctttgctgtctatgtgcattcggtgagctctgctcaccaaacaacattatcagtagaagttagtttttctgattggatgagagcaaggcctgaactgtacagcattcttcgaaggctattgagaagagatccaatgggtgctcttggttactcaagttcaaaaccccctcttacaaaaattgttgagtctgctaatgggcgtccacaagatatggacgttgttgctgccatgaggaatggagaagttcttgggcgtctaactgttttaaaaagcgaccactgcccaggcagccacagccttaatttacccgagagggtggagggtgcaccaaattttcgggaaatccctgggtttccagtctatggtgttgcaaatcctacagttgatggtattcgagctgttatccagtgcatcagtacaagcaagggagggcgacctgtgctatggcataatatgagagaagaaccagttatctacataaatggaaaaccatatgtgctacgcgaagtggaaagaccttgcaagaatatgctggagtacacagggattgatcgtgatagggtcgaacgcatggaagctcggctgaaggaggacattttacgcgaggcagaaagatatggtggagcgataatggttattcatgaaactgacgatggagagatctttgacacatgggaaaatgtagataatgaagctgttctgactccgttggaggtatacaaaaacttggtgagtgaaggccttccgatcaaatatgcacgggtgcccattactgatggtaaagctcccaaaagttcagactttgacacgatagccttcaatgttactgctgctagcaagggcactgctttcgtattcaattgccagatgggcaggggcagaacaactacaggaactgtgattgcttgcttgctgaaacttcgaattgatcatggcagacctattagaatcccagtttgtcaatatgaccatgaagatgatgctatttactcaactggaggagatgcaacagatcacaatggtcacttgaattcagaatcatggaaacctcgtactttgacgaagttaaattctggatttggaatcaatgacattcttctgctgcgaaaaattacaagattatttgataatggaattgagtgtaggcagactttggatactgttattgatagatgttcagctttgcagaatattcggcaagctgttttgaactacacaagagtaattaatcaacaacatgttgagcctagagttaggagggttgcattaaatcgtggcgctgaatatttggagagatacctcaaattaattgccttttctgcataccttggtagtgaagcatttgatggtttctgtggacaaggacaaacaaagatctcatttaaaggatggctgcaacagcggccagagatccaaaccatgaaatggagcataagactgcgacctggccgttttttcactgtgccgcatgagcagaaagcaacatatccacctccacaagaaaaggtcaagcagtgtgaatttccggggtgcacctcatgttattaaggtggatggataccctgtgtatagcatggcaacacccactattgatggagcgagtgatgttttgtcgtatctgggctctaaagacacaaccggaagaaacattgcacagaaggtggtcgtcacagatcttagagaggaagtggttgtttacatcaagggatcgccatttgttttgagagaactagatcaacctgttgatactttgaagcatgttggcattagtggtccaatggtagagaacatagagacaaggctaaaggaggatatactctctgaagttaaacagctaggtggtcggttactgcttcatcaagaagaatttaatgcagccacaaatcaatgtagtgtggtaggttactgggaacacatagatctggaggacgtgatgacaccagctgaagtgtacagcacattgagagacaagggctattgtatcgagtacaaaagaatacctctaaccagggaaagagaagcattagctgccgatgtagatgctatacaatcatcaattgatgaatctgctaggtactatctctttatttcacacactggatatggaggtgttgcttatgcgatggccattacctgcctgggactgagtgcagatgcaaagtttgtaatggaagaaacagcagaaacacactttgtatcaacatctcttgcgaaaaatgtgtccatcaaaactaaaactgacatagcacttaagcagggtgactaccgtgacatattaaaccttactagagtgttggtacatgggcccaagagcaaagaagaggttgacacagttattgacaggtgttctggtgctggtcatctgcgcgaagatattatgcattacaggaaagcactgcaagattgttcacatgacgacgacgacgactgtgatgaggaacactcttatctcactgatatgggcacaaaagctttgaggcgttacttttttctgatcaccttcagatcctacctatacagcacgacatcatgcaaaacaacatttacatcatggatgaaggcaaggcctgaacttggccacctttgcgacaatctaaagctggacaaataggccatcttcatgtgacgtgattatgtagttgtgtcacttccttggacacattcacccagagtttcaaaaaggaaggagactaaaagaacgggtagagaggaagcagtggttatgggagttgtggacaatgaaagagcagcttaggctgtccgaaagtagggcattgtactatacttgtcggtgttaattgacaccagcaagcatgtatatattgtcaggcgtattatagatgaacatattagatatttctattgtagtattttctcaaattttaaaagaatcatttcatgcagttcattctcatgtatgtatctgatatgcttgctttttcagcagcgtttttttagacaaagctcttcggcagctttgatttttgacttctctgccttctgggcgtcaatatggccgcagccttttctaggagttgtattgagctaggatgaagcttgaaagaaatacgatgtcttgtttctaaagcccc

SEQ ID NO: 211385 - DNA, 3927 bp, Zea Mays
cagcaacttgctacgttgtttaatttcctggaattaaccgggagagagtggaacaaatggagtttcgccttaaggaagatattcttcaggaagcttcaaggtatggtaataagatactggtcactgatgagctgccaagtggtcagatggtggatcagtgggaatcagttgtgtatgatacagttaagactccacttgaggtatatgaggagttgcaacatcaaggctacctagttgactacgaacgtgttccaattactgatgagaaagcaccaaaggaaggagattttgacaacctggtacgtcgaatctctcaagttgatatagaaacagaaattgtgtttaactgccaaatggggagggggcggacaactactggtatggttatagctacattggtttacctaaaccgaattggagcttcaggtatccctagaacgggctctattgggaaggtcttctatgctggaaatgatgtagacgattatatgcctagctcagaagaagcaatactcagaggcgaatatgctgtcattaggagtttagtccgagttctcgaaggtggtgttgaaggcaaaaggcaagtggacaaagttattgacaaatgcgactccatgcagaacctaagagaagctattgctacttaccgcaataacattcttcggcaacctgatgagatgaaacgagaggcatcactttccttctttgtggagtacttggaacgttattacttccttatatgctttgctgtctatgtgcattcggtgagctctgctcaccaaacaacattatcagtagaagttagtttttctgattggatgagagcaaggcctgaactgtacagcattcttcgaaggctattgagaagagatccaatgggtgctcttggttactcaagttcaaaaccccctcttacaaaaattgttgagtctgctaatgggcgtccacaagatatggacgttgttgctgccatgaggaatggagaagttcttgggcgtctaactgttttaaaaagcgaccactgcccaggcagccacagccttaatttacccgagagggtggagggtgcaccaaattttcgggaaatccctgggtttccagtctatggtgttgcaaatcctacagttgatggtattcgagctgttatccagtgcatcagtacaagcaagggagggcgacctgtgctatggcataatatgagagaagaaccagttatctacataaatggaaaaccatatgtgctacgcgaagtggaaagaccttgcaagaatatgctggagtacacagggattgatcgtgatagggtcgaacgcatggaagctcggctgaaggaggacattttacgcgaggcagaaagatatggtggagcgataatggttattcatgaaactgacgatggagagatctttgacacatgggaaaatgtagataatgaagctgttctgactccgttggaggtatacaaaaacttggtgagtgaaggccttccgatcaaatatgcacgggtgcccattactgatggtaaagctcccaaaagttcagactttgacacgatagccttcaatgttactgctgctagcaagggcactgctttcgtattcaattgccagatgggcaggggcagaacaactacaggaactgtgattgcttgcttgctgaaacttcgaattgatcatggcagacctattagaatcccagtttgtcaatatgaccatgaagatgatgctatttactcaactggaggagatgcaacagatcacaatggtcacttgaattcagaatcatggaaacctcgtactttgacgaagttaaattctggatttggaatcaatgacattcttctgctgcgaaaaattacaagattatttgataatggaattgagtgtaggcagactttggatactgttattgatagatgttcagctttgcagaatattcggcaagctgttttgaactacacaagagtaattaatcaacaacatgttgagcctagagttaggagggttgcattaaatcgtggcgctgaatatttggagagatacctcaaattaattgccttttctgcataccttggtagtgaagcatttgatggtttctgtggacaaggacaaacaaagatctcatttaaaggatggctgcaacagcggccagagatccaaaccatgaaatggagcataagactgcgacctggccgttttttcactgtgccgcatgagcagaaagcaacatatccacctccacaaggtgatgtaacaatggaaaccattgtcaaagctcgtagtggttctgttctgggaaagggatcaatactcaaaatgtacttctttcctggacagaaaaggtcaagcagtgtgaatttccggggtgcacctcatgttattaaggtggatggataccctgtgtatagcatggcaacacccactattgatggagcgagtgatgttttgtcgtatctgggctctaaagacacaaccggaagaaacattgcacagaaggtggtcgtcacagatcttagagaggaagtggttgtttacatcaagggatcgccatttgttttgagagaactagatcaacctgttgatactttgaagcatgttggcattagtggtccaatggtagagaacatagagacaaggctaaaggaggatatactctctgaagttaaacagctaggtggtcggttactgcttcatcaagaagaatttaatgcagccacaaatcaatgtagtgtggtaggttactgggaacacatagatctggaggacgtgatgacaccagctgaagtgtacagcacattgagagacaagggctattgtatcgagtacaaaagaatacctctaaccagggaaagagaagcattagctgccgatgtagatgctatacaatcatcaattgatgaatctgctaggtactatctctttatttcacacactggatatggaggtgttgcttatgcgatggccattacctgcctgggactgagtgcagatgcaaagtttgtaatggaagaaacagcagaaacacactttgtatcaacatctcttgcgaaaaatgtgtccatcaaaactaaaactgacatagcacttaagcagggtgactaccgtgacatattaaaccttactagagtgttggtacatgggcccaagagcaaagaagaggttgacacagttattgacaggtgttctggtgctggtcatctgcgcgaagatattatgcattacaggaaagcactgcaagattgttcacatgacgacgacgacgactgtgatgaggaacactcttatctcactgatatgggcacaaaagctttgaggcgttacttttttctgatcaccttcagatcctacctatacagcacgacatcatgcaaaacaacatttacatcatggatgaaggcaaggcctgaacttggccacctttgcgacaatctaaagctggacaaataggccatcttcatgtgacgtgattatgtagttgtgtcacttccttggacacattcacccagagtttcaaaaaggaaggagactaaaagaacgggtagagaggaagcagtggttatgggagttgtggacaatgaaagagcagcttaggctgtccgaaagtagggcattgtactatacttgtcggtgttaattgacaccagcaagcatgtatatattgtcaggcgtattatagatgaacatattagatatttctattgtagtattttctcaaattttaaaagaatcatttcatgcagttcattctcatgtatgtatctgatatgcttgctttttcagcagcgtttttttagacaaagctcttcggcagctttgatttttgacttctctgccttctgggcgtcaatatggccgcagccttttctaggagttgtattgagctaggatgaagcttgaaagaaatacgatgtcttgtttctaaagcccc

SEQ ID NO: 211386 - DNA, 4081 bp, Zea Mays
gctgacatatgcagaaataaaaaattcatgttcagtttggcgaagaacttgcagccatatgcataaactttgctgggtcgctgcgtgttcatggtgttgcaatgcccacgatggaagggattgctaatgtgctaaatcatatcggagcacacaagaaaggaaagcaaacccggattctatggcatagtcttcgggaggaaccagttatctacatcaatggtcgaccctttgttttgcgggatgttgaaaagcccttctcgaatcttgaatacacgggaattaaccgggagagagtggaacaaatggagtttcgccttaaggaagatattcttcaggaagcttcaaggtatggtaataagatactggtcactgatgagctgccaagtggtcagatggtggatcagtgggaatcagttgtgtatgatacagttaagactccacttgaggtatatgaggagttgcaacatcaaggctacctagttgactacgaacgtgttccaattactgatgagaaagcaccaaaggaaggagattttgacaacctggtacgtcgaatctctcaagttgatatagaaacagaaattgtgtttaactgccaaatggggagggggcggacaactactggtatggttatagctacattggtttacctaaaccgaattggagcttcaggtatccctagaacgggctctattgggaaggtcttctatgctggaaatgatgtagacgattatatgcctagctcagaagaagcaatactcagaggcgaatatgctgtcattaggagtttagtccgagttctcgaaggtggtgttgaaggcaaaaggcaagtggacaaagttattgacaaatgcgactccatgcagaacctaagagaagctattgctacttaccgcaataacattcttcggcaacctgatgagatgaaacgagaggcatcactttccttctttgtggagtacttggaacgttattacttccttatatgctttgctgtctatgtgcattcggtgagctctgctcaccaaacaacattatcagtagaagttagtttttctgattggatgagagcaaggcctgaactgtacagcattcttcgaaggctattgagaagagatccaatgggtgctcttggttactcaagttcaaaaccccctcttacaaaaattgttgagtctgctaatgggcgtccacaagatatggacgttgttgctgccatgaggaatggagaagttcttgggcgtctaactgttttaaaaagcgaccactgcccaggcagccacagccttaatttacccgagagggtggagggtgcaccaaattttcgggaaatccctgggtttccagtctatggtgttgcaaatcctacagttgatggtattcgagctgttatccagtgcatcagtacaagcaagggagggcgacctgtgctatggcataatatgagagaagaaccagttatctacataaatggaaaaccatatgtgctacgcgaagtggaaagaccttgcaagaatatgctggagtacacagggattgatcgtgatagggtcgaacgcatggaagctcggctgaaggaggacattttacgcgaggcagaaagatatggtggagcgataatggttattcatgaaactgacgatggagagatctttgacacatgggaaaatgtagataatgaagctgttctgactccgttggaggtatacaaaaacttggtgagtgaaggccttccgatcaaatatgcacgggtgcccattactgatggtaaagctcccaaaagttcagactttgacacgatagccttcaatgttactgctgctagcaagggcactgctttcgtattcaattgccagatgggcaggggcagaacaactacaggaactgtgattgcttgcttgctgaaacttcgaattgatcatggcagacctattagaatcccagtttgtcaatatgaccatgaagatgatgctatttactcaactggaggagatgcaacagatcacaatggtcacttgaattcagaatcatggaaacctcgtactttgacgaagttaaattctggatttggaatcaatgacattcttctgctgcgaaaaattacaagattatttgataatggaattgagtgtaggcagactttggatactgttattgatagatgttcagctttgcagaatattcggcaagctgttttgaactacacaagagtaattaatcaacaacatgttgagcctagagttaggagggttgcattaaatcgtggcgctgaatatttggagagatacctcaaattaattgccttttctgcataccttggtagtgaagcatttgatggtttctgtggacaaggacaaacaaagatctcatttaaaggatggctgcaacagcggccagagatccaaaccatgaaatggagcataagactgcgacctggccgttttttcactgtgccgcatgagcagaaagcaacatatccacctccacaagaaaaggtcaagcagtgtgaatttccggggtgcacctcatgttattaaggtggatggataccctgtgtatagcatggcaacacccactattgatggagcgagtgatgttttgtcgtatctgggctctaaagacacaaccggaagaaacattgcacagaaggtggtcgtcacagatcttagagaggaagtggttgtttacatcaagggatcgccatttgttttgagagaactagatcaacctgttgatactttgaagcatgttggcattagtggtccaatggtagagaacatagagacaaggctaaaggaggatatactctctgaagttaaacagctaggtggtcggttactgcttcatcaagaagaatttaatgcagccacaaatcaatgtagtgtggtaggttactgggaacacatagatctggaggacgtgatgacaccagctgaagtgtacagcacattgagagacaagggctattgtatcgagtacaaaagaatacctctaaccagggaaagagaagcattagctgccgatgtagatgctatacaatcatcaattgatgaatctgctaggtactatctctttatttcacacactggatatggaggtgttgcttatgcgatggccattacctgcctgggactgagtgcagatgcaaagtttgtaatggaagaaacagcagaaacacactttgtatcaacatctcttgcgaaaaatgtgtccatcaaaactaaaactgacatagcacttaagcagggtgactaccgtgacatattaaaccttactagagtgttggtacatgggcccaagagcaaagaagaggttgacacagttattgacaggtgttctggtgctggtcatctgcgcgaagatattatgcattacaggaaagcactgcaagattgttcacatgacgacgacgacgactgtgatgaggaacactcttatctcactgatatgggcacaaaagctttgaggcgttacttttttctgatcaccttcagatcctacctatacagcacgacatcatgcaaaacaacatttacatcatggatgaaggcaaggcctgaacttggccacctttgcgacaatctaaagctggacaaataggccatcttcatgtgacgtgattatgtagttgtgtcacttccttggacacattcacccagagtttcaaaaaggaaggagactaaaagaacgggtagagaggaagcagtggttatgggagttgtggacaatgaaagagcagcttaggctgtccgaaagtagggcattgtactatacttgtcggtgttaattgacaccagcaagcatgtatatattgtcaggcgtattatagatgaacatattagatatttctattgtagtattttctcaaattttaaaagaatcatttcatgcagttcattctcatgtatgtatctgatatgcttgctttttcagcagcgtttttttagacaaagctcttcggcagctttgatttttgacttctctgccttctgggcgtcaatatggccgcagccttttctaggagttgtattgagctaggatgaagcttgaaagaaatacgatgtcttgtttctaaagcccc

SEQ ID NO: 211387 - DNA, 4404 bp, Zea Mays
gccccatcccttcctcctccgcctattggcctcgtccgcttccgcttcgacccctccccggcccgcctcggcctcgcgctccctcctcctcctcctcctcctcgcctccgcacccgggcaacccccgccctgccacggcgccgcggccagagccaggctctcccgcgtggaattcacgggacggaggccgctggtgccgcccgccgccgcctccgccaagatggacgccggggagatggaggacgtgcgggccgccgcggccgccgaggaggtcatcagcagcaggggcggctccgtgctggggaagaagaccatcctcaagagcgaccacttcccgggctgccagaacaagcgcctctccccgcagatcgacggcgcgcccaattaccgccaggctgggtcgctgcgtgttcatggtgttgcaatgcccacgatggaagggattgctaatgtgctaaatcatatcggagcacacaagaaaggaaagcaaacccggattctatggcatagtcttcgggaggaaccagttatctacatcaatggtcgaccctttgttttgcgggatgttgaaaagcccttctcgaatcttgaatacacgggaattaaccgggagagagtggaacaaatggagtttcgccttaaggaagatattcttcaggaagcttcaaggtatggtaataagatactggtcactgatgagctgccaagtggtcagatggtggatcagtgggaatcagttgtgtatgatacagttaagactccacttgaggtatatgaggagttgcaacatcaaggctacctagttgactacgaacgtgttccaattactgatgagaaagcaccaaaggaaggagattttgacaacctggtacgtcgaatctctcaagttgatatagaaacagaaattgtgtttaactgccaaatggggagggggcggacaactactggtatggttatagctacattggtttacctaaaccgaattggagcttcaggtatccctagaacgggctctattgggaaggtcttctatgctggaaatgatgtagacgattatatgcctagctcagaagaagcaatactcagaggcgaatatgctgtcattaggagtttagtccgagttctcgaaggtggtgttgaaggcaaaaggcaagtggacaaagttattgacaaatgcgactccatgcagaacctaagagaagctattgctacttaccgcaataacattcttcggcaacctgatgagatgaaacgagaggcatcactttccttctttgtggagtacttggaacgttattacttccttatatgctttgctgtctatgtgcattcggtgagctctgctcaccaaacaacattatcagtagaagttagtttttctgattggatgagagcaaggcctgaactgtacagcattcttcgaaggctattgagaagagatccaatgggtgctcttggttactcaagttcaaaaccccctcttacaaaaattgttgagtctgctaatgggcgtccacaagatatggacgttgttgctgccatgaggaatggagaagttcttgggcgtctaactgttttaaaaagcgaccactgcccaggcagccacagccttaatttacccgagagggtggagggtgcaccaaattttcgggaaatccctgggtttccagtctatggtgttgcaaatcctacagttgatggtattcgagctgttatccagtgcatcagtacaagcaagggagggcgacctgtgctatggcataatatgagagaagaaccagttatctacataaatggaaaaccatatgtgctacgcgaagtggaaagaccttgcaagaatatgctggagtacacagggattgatcgtgatagggtcgaacgcatggaagctcggctgaaggaggacattttacgcgaggcagaaagatatggtggagcgataatggttattcatgaaactgacgatggagagatctttgacacatgggaaaatgtagataatgaagctgttctgactccgttggaggtatacaaaaacttggtgagtgaaggccttccgatcaaatatgcacgggtgcccattactgatggtaaagctcccaaaagttcagactttgacacgatagccttcaatgttactgctgctagcaagggcactgctttcgtattcaattgccagatgggcaggggcagaacaactacaggaactgtgattgcttgcttgctgaaacttcgaattgatcatggcagacctattagaatcccagtttgtcaatatgaccatgaagatgatgctatttactcaactggaggagatgcaacagatcacaatggtcacttgaattcagaatcatggaaacctcgtactttgacgaagttaaattctggatttggaatcaatgacattcttctgctgcgaaaaattacaagattatttgataatggaattgagtgtaggcagactttggatactgttattgatagatgttcagctttgcagaatattcggcaagctgttttgaactacacaagagtaattaatcaacaacatgttgagcctagagttaggagggttgcattaaatcgtggcgctgaatatttggagagatacctcaaattaattgccttttctgcataccttggtagtgaagcatttgatggtttctgtggacaaggacaaacaaagatctcatttaaaggatggctgcaacagcggccagagatccaaaccatgaaatggagcataagactgcgacctggccgttttttcactgtgccgcatgagcagaaagcaacatatccacctccacaagaaaaggtcaagcagtgtgaatttccggggtgcacctcatgttattaaggtggatggataccctgtgtatagcatggcaacacccactattgatggagcgagtgatgttttgtcgtatctgggctctaaagacacaaccggaagaaacattgcacagaaggtggtcgtcacagatcttagagaggaagtggttgtttacatcaagggatcgccatttgttttgagagaactagatcaacctgttgatactttgaagcatgttggcattagtggtccaatggtagagaacatagagacaaggctaaaggaggatatactctctgaagttaaacagctaggtggtcggttactgcttcatcaagaagaatttaatgcagccacaaatcaatgtagtgtggtaggttactgggaacacatagatctggaggacgtgatgacaccagctgaagtgtacagcacattgagagacaagggctattgtatcgagtacaaaagaatacctctaaccagggaaagagaagcattagctgccgatgtagatgctatacaatcatcaattgatgaatctgctaggtactatctctttatttcacacactggatatggaggtgttgcttatgcgatggccattacctgcctgggactgagtgcagatgcaaagtttgtaatggaagaaacagcagaaacacactttgtatcaacatctcttgcgaaaaatgtgtccatcaaaactaaaactgacatagcacttaagcagggtgactaccgtgacatattaaaccttactagagtgttggtacatgggcccaagagcaaagaagaggttgacacagttattgacaggtgttctggtgctggtcatctgcgcgaagatattatgcattacaggaaagcactgcaagattgttcacatgacgacgacgacgactgtgatgaggaacactcttatctcactgatatgggcacaaaagctttgaggcgttacttttttctgatcaccttcagatcctacctatacagcacgacatcatgcaaaacaacatttacatcatggatgaaggcaaggcctgaacttggccacctttgcgacaatctaaagctggacaaataggccatcttcatgtgacgtgattatgtagttgtgtcacttccttggacacattcacccagagtttcaaaaaggaaggagactaaaagaacgggtagagaggaagcagtggttatgggagttgtggacaatgaaagagcagcttaggctgtccgaaagtagggcattgtactatacttgtcggtgttaattgacaccagcaagcatgtatatattgtcaggcgtattatagatgaacatattagatatttctattgtagtattttctcaaattttaaaagaatcatttcatgcagttcattctcatgtatgtatctgatatgcttgctttttcagcagcgtttttttagacaaagctcttcggcagctttgatttttgacttctctgccttctgggcgtcaatatggccgcagccttttctaggagttgtattgagctaggatgaagcttgaaagaaatacgatgtcttgtttctaaagcccc

SEQ ID NO: 211388 - DNA, 3350 bp, Zea Mays
aaaagcccaccaaggccatccgaccaccgcagcctaaatcaccttccgtcgccagctcctagaaacccctctcctgcccggcctcctccctctctcatccgatgggcaagtcaagcaagaaggcggccgccgtggctgcagcgccagcggcggtgcccaaggggaagaagcgggaggcggaggacgagatcgagatggccgtgagcgcgaagaagcagaaggcggcgccaccggcgaaggccgtgccgacgtccaagaaggacgccaaggaggacgccaagtccaagaagcagccgccccccaagaaggctgagaacagcagcagtgactctgaagaggaccccgagtccgaagaggagaatttttataatttgattgagtcggggagggcagacggagatgaggagtttgacgaggacgaggaggacgggttcgagttcggtgacgctgacgaggcgatgcaatgcgtggtgatggcggaaagcagcaccaccgccgcggcgctgcgtgctcacacgcaggactacgaggcgctagctgcgcacaagcgcaaggcccttgccgaggagcaaccccagagggaggagggtcccaaaaggccaagaccggaccaactttcagaagcagaagcagcaaccatgttcgaccaactgatggaaggctttggtcttaggcgtaaaagaaggtcaaaagatggcaagagaaggggaagaaagaaaggaacaaagaataagggcagtgctgaagttattaaaaagttgggtgatgctactctacttttcgctgaagaaaaatttaacgaggcaatacctatactacatgagattgtgcgaattgcaccaaatttgtcagattcatattatctacttggtagcatttatagtgagattggtgaactagataaagccataaacttcttgatgctagctgcatatgtttccccaaaggatgcatctctgtggaagaaacttattcccttggcaaagaaaaagggggatgcttctctggcaagacactgcattttaaaagcaatgaacgcagatccagaagatgtagatctgaagtatctttgtggttatatgtatcacaacctttgtgaatatcagaaagctgcagaaatatatgaacaaatagtcagaatttatcctgccaatagtgctgttcgtaaagtagcagcccagatgtacagagagtgtggtcaaattgacaatgctattaatttgttgaaagactatgccgatactcaaactttcaacattgactggagcgttctagatttattgatatcactttatctaagaaataatgtttttagtgaagcactaaagcagatcaagagggcacaactacatttgggatctcaacagaaactaccagtacaattgcaggcaaaagaagtaatctgccatgcatattgcggtgacatgaaacatgctgagattttccttcgtgatgtgcgtttggagccatcaaaagaaaacattgatgtgctcaaggaactcgcaagcaatttagaaaaaatgggacgatatgagtatgcagtaaagttttacctgctaattgaaaatgttgctactcaaaatgatggtggtttatgctttgatcacaaagaaatgggtagttggtatgtcaaagctgctcagtgctacatgatcttaggggacaaaaaaaatgctattccttatttttataaagcgttacaaagcatgaaggacaatattggtatacgattgaccttatcctcccttcttattgatgacgacaagacagatgaagctgccactttgctttctcctcccaaaattccagagttgcagtctgctaatactccagaccaacagaaaccttggtggtgtgatgggaaagttaagatggcgcttgcaaaactttattacaataaaggaaatttggaagattttgtggacacaatttttcatcctattctagaaactttgaatgttgaatatgctaatcgaaaggtcaagtcaatgagaaagcttccaaacattgttctgcatgaaagagtcaaagtattgggtgagcaacggccagatagtgtatttcaaggattaaggccaatagcatcacctgatgaattacaaaaggcaaacagagcaaagaaattaattgagaaaaggaccgctgcaaatgaagagttaaaacatgattatctgccaagaacaaagcaagttcctcctgttcctggtctactgacaaatgtggagcatcatcagcttgtgttaaatctttgtcgaacattagctttgctgcagcgatattgggatgcactgcagattatcaaccgaaccctcaaacttggaaatgacgcactcactggtgacaaaaaagaggaactcagatccttgggtgctcaaatagcttatagagctccagatcccagtcatggctttaagtatgtccgttacgttgttcagcagcacccatattctcttgccgcatggaattcctactataaggtggtatcaagaatagaggacaggtttccacatcatttcaaatatctccttcggacaagagaagcgaatcctgactgtgtgcctccaataatcatatccgggcatcgatttactgctataagtcagcatcagtcagctgcccgggattaccttgaagcttataagctggacccagaaaaccctcttattaatctatgtgtaggcactgccttgattagtttggcccttggcttcaggcttcagaataagaaccagtgcatcgtccaagcttttgctttcctgtacagataccttcgcctttgtgataacagtcaggaagcctcgtacaacattgctcgagcgtatcaccacattggcctgaataccttggcagctgtttactacgacaaggctttgtcaaccgaggagaaggatcatcccatccccaagcttccgtacgaggctggttcacgtgcgccagaggatctgaggccagggtattgtgatgtgcgaagagaggcagcgttcaatctgcatctaatctatatgaagagtggagctaccgatcttgcgagacggatcctaaaaacttactgcactgtctaaaagctggtatcgggcaatgttgttgggatcggatatcagatccttcaaggctccttgcattagcttaggatcaagctagtctataaagctagaacattggtgtaatatgtcactagtgactttagatgtgtagctgaagagttaacaacgtgcttgatccagatttaaacgtatattctggtttcacaatgctgtgttatagtcaaatggttcagcgatgctttgcttcatgtgatttattggcaattcattattatttttctctcaaacgcacaggagaacgcatag

SEQ ID NO: 211389 - DNA, 3329 bp, Zea Mays
caaggccatccgaccaccgcagcctaaatcaccttccgtcgccagctcctagaaacccctctcctgcccggcctcctccctctctcatccgatgggcaagtcaagcaagaaggcggccgccgtggctgcagcgccagcggcggtgcccaaggggaagaagcgggaggcggaggacgagatcgagatggccgtgagcgcgaagaagcagaaggcggcgccaccggcgaaggccgtgccgacgtccaagaaggacgccaaggaggacgccaagtccaagaagcagccgccccccaagaaggctgagaacagcagcagtgactctgaagaggaccccgagtccgaagaggagaatttttataatttgattgagtcggggagggcagacggagatgaggagtttgacgaggacgaggaggacgggttcgagttcggtgacgctgacgaggcgatgcaatgcgtggtgatggcggaaagcagcaccaccgccgcggcgctgcgtgctcacacgcaggactacgaggcgctagctgcgcacaagcgcaaggcccttgccgaggagcaaccccagagggaggagggtcccaaaaggccaagaccggaccaactttcagaagcagaagcagcaaccatgttcgaccaactgatggaaggctttggtcttaggcgtaaaagaaggtcaaaagatggcaagagaaggggaagaaagaaaggaacaaagaataagggcagtgctgaagttattaaaaagttgggtgatgctactctacttttcgctgaagaaaaatttaacgaggcaatacctatactacatgagattgtgcgaattgcaccaaatttgtcagattcatattatctacttggtagcatttatagtgagattggtgaactagataaagccataaacttcttgatgctagctgcatatgtttccccaaaggatgcatctctgtggaagaaacttattcccttggcaaagaaaaagggggatgcttctctggcaagacactgcattttaaaagcaatgaacgcagatccagaagatgtagatctgaagtatctttgtggttatatgtatcacaacctttgtgaatatcagaaagctgcagaaatatatgaacaaatagtcagaatttatcctgccaatagtgctgttcgtaaagtagcagcccagatgtacagagagtgtggtcaaattgacaatgctattaatttgttgaaagactatgccgatactcaaactttcaacattgactggagcgttctagatttattgatatcactttatctaagaaataatgtttttagtgaagcactaaagcagatcaagagggcacaactacatttgggatctcaacagaaactaccagtacaattgcaggcaaaagaagtaatctgccatgcatattgcggtgacatgaaacatgctgagattttccttcgtgatgtgcgtttggagccatcaaaagaaaacattgatgtgctcaaggaactcgcaagcaatttagaaaaaatgggacgatatgagtatgcagtaaagttttacctgctaattgaaaatgttgctactcaaaatgatggtggtttatgctttgatcacaaagaaatgggtagttggtatgtcaaagctgctcagtgctacatgatcttaggggacaaaaaaaatgctattccttatttttataaagcgttacaaagcatgaaggacaatattggtatacgattgaccttatcctcccttcttattgatgacgacaagacagatgaagctgccactttgctttctcctcccaaaattccagagttgcagtctgctaatactccagaccaacagaaaccttggtggtgtgatgggaaagttaagatggcgcttgcaaaactttattacaataaaggaaatttggaagattttgtggacacaatttttcatcctattctagaaactttgaatgttgaatatgctaatcgaaaggtcaagtcaatgagaaagcttccaaacattgttctgcatgaaagagtcaaagtattgggtgagcaacggccagatagtgtatttcaaggattaaggccaatagcatcacctgatgaattacaaaaggcaaacagagcaaagaaattaattgagaaaaggaccgctgcaaatgaagagttaaaacatgattatctgccaagaacaaagcaagttcctcctgttcctggtctactgacaaatgtggagcatcatcagcttgtgttaaatctttgtcgaacattagctttgctgcagcgatattgggatgcactgcagattatcaaccgaaccctcaaacttggaaatgacgcactcactggtgacaaaaaagaggaactcagatccttgggtgctcaaatagcttatagagctccagatcccagtcatggctttaagtatgtccgttacgttgttcagcagcacccatattctcttgccgcatggaattcctactataagaatagaggacaggtttccacatcatttcaaatatctccttcggacaagagaagcgaatcctgactgtgtgcctccaataatcatatccgggcatcgatttactgctataagtcagcatcagtcagctgcccgggattaccttgaagcttataagctggacccagaaaaccctcttattaatctatgtgtaggcactgccttgattagtttggcccttggcttcaggcttcagaataagaaccagtgcatcgtccaagcttttgctttcctgtacagataccttcgcctttgtgataacagtcaggaagcctcgtacaacattgctcgagcgtatcaccacattggcctgaataccttggcagctgtttactacgacaaggctttgtcaaccgaggagaaggatcatcccatccccaagcttccgtacgaggctggttcacgtgcgccagaggatctgaggccagggtattgtgatgtgcgaagagaggcagcgttcaatctgcatctaatctatatgaagagtggagctaccgatcttgcgagacggatcctaaaaacttactgcactgtctaaaagctggtatcgggcaatgttgttgggatcggatatcagatccttcaaggctccttgcattagcttaggatcaagctagtctataaagctagaacattggtgtaatatgtcactagtgactttagatgtgtagctgaagagttaacaacgtgcttgatccagatttaaacgtatattctggtttcacaatgctgtgttatagtcaaatggttcagcgatgctttgcttcatgtgatttattggcaattcattattatttttctctcaaacgcacaggagaacgcatag

SEQ ID NO: 211390 - DNA, 3122 bp, Zea Mays
cgtcgccagctcctagaaacccctctcctgcccggcctcctccctctctcatccgatgggcaagtcaagcaagaaggcggccgccgtggctgcagcgccagcggcggtgcccaaggggaagaagcgggaggcggaggacgagatcgagatggccgtgagcgcgaagaagcagaaggcggcgccaccggcgaaggccgtgccgacgtccaagaaggacgccaaggaggacgccaagtccaagaagcagccgccccccaagaaggctgagaacagcagcagtgactctgaagaggaccccgagtccgaagaggagaatttttataatttgattgagtcggggagggcagacggagatgaggagtttgacgaggacgaggaggacgggttcgagttcggtgacgctgacgaggcgatgcaatgcgtggtgatggcggaaagcagcaccaccgccgcggcgctgcgtgctcacacgcaggactacgaggcgctagctgcgcacaagcgcaaggcccttgccgaggagcaaccccagagggaggagggtcccaaaaggccaagaccggaccaactttcagaagcagaagcagcaaccatgttcgaccaactgatggaaggctttggtcttaggcgtaaaagaaggtcaaaagatggcaagagaaggggaagaaagaaaggaacaaagaataagggcagtgctgaagttattaaaaagttgggtgatgctactctacttttcgctgaagaaaaatttaacgaggaaaaagggggatgcttctctggcaagacactgcattttaaaagcaatgaacgcagatccagaagatgtagatctgaagtatctttgtggttatatgtatcacaacctttgtgaatatcagaaagctgcagaaatatatgaacaaatagtcagaatttatcctgccaatagtgctgttcgtaaagtagcagcccagatgtacagagagtgtggtcaaattgacaatgctattaatttgttgaaagactatgccgatactcaaactttcaacattgactggagcgttctagatttattgatatcactttatctaagaaataatgtttttagtgaagcactaaagcagatcaagagggcacaactacatttgggatctcaacagaaactaccagtacaattgcaggcaaaagaagtaatctgccatgcatattgcggtgacatgaaacatgctgagattttccttcgtgatgtgcgtttggagccatcaaaagaaaacattgatgtgctcaaggaactcgcaagcaatttagaaaaaatgggacgatatgagtatgcagtaaagttttacctgctaattgaaaatgttgctactcaaaatgatggtggtttatgctttgatcacaaagaaatgggtagttggtatgtcaaagctgctcagtgctacatgatcttaggggacaaaaaaaatgctattccttatttttataaagcgttacaaagcatgaaggacaatattggtatacgattgaccttatcctcccttcttattgatgacgacaagacagatgaagctgccactttgctttctcctcccaaaattccagagttgcagtctgctaatactccagaccaacagaaaccttggtggtgtgatgggaaagttaagatggcgcttgcaaaactttattacaataaaggaaatttggaagattttgtggacacaatttttcatcctattctagaaactttgaatgttgaatatgctaatcgaaaggtcaagtcaatgagaaagcttccaaacattgttctgcatgaaagagtcaaagtattgggtgagcaacggccagatagtgtatttcaaggattaaggccaatagcatcacctgatgaattacaaaaggcaaacagagcaaagaaattaattgagaaaaggaccgctgcaaatgaagagttaaaacatgattatctgccaagaacaaagcaagttcctcctgttcctggtctactgacaaatgtggagcatcatcagcttgtgttaaatctttgtcgaacattagctttgctgcagcgatattgggatgcactgcagattatcaaccgaaccctcaaacttggaaatgacgcactcactggtgacaaaaaagaggaactcagatccttgggtgctcaaatagcttatagagctccagatcccagtcatggctttaagtatgtccgttacgttgttcagcagcacccatattctcttgccgcatggaattcctactataaggtggtatcaagaatagaggacaggtttccacatcatttcaaatatctccttcggacaagagaagcgaatcctgactgtgtgcctccaataatcatatccgggcatcgatttactgctataagtcagcatcagtcagctgcccgggattaccttgaagcttataagctggacccagaaaaccctcttattaatctatgtgtaggcactgccttgattagtttggcccttggcttcaggcttcagaataagaaccagtgcatcgtccaagcttttgctttcctgtacagataccttcgcctttgtgataacagtcaggaagcctcgtacaacattgctcgagcgtatcaccacattggcctgaataccttggcagctgtttactacgacaaggctttgtcaaccgaggagaaggatcatcccatccccaagcttccgtacgaggctggttcacgtgcgccagaggatctgaggccagggtattgtgatgtgcgaagagaggcagcgttcaatctgcatctaatctatatgaagagtggagctaccgatcttgcgagacggatcctaaaaacttactgcactgtctaaaagctggtatcgggcaatgttgttgggatcggatatcagatccttcaaggctccttgcattagcttaggatcaagctagtctataaagctagaacattggtgtaatatgtcactagtgactttagatgtgtagctgaagagttaacaacgtgcttgatccagatttaaacgtatattctggtttcacaatgctgtgttatagtcaaatggttcagcgatgctttgcttcatgtgatttattggcaattcattattatttttctctcaaacgcacaggagaacgcatag

SEQ ID NO: 211391 - DNA, 3290 bp, Zea Mays
gccagctcctagaaacccctctcctgcccggcctcctccctctctcatccgatgggcaagtcaagcaagaaggcggccgccgtggctgcagcgccagcggcggtgcccaaggggaagaagcgggaggcggaggacgagatcgagatggccgtgagcgcgaagaagcagaaggcggcgccaccggcgaaggccgtgccgacgtccaagaaggacgccaaggaggacgccaagtccaagaagcagccgccccccaagaaggctgagaacagcagcagtgactctgaagaggaccccgagtccgaagaggagaatttttataatttgattgagtcggggagggcagacggagatgaggagtttgacgaggacgaggaggacgggttcgagttcggtgacgctgacgaggcgatgcaatgcgtggtgatggcggaaagcagcaccaccgccgcggcgctgcgtgctcacacgcaggactacgaggcgctagctgcgcacaagcgcaaggcccttgccgaggagcaaccccagagggaggagggtcccaaaaggccaagaccggaccaactttcagaagcagaagcagcaaccatgttcgaccaactgatggaaggctttggtcttaggcgtaaaagaagggcaagagaaggggaagaaagaaaggaacaaagaataagggcagtgctgaagttattaaaaagttgggtgatgctactctacttttcgctgaagaaaaatttaacgaggcaatacctatactacatgagattgtgcgaattgcaccaaatttgtcagattcatattatctacttggtagcatttatagtgagattggtgaactagataaagccataaacttcttgatgctagctgcatatgtttccccaaaggatgcatctctgtggaagaaacttattcccttggcaaagaaaaagggggatgcttctctggcaagacactgcattttaaaagcaatgaacgcagatccagaagatgtagatctgaagtatctttgtggttatatgtatcacaacctttgtgaatatcagaaagctgcagaaatatatgaacaaatagtcagaatttatcctgccaatagtgctgttcgtaaagtagcagcccagatgtacagagagtgtggtcaaattgacaatgctattaatttgttgaaagactatgccgatactcaaactttcaacattgactggagcgttctagatttattgatatcactttatctaagaaataatgtttttagtgaagcactaaagcagatcaagagggcacaactacatttgggatctcaacagaaactaccagtacaattgcaggcaaaagaagtaatctgccatgcatattgcggtgacatgaaacatgctgagattttccttcgtgatgtgcgtttggagccatcaaaagaaaacattgatgtgctcaaggaactcgcaagcaatttagaaaaaatgggacgatatgagtatgcagtaaagttttacctgctaattgaaaatgttgctactcaaaatgatggtggtttatgctttgatcacaaagaaatgggtagttggtatgtcaaagctgctcagtgctacatgatcttaggggacaaaaaaaatgctattccttatttttataaagcgttacaaagcatgaaggacaatattggtatacgattgaccttatcctcccttcttattgatgacgacaagacagatgaagctgccactttgctttctcctcccaaaattccagagttgcagtctgctaatactccagaccaacagaaaccttggtggtgtgatgggaaagttaagatggcgcttgcaaaactttattacaataaaggaaatttggaagattttgtggacacaatttttcatcctattctagaaactttgaatgttgaatatgctaatcgaaaggtcaagtcaatgagaaagcttccaaacattgttctgcatgaaagagtcaaagtattgggtgagcaacggccagatagtgtatttcaaggattaaggccaatagcatcacctgatgaattacaaaaggcaaacagagcaaagaaattaattgagaaaaggaccgctgcaaatgaagagttaaaacatgattatctgccaagaacaaagcaagttcctcctgttcctggtctactgacaaatgtggagcatcatcagcttgtgttaaatctttgtcgaacattagctttgctgcagcgatattgggatgcactgcagattatcaaccgaaccctcaaacttggaaatgacgcactcactggtgacaaaaaagaggaactcagatccttgggtgctcaaatagcttatagagctccagatcccagtcatggctttaagtatgtccgttacgttgttcagcagcacccatattctcttgccgcatggaattcctactataaggtggtatcaagaatagaggacaggtttccacatcatttcaaatatctccttcggacaagagaagcgaatcctgactgtgtgcctccaataatcatatccgggcatcgatttactgctataagtcagcatcagtcagctgcccgggattaccttgaagcttataagctggacccagaaaaccctcttattaatctatgtgtaggcactgccttgattagtttggcccttggcttcaggcttcagaataagaaccagtgcatcgtccaagcttttgctttcctgtacagataccttcgcctttgtgataacagtcaggaagcctcgtacaacattgctcgagcgtatcaccacattggcctgaataccttggcagctgtttactacgacaaggctttgtcaaccgaggagaaggatcatcccatccccaagcttccgtacgaggctggttcacgtgcgccagaggatctgaggccagggtattgtgatgtgcgaagagaggcagcgttcaatctgcatctaatctatatgaagagtggagctaccgatcttgcgagacggatcctaaaaacttactgcactgtctaaaagctggtatcgggcaatgttgttgggatcggatatcagatccttcaaggctccttgcattagcttaggatcaagctagtctataaagctagaacattggtgtaatatgtcactagtgactttagatgtgtagctgaagagttaacaacgtgcttgatccagatttaaacgtatattctggtttcacaatgctgtgttatagtcaaatggttcagcgatgctttgcttcatgtgatttattggcaattcattattatttttctctcaaacgcacaggagaacgcatag

SEQ ID NO: 211392 - DNA, 840 bp, Zea Mays
ggcacgcatacaaatggatcccaggtcccaacagacagcggcacatgatagaacaaagcaaacatctgcaaactgtaatggcggctccagtaggtgccaatgccataggagcgggcgacgagctgctcctgctgggcacatggtcgagcccatgggtgatccgagcgagggtggcgatggggctcaagggcctgagctacgagtacctcgaggaggacctcggcaacaagagcggcctcctgctccggtccaacccggtgcacaagaaggtgcccgtcctcatccacggcggccgcccattgtgcgagtcgctcgtgatcctgcagtacctcgacgaggcatggccgacggccggtcctccgctcctcccggccgacccctacgaccgcgccacggcacggttctgggcggcctacatcaacgacacgtttttcccggcgttcagggcgctgttcagatcgctgacggacgagcagagagcggaggcgctgcggaacgccctgcctgcggtggagacgttggagcgaacgctcgcggagtgctccgcggggaaggcgttcttcggcggcgacgccgtcgggatcgtggacgtcgcgctcgggagccacctggtctggatccgagtggtggatgaggttggaggcaccagccttctggacgcggccaaggtccccggcctggcggcgtgggcggagcggttcttggccgtggacgccgtgaagaaggtgatgccggacgcaacgaaggtcctggagcagtacaaggggtttcgggctaaatggattgcgggcgccggttgtacctgaaacgtacgactgatactaaactactctcgtgtgg

SEQ ID NO: 211393 - DNA, 732 bp, Zea Mays
acagaatttgtgaggtaccacggtccagccaaagcccacaaggagcaaacaacaacagaacatggtatggcaaggcaaacttaaaccagtatgcagatttggacggagtacaataatgctcaacagctcaagactgcttttgacgtacgaataactcataacgccctctccgtccccgaccagaatcgtcacttcctccggctccggcgatctcctccaccgccgttgtcagcggtccggccgagatggggagcacttcctctatgctcacccaatacgatatcgaggaggtccaggaccattgtaaccacgcattctcgcagcaggagatcgtgtcgctgtaccaccgcttctgccagctcgaccgcaacggaggtggcttcgtctccgctgacgagttcatgtcggtacctgagttcgccgtaaatcccctctcccagaggctcctgaggatgctggatggtctcaacttcaaggagtttgtagcatttttgtcggcttttagcccccgcacaagcctacaggaaaagattgaatttattttcagggtttatgatactgactgcaacgggaaggttgcttttgatgacatcttaagcatcttgcgagatctgacaggttcatttatgacagagcaacagagacagattattggcaattctgagctcaagatggaggttgaagttcctattgactaaaaaccaaataagtatcatctagttgtatcgtgat

SEQ ID NO: 211394 - DNA, 2579 bp, Zea Mays
cccagatctgcgaacgcgcgggtcggccgcatcgagatctggctgcgcgtgttcgcgacgattctcgctctccgcgcaatcagtggcgctcagaatgtttcggtcctatgagccgtgcaaaaagcttcatatgtgcttcccccgtcacgttctcgtcgtgagattcatcgcgggtggatgcgtgatggagactgaaacaacggagatgtgctttcaccgggaaatgcccagaggccagagtgtgcacctaggagaatgtggagctgcaaaactttacatttacgagtgtctgagtcctccggcgataaaattcagagaaggatcatattagaaagatccacttcctgtgaaagtcaacaagctgacctcaatcaagacacaacttccctactcctactattctctcccattctgcaagccggataccatagttgacagtgcagaaaatctcggtgaagttcttcgtggagatcgcattgaaaactctccctatacgtttgaaatgagggagcctcagatgtgtcaagtagtctgcaagatatctgttggggagaaagaagcaaagcttctcaaggagaagattgaagatgaataccgtgttaacatgattcttgacaacctacctttagtcgttcctattcaaagagtggatcaagaaggtgcatatttctatcaacatggattccatgttggggccaaaggaaaatattcagggagcaaagatgaaaaatacttcatccacaaccatctatcttttacggtgaaatatcacagggatgagcaaagggatgtttccaggattgtggcctttgaagtgaaaccatacagcgttaagcatgaatatgaagggcaatggaatgataagaagacccgcctgacaacgtgtgaccctcatgctcaacgtatcattacttcgtccgagtctcctcaggaggtcgaagttggcaaggatatcatatttacttacgatgtggatttcaaggagagcgacatcaagtgggcatctcggtgggacagctatctattgatgacagatgatcagatccactggttctctattgtgaattctctcatgattgttctcttcctttctggaatggttgcaatgatcatgcttcgtaccctttaccgggatatctctaagtataaccaacttgagactcaggaagaggcccaggaggagactggatggaagcttgttcacggcgatgttttcaggcctccgtcaaactcagactggctctgtgtttatgttggcaccggtgtgcaattctttggcatgctgcttgtcactatggtatttgcggttcttggcttcctttctccatcgaacaggggtggactgatgacagccatgctcctgctctgggtgttcatggggttgcttgctggctactcttcttcacgtctttacaaactgttcaagggctcagaatggaagaacatcgccttgaggacagccttcactttccctggcagtgtgtttgctatttttttcttcttgaatgctcttatctgggggcaaaagtcctcaggtgctgttccattcaccaccatgtttgctcttgtcctcctttggttcggtatttcagtacctttggtttttgttggaagcttccttggcttcaagaaacctaccattgaagatccagtgaagacaaacaagataccaaggcagatccctgagcaggcctggtacatgaacccaatcttctcgattctaatcggagggatccttccatttggtgctgtcttcatcgaactcttctttatccttacttccatctggctgcaccagttctactacatctttgggttcctcttccttgtgttcctgattctcatcgtgacatgtgctgagatctcgattgtcctatgttacttccagctctgcagcgaagattacctgtggtggtggaggtcgtacttgacttctggttcctctgcactctacctcttcttgtatgcaaccttctacttcttcacaaagcttgagatcaccaagtttgtctcagctgttatgtacttcggttacatgctcattgcctcgtacgccttcttcgccttgaccggcacaatcggattctatgcttgcttcctgttcacaaggctgatttactcatcggtcaagatcgagtaaggtgaagtgcactcttgcctatttctttgttgccacgaagaaagaagtattctatggatagtgaattctacaggactgctgagtttagctgcaagtgggctcgttttgagttttcaaagctggtagttatgatgaagatgcgattcattaccgtatgattccggtattatagctagctcagtatgtttctgtttttcttttgtttttttttgttttcgggctgtgcccgaccgtgaggatatatgcttatcaagagcttgacgctgaaagaattgtatacgggtgctgagtaatctatctcttgttcctctcagaatttatgtacttgttgatgtgcactgtgacgtacatgatatacatttatagctaccggctcggcggctcctgtttcttttgtacctgagtccagataaatggattcttatacatgtttttctaa

SEQ ID NO: 211395 - DNA, 1675 bp, Zea Mays
ccacgcatcgaggacctaattctaaattcgtaaaatcatcacgcgccgtcttcagtcctctgcctcctcgtcggaaagccctaatcccactcaatcctctcgctgccgatccgacctcaattccgaatccctcccccatctcccggcgtccccaacgccctccgccatgccggacgtgcagccgctcgtcagcgacttcgtcctcaagcttaagcgccggaaggtggaggggtcgcacgcggtggcccggcagacggcggaactgctacggtcggttgtgtcgcagcatcggatgggtagcagcgccaaccaggcagccgcgcttgccgatgctgtacgcgctgtgggggagcagctcatctccgccaatcccattgtgtcagaattctatcagggtgacctgaaaactgtgttggtatccaactgtgaggtaatcctaactctaggtcgttcgagaactgtcaaggagtttctgtatgctgcgaaagagaagaagcgatctttccgtgtatttgttgctgaaggtgctccaagatatcagggccatgttcttgcaaaagagttggttgagaaaggtgtacaaactacagttataacagattcagcagtttttgcaatgatctctcgagttaacatggtcataattggagcgcatgctatcatggcaaatggtggagtcattgcaccagtagggatgaacatggttgcacttgctgctcaaaggcatgctgtgccttttgttgtggttgctggtagtcacaaggtgtcatgcttaactagacgcttgatatacagagtagcatagctgtgtcctctgtatccacacaacccacaagtgttgctgaatgaactcaaatcgccatctgatttgctcgattttggcgagttctcagattgcatgaatttcagtactcaggatggcagccccttgctaaatgttgccaacccaacatttgactatgtgccaccgaagcttgtgagcctattcatcactgacaccggggggcacagtccgtcttatatgtatcggcttattgctgagtattactcagctgatgatctggtagtgagacggaaggcaacatcttgaaagaagacgaaagcactgcaaagtctccttggtggtctgatgtgcagtcatggaattgttggtgggtccagtcactgtcaaacagcaggagatcgatggaagcattctcgcgtttgggcgtaaactgtcgagggaatgggatgtgacgtcatggaattgttgtcgtactacaggagaggttcatatacatgaatatatgattgactggttgtgtagagggtcgctgtttctgatctgggccttggctggcccaaattttgtcttataaattccagcaagctgttcggtgtcacgtattcgctgagccccttttctatttctatatactgtatatggtattacgcctgtcatgcttcttttttggcgattcaactgcgtagatgctggaaaagtaaaaaaagaagaattcgacagaatttctaggcttatacaaataggtgaatttgtagtaggaagcgaaagtatacatgtctcttatagtatgacaatctagcatgagtagtaactggccgtcgaagagcacagcggaaaatctctcggatagtcagatggacacttgaccggcgacctggacgcacacgcgcc

SEQ ID NO: 211396 - DNA, 2021 bp, Zea Mays
ccacgcatcgaggacctaattctaaattcgtaaaatcatcacgcgccgtcttcagtcctctgcctcctcgtcggaaagccctaatcccactcaatcctctcgctgccgatccgacctcaattccgaatccctcccccatctcccggcgtccccaacgccctccgccatgccggacgtgcagccgctcgtcagcgacttcgtcctcaagcttaagcgccggaaggtggaggggtcgcacgcggtggcccggcagacggcggaactgctacggtcggttgtgtcgcagcatcggatgggtagcagcgccaaccaggcagccgcgcttgccgatgctgtacgcgctgtgggggagcagctcatctccgccaatcccattgtgtcagaattctatcagggtgacctgaaaactgtgttggtatccaactgtgaggtaatcctaactctaggtcgttcgagaactgtcaaggagtttctgtatgctgcgaaagagaagaagcgatctttccgtgtatttgttgctgaaggtgctccaagatatcagggccatgttcttgcaaaagagttggttgagaaaggtgtacaaactacagttataacagattcagcagtttttgcaatgatctctcgagttaacatggtcataattggagcgcatgctatcatggcaaatggtggagtcattgcaccagtagggatgaacatggttgcacttgctgctcaaaggcatgctgtgccttttgttgtggttgctggtagtcacaaggttgatttctacacatcccccagttcttttgcaacctaagtagccaaataagaatcagggtctacatctacattttactgttatttctaatgtatgtgtccataatttaatgttcaatacttcaatagtgcattgtcccgagttagcccacttgttacatcgtcctaatttaatgaagaaaaagtggacttgcagcacttatgaggatgctgtcaaatttcatattgtgatgattcccatcatagtattttaacttaatgttttcttatttctggctttctgcgatgtactgttatctacagatatttcactcatctcgcgaaatctctttgttgcttccattttccacaggtgtcatgcttaactagacgcttgatatacagagtagcatagctgtgtcctctgtatccacacaacccacaagtgttgctgaatgaactcaaatcgccatctgatttgctcgattttggcgagttctcagattgcatgaatttcagtactcaggatggcagccccttgctaaatgttgccaacccaacatttgactatgtgccaccgaagcttgtgagcctattcatcactgacaccggggggcacagtccgtcttatatgtatcggcttattgctgagtattactcagctgatgatctggtagtgagacggaaggcaacatcttgaaagaagacgaaagcactgcaaagtctccttggtggtctgatgtcatggaattgttggtgggtccagtcactgtcaaacagcaggagatcgatggaagcattctcgcgtttgggcgtaaactgtcgagggaatgggatgtgacgtcatggaattgttgtcgtactacaggagaggttcatatacatgaatatatgattgactggttgtgtagagggtcgctgtttctgatctgggccttggctggcccaaattttgtcttataaattccagcaagctgttcggtgtcacgtattcgctgagccccttttctatttctatatactgtatatggtattacgcctgtcatgcttcttttttggcgattcaactgcgtagatgctggaaaagtaaaaaaagaagaattcgacagaatttctaggcttatacaaataggtgaatttgtagtaggaagcgaaagtatacatgtctcttatagtatgacaatctagcatgagtagtaactggccgtcgaagagcacagcggaaaatctctcggatagtcagatggacacttgaccggcgacctggacgcacacgcgcc

SEQ ID NO: 211397 - DNA, 998 bp, Zea Mays
gttgatttctacacatcccccagttcttttgcaacctaagtagccaaataagaatcagggtctacatctacattttactgttatttctaatgtgtcatgcttaactagacgcttgatatacagagtagcatagctgtgtcctctgtatccacacaacccacaagtgttgctgaatgaactcaaatcgccatctgatttgctcgattttggcgagttctcagattgcatgaatttcagtactcaggatggcagccccttgctaaatgttgccaacccaacatttgactatgtgccaccgaagcttgtgagcctattcatcactgacaccggggggcacagtccgtcttatatgtatcggcttattgctgagtattactcagctgatgatctggtagtgagacggaaggcaacatcttgaaagaagacgaaagcactgcaaagtctccttggtggtctgatgtcatggaattgttggtgggtccagtcactgtcaaacagcaggagatcgatggaagcattctcgcgtttgggcgtaaactgtcgagggaatgggatgtgacgtcatggaattgttgtcgtactacaggagaggttcatatacatgaatatatgattgactggttgtgtagagggtcgctgtttctgatctgggccttggctggcccaaattttgtcttataaattccagcaagctgttcggtgtcacgtattcgctgagccccttttctatttctatatactgtatatggtattacgcctgtcatgcttcttttttggcgattcaactgcgtagatgctggaaaagtaaaaaaagaagaattcgacagaatttctaggcttatacaaataggtgaatttgtagtaggaagcgaaagtatacatgtctcttatagtatgacaatctagcatgagtagtaactggccgtcgaagagcacagcggaaaatctctcggatagtcagatggacacttgaccggcgacctggacgcacacgcgcc

SEQ ID NO: 211398 - DNA, 1559 bp, Zea Mays
cttgcgctgcaaaatctaatccgtttccgaccttctagaagccttcaacccgccactttgcccactctcctcttccttctttgctacccatttcgtcgcagtagtcggcagtcgaaaccctagtcccctcgctttccttccactcgccgtcgcggcgccgatagagccagagctgaaaggcgtaggaaaagctggtggaggaggggatggaccggatcgtaggcagcaagtacaagctgggtcgcaagatcggaagcggttccttcggggagatctacctcgcgacgcacgtcgacacctacgagatcgtcgccgtcaagattgaaagcagcaaaaccaatcatccacagttgctatatgaggccaaactgtacaatgctcttcaaggagggactggtatcgcaaacataaaatggtgcggcattgacggcgatgaaaacattcttgttattgatttactcggaccaagccttgaagatctgtttgtttattgtggccggagattctcactgaagacggtcttgatgctagcggaccagatgataacaagaatagaatttatgcattctaaaggctatctgcacagagacatcaagcctgataacttcctcatgggccttggtcgaaaagctaaccaggtttatgtaattgacttcgggcttgcaaagagatatcgtgattcagccaccaaccgccatataccttatagagaaaataaaaacttgactggcacagctcgctatgctagccgtaatactcatcttgggattgtcttccttggcagggcttgaaagcagccacaaagaaacagaagtatgacaaaataagtgagaagaagctttcgactcctattgaggctctatgtaaatcccatcctgtggaatttgcttcctatttccactactgccattctctgacatttgatcagcgtcccgattatagtttcttgaggcatgtctttcgagaattgtttgagcgcgaaggctatcaatttgattatgtgtatgactggactttgttgaagtgtaagcaatcccagaaggctaaggttcagcaaggatgctctcatgatgcaggcgtaagcagccgtccagttgcaacaaacgtggacaagcaccaagttggtgttgcacgcccaattaatgcttcaggtctgcttgaagcagaacaacgcccggcaatcagaatgcaattaaacagccgttccaataatctgcatcctgagagattgggagtgtctgctagtcataataatgtactgctgcaatccacgtcacttgacaatgctgatgctccaatggaccacgcgacacattcaaaagcacaggggtccattgatccacacactcgtggaagttatagtccagggccctctaaccgcacttaaccttttgcattgttcgtaaaagcttgcgggtccatgcagtaaacaattggatcctttacaaacctaataatggtgacacattctatgcataatgaaaatttggggtttcacctggatagctttcattttaattacgggctgcagcagtgcgacaatgtgcattctacttgga

SEQ ID NO: 211399 - DNA, 1178 bp, Zea Mays
aacccgccactttgcccactctcctcttccttctttgctacccatttcgtcgcagtagtcggcagtcgaaaccctagtcccctcgctttccttccactcgccgtcgcggcgccgatagagccagagctgaaaggcgtaggaaaagctggtggaggaggggatggaccggatcgtaggcagcaagtacaagctgggtcgcaagatcggaagcggttccttcggggagatctacctcgcgacgcacgtcgacacctacgagatcgtcgccgtcaagattgaaagcagcaaaaccaatcatccacagttgctatatgaggccaaactgtacaatgctcttcaaggagggactggtatcgcaaacataaaatggtgcggcattgacggcgatgaaaacattcttgttattgatttactcggaccaagccttgaagatctgtttgtttattgtggccggagattctcactgaagacggtcttgatgctagcggaccagatggtttatgtaattgacttcgggcttgcaaagagatatcgtgattcagccaccaaccgccatataccttatagagaaaataaaaacttgactggcacagctcgctatgctagccgtaatactcatcttgggattgagcaaagccgcagagatgatttggaatcgatcggatacgttcttctgtatttccttaggggaagtcttccttggcagggcttgaaagcagccacaaagaaacagaagtatgacaaaataagtgagaagaagctttcgactcctattgaggctctatgtaaatcccatcctgtggaatttgcttcctatttccactactgccattctctgacatttgatcagcgtcccgattatagtttcttgaggcatgtctttcgagaattgtttgagcgcgaaggctatcaatttgattatgtgtatgactggactttgttgaagtgtaagcaatcccagaaggctaaggttcagcaaggatgctctcatgatgcaggcgtaagcagccgtccagttgcaacaaacgtggacaagcaccaagttggtgttgcacgcccaattaatgcttcaggtctgcttgaagcagaacaacgcccggcaatcagaatgcaattaaacagccgttccaataatctgcatcctgagagattggctattcaattcaagaaagattacg

SEQ ID NO: 211400 - DNA, 1136 bp, Zea Mays
tcaaatggagatgtgttgatctttccagatatgatcagatataaagggctgacccattttgacgtggacaactttgttgaagaagtgcttgtgaaggatattgactggcttcctagatctcctgagcctatgagtggttcctatatttttgtttgctcccatggaagcagggacaaaaggtggctgtcagtgcatgctcacacgtgggaggtcataagtatgcaggaaacgtcatcattttcagttctgatgccaagggagaagtgactggtcattggtatggttatgttgttcctgatgatgtgcctgttttgctgcataaacatattggacaaggagaagttgtggaccatctatggaggggacagatgggtttatctgtggagcagcagaagcgagctctcgagcttcggaacatggtaaatggtggcgaagaatcccttgaagaaaccagaacagatggtgcttctttcaaccctgcagcagctggtggatgctgccaaggcaatggtggcttcacctgctgccaaactgacctgccaaaggaaaaacaagacaagagcatcatatctgagcagaaccccaagagctctgacaaggagggtggtgctggcagcaagaagggggatacaaagacttgcccagtgcccatctggtttgagacctgggagagagctgacacatatgccgctcttgctgttgttgcagctgccgcagcggtgcttgtctccttcagaatctacaagaacctcaactgaagaacatgggagatcctggaagaggtgaccaaaacaagtataggtgaaacagcgtactgtgataaaagtctgggatgagaataaatttacctgtgcataatgctaggcttaggctatggctagcaaatcgttgtgcaaaatattgttgtgcattgtttacaaagtgatgtttgaaatagaagataacggcgatgaacaagccgttggagataaccttagaacctcaaagtagcttatctggagatggagacggtgttgaaaagatgttgctgccagtgttctcgtatgtgaactccttgtgaacctccactccactgcaatcgaagtttcgatgccttagctgctgtttatcataagcaaggcgatgggatcggcatc

SEQ ID NO: 211401 - DNA, 704 bp, Zea Mays
agatcgggttattggatgtctcaatggtaacgtcaccaggtggcaacactgtgtacacattgaagggaaaatctggtgagaaatttgagtttaaagctccaagaggtggcatgtataagttctgcttccataacccatatggagcacctgaaactgtttctttctacatccatgttgggcacatacccaatgagcacaatctggcgaaagatgagcacttggaccctatcaacgttaaaatcgcggagctgaaggaagcattagaatccgttaccgccgagcagaagtacctaaaagcacgcgaagctcgtcaccgacacaccaatgagagcaccagaaagcgtgtcatgttctatacgatggcggagtacctggctttcatggctgctagcgcgttgcaggtcctctacatccgccgcttgttcagtaaaaatgtgggatacaacagagtgtaggatagaaatctacttcaaaggcgacggtggaagcaccttatatggtcggaacgggaaacattctctgccagtttgacaaattgtagttctgcaccctctttttttttgttagtttataagaaacactttaatttatcatcatgtacttttagcaacacttgtggtatgttaagtgcatttggtgctgaacattgttccataactgatcttcagaggattgttatgaaagttagtattgttctgctaccg

SEQ ID NO: 211402 - DNA, 2199 bp, Zea Mays
aacaggtgtgaatggaccttgacacaaaggcggtgcagcgccagtgccgagtgtactggccgccaccactcgccactcgccactcggccccaggaccctcctcttcctcgccagcaagccggcacgatccctcccttccgggaaaaaggctcccaatctgttccgagccagccggccatggcgattagggctggccgctcgccccttctccacctcctcgccctcgccttcctcatcctcgccgcctctccctgcctccaagctcgagtggaccatcgcaaacagatatctcactggactgggcaacccaactttgacctgcagaatgtctcatcgggtcgaaaggatggccctcatctcctgggtagatcaaaggaaataacacacatgaaattaaggagagttgctgtaaggaagaaaatggaagtagtgcagcaggatgatgaagcgttagttaaacttgagaatgcaggtatcgaacgttcaaaagctgttgactctgctgtgctgggaaaatacagcatctggagacgtgaaaatgaaaatgaaaaggcagattcaagggtccgtttgatgcgagatcaaatgatcatggccagaatatattctgttcttgccaaatcgagggacaagcttgatctctatcaggagctgcttgcaaggctcaaggaaagccagcgctcccttggggaagctactgctgatgctgaacttcccaagagtgcttcggatagaaccaaagcaatgggccaagttttatcaaaagcaagggatctattgtacgattgcaaggaaattacccagcgtttgagagcaatgcttcagtcagcagatgagcagagaaaagaaagttccccaatagtgagaacctggaaaatcctgatctttaccattatgctcttttctcggacaatgttttggcagcatcagttgtggtcaactcaaccatcatgaatgctaaggagcctgaaaaacatgtatttcatcttgttactgacaaactgaactttggggccatgaacatgtggtttttgctgaatccacctggggatgcaacaatccatgtggaaaatgttgatgacttcaaatggttaaactcttcttactgccctgttctgaagcagcttgagtctgcagccatgaaagaatattatttcaaggctgatcgtccgaaaacactctctgctggttcttctaatctgaagtatcgaaacccaaaatatttgtccatgctcaatcatctaagattttacctcccacaagtctatcccaagctgaataaaattcttttcctggatgatgatatagttgtccagagggacctaactggactctgggaggttgatcttaatggaaatgtaaatggagccgtggaaacatgtggagagagttttcaccgatttgataagtacctaaatttctcaaacccaaatattgctcagaattttgatcctaatgcatgtggttgggcttatggaatgaacatgtttgatctggaagaatggaagaagaaagacattactggaatttaccacaaatggcagaacatgaacgagaacaggctgctctggaaactggggacattgccaccagggcttctaactttttacaagctgacacaccctctggacaaatcatggcatgtgcttggcttagggtacaatccaaccattgagcgctcagagatagacaatgctgctgtcatccactacaatggtaacatgaagccctggctggaaattgcaatgataaagtatcggccttactggacaaagtacatcaattatcagcattcctacattcatggatgcaagatcagccaatagaaaccaccctcagatattcttctgtgatgaacattgaagttggatgggactcaaaatgaaatcagtataactatcacatgttctttattcgtgttatattagatttgttagttatcacgtgtatgtagtttcgtcgcccttttgtggtgctttctcccctagctcattgttggttcttgtccctttttgtcatgaaaagaatgatgagctctatgattctcatcagctgataaatgtaatgtctgaatttctgtcggtggcaaattaatgatcccattcaaacggtatcaagtgttcgaacattcatgctagcatttgatggcaggttgagagttatttacgagcatctgttcgttcgtggttgagattgttt

SEQ ID NO: 211403 - DNA, 2068 bp, Zea Mays
aaggcggtgcagcgccagtgccgagtgtactggccgccaccactcgccactcgccactcggccccaggaccctcctcttcctcgccagcaagccggcacgatccctcccttccgggaaaaaggctcccaatctgttccgagccagccggccatggcgattagggctggccgctcgccccttctccacctcctcgccctcgccttcctcatcctcgccgcctctccctgcctccaagctcgagtggaccatcgcaaacagaaattaaggagagttgctgtaaggaagaaaatggaagtagtgcagcaggatgatgaagcgttagttaaacttgagaatgcaggtatcgaacgttcaaaagctgttgactctgctgtgctgggaaaatacagcatctggagacgtgaaaatgaaaatgaaaaggcagattcaagggtccgtttgatgcgagatcaaatgatcatggccagaatatattctgttcttgccaaatcgagggacaagcttgatctctatcaggagctgcttgcaaggctcaaggaaagccagcgctcccttggggaagctactgctgatgctgaacttcccaagagtgcttcggatagaaccaaagcaatgggccaagttttatcaaaagcaagggatctattgtacgattgcaaggaaattacccagcgtttgagagcaatgcttcagtcagcagatgagcagagaaaagaaagttccccaatagtgagaacctggaaaatcctgatctttaccattatgctcttttctcggacaatgttttggcagcatcagttgtggtcaactcaaccatcatgaatgctaaggagcctgaaaaacatgtatttcatcttgttactgacaaactgaactttggggccatgaacatgtggtttttgctgaatccacctggggatgcaacaatccatgtggaaaatgttgatgacttcaaatggttaaactcttcttactgccctgttctgaagcagcttgagtctgcagccatgaaagaatattatttcaaggctgatcgtccgaaaacactctctgctggttcttctaatctgaagtatcgaaacccaaaatatttgtccatgctcaatcatctaagattttacctcccacaagtctatcccaagctgaataaaattcttttcctggatgatgatatagttgtccagagggacctaactggactctgggaggttgatcttaatggaaatgtaaatggagccgtggaaacatgtggagagagttttcaccgatttgataagtacctaaatttctcaaacccaaatattgctcagaattttgatcctaatgcatgtggttgggcttatggaatgaacatgtttgatctggaagaatggaagaagaaagacattactggaatttaccacaaatggcagaacatgaacgagaacaggctgctctggaaactggggacattgccaccagggcttctaactttttacaagctgacacaccctctggacaaatcatggcatgtgcttggcttagggtacaatccaaccattgagcgctcagagatagacaatgctgctgtcatccactacaatggtaacatgaagccctggctggaaattgcaatgataaagtatcggccttactggacaaagtacatcaattatcagcattcctacattcatggatgcaagatcagccaatagaaaccaccctcagatattcttctgtgatgaacattgaagttggatgggactcaaaatgaaatcagtataactatcacatgttctttattcgtgttatattagatttgttagttatcacgtgtatgtagtttcgtcgcccttttgtggtgctttctcccctagctcattgttggttcttgtccctttttgtcatgaaaagaatgatgagctctatgattctcatcagctgataaatgtaatgtctgaatttctgtcggtggcaaattaatgatcccattcaaacggtatcaagtgttcgaacattcatgctagcatttgatggcaggttgagagttatttacgagcatctgttcgttcgtggttgagattgttt

SEQ ID NO: 211404 - DNA, 2100 bp, Zea Mays
cgccagtgccgagtgtactggccgccaccactcgccactcgccactcggccccaggaccctcctcttcctcgccagcaagccggcacgatccctcccttccgggaaaaaggctcccaatctgttccgagccagccggccatggcgattagggctggccgctcgccccttctccacctcctcgccctcgccttcctcatcctcgccgcctctccctgcctccaagctcgagtggaccatcgcaaacagatggccctcatctcctgggtagatcaaaggaaataacacacatgaaattaaggagagttgctgtaaggaagaaaatggaagtagtgcagcaggatgatgaagcgttagttaaacttgagaatgcaggtatcgaacgttcaaaagctgttgactctgctgtgctgggaaaatacagcatctggagacgtgaaaatgaaaatgaaaaggcagattcaagggtccgtttgatgcgagatcaaatgatcatggccagaatatattctgttcttgccaaatcgagggacaagcttgatctctatcaggagctgcttgcaaggctcaaggaaagccagcgctcccttggggaagctactgctgatgctgaacttcccaagagtgcttcggatagaaccaaagcaatgggccaagttttatcaaaagcaagggatctattgtacgattgcaaggaaattacccagcgtttgagagcaatgcttcagtcagcagatgagcagagaaaagaaagttccccaatagtgagaacctggaaaatcctgatctttaccattatgctcttttctcggacaatgttttggcagcatcagttgtggtcaactcaaccatcatgaatgctaaggagcctgaaaaacatgtatttcatcttgttactgacaaactgaactttggggccatgaacatgtggtttttgctgaatccacctggggatgcaacaatccatgtggaaaatgttgatgacttcaaatggttaaactcttcttactgccctgttctgaagcagcttgagtctgcagccatgaaagaatattatttcaaggctgatcgtccgaaaacactctctgctggttcttctaatctgaagtatcgaaacccaaaatatttgtccatgctcaatcatctaagattttacctcccacaagtctatcccaagctgaataaaattcttttcctggatgatgatatagttgtccagagggacctaactggactctgggaggttgatcttaatggaaatgtaaatggagccgtggaaacatgtggagagagttttcaccgatttgataagtacctaaatttctcaaacccaaatattgctcagaattttgatcctaatgcatgtggttgggcttatggaatgaacatgtttgatctggaagaatggaagaagaaagacattactggaatttaccacaaatggcagaacatgaacgagaacaggctgctctggaaactggggacattgccaccagggcttctaactttttacaagctgacacaccctctggacaaatcatggcatgtgcttggcttagggtacaatccaaccattgagcgctcagagatagacaatgctgctgtcatccactacaatggtaacatgaagccctggctggaaattgcaatgataaagtatcggccttactggacaaagtacatcaattatcagcattcctacattcatggatgcaagatcagccaatagaaaccaccctcagatattcttctgtgatgaacattgaagttggatgggactcaaaatgaaatcagtataactatcacatgttctttattcgtgttatattagatttgttagttatcacgtgtatgtagtttcgtcgcccttttgtggtgctttctcccctagctcattgttggttcttgtccctttttgtcatgaaaagaatgatgagctctatgattctcatcagctgataaatgtaatgtctgaatttctgtcggtggcaaattaatgatcccattcaaacggtatcaagtgttcgaacattcatgctagcatttgatggcaggttgagagttatttacgagcatctgttcgttcgtggttgagattgttt

SEQ ID NO: 211405 - DNA, 2966 bp, Zea Mays
cctgggctttccagactccagagggccacgcgaaatgaaacggaactgggacagcaaaggaagatacggcgcgatattttagattacaggagagtaggagaccggcgccgaaagctccgtggcctcgtctccttccccacttcggcctcggcagttccgcgtgccggccggagcctcgtctcgcttcgcatctcgcacttcgcgccttcgccgctgcgattcctcagcagctcctcggccgctccacccacccctgcgccggcgagatggagctcaagcccggcatgtcggcgctcgtcaccggcggcgcctctggcatcgggaaagcactttgtattgcttttgcaaggaggggtttatttgtgactgtcgttgatttctcagaggaaaatggaagagaagttgctacattagttcaaaaagaaaatagcaaatttcacggagatcttagaattccatcttcaatatttgttaagtgtgatgttagtaatgcagataatcttgctgcttgttttgagaagcatgtacagacatacaatggactagatatctgcatcaactgtgctggaattgctaataaaacactagtttatgatgatacatctgatggaactagaacatggaggcatgctgttaatgtgaaccttgttgctgtcattgatggtactcgcattgcaagtcaaataatgcgaaaccaaaagaagcccggtgtcataataaacattggttcagcggcaggtctttatcctatgttcctcgatcccgtatatagtgcggcaaaagggggtgtggttatgtttacaagatcactttctccattgaaacgccatggtgttcgtgtcaatgtgctctgcccggagtttgtccaaaccaatatggcggaacaaatgagccgcaaagttatagattcatctggtggatatttggagatggaagatgttgttaacggtacaccatttctgtaatctagtgttattacaggactattagctttgtaaccatattttatgtgccatgatgatcaatgcaagcgtcagatgaattgttttaaacttctagtgttatgttgaggtggggtgttttaaagatgaactgcacaaaaacatttgttatcactgtaaaacatgtgaattccattgatataaattcaataatgtacatggtaggttgtgtaacctgcatgaataggccagttctgtttctgatcttgagaactttagcaagtgatggttaaccaaccaaatggtacggtatctcctggtagatatggttcagggatcttgtgatgtcatatttaacacaaacgtcagccctccaccccacctatttttttctattttttggcatcaggcacatttgagcttatacaggatgagagcaaggctggtgcttgcctttggataacaaaacgacgagggatggagtactggccaacaccagaagaacaaagaaagtatatggtgaatcctaacaaatcaaaaaggatgctgacaaacaatatatatcctagcatccgaatgcctgaattctttgagaagatagttgttcacacactcagccataattttcgcaatgctacaagacttgagcgtgtgcaactgagatttcctatcaaagcgcatagtgctctggttaaaataatatatgctggcgtaaatgctagtgatgtcaacttcagttcaggacgttattttagtggtaatcctaaagaaactgcttcacgccttccatttgatgctggttttgaaggtgtgggaattgttgccgctgttggagattcagtcagtcatatcaaagttggcactcctgtggcccttatgacttttgggagctatgctgaattcacggaggttccagccaaacatcttcttccagtgccaagaccagaccctgaggttgttgcaatgttgacatcaggactgactgcatcaattagtcttgaaaaggcaggacaaatgacatctgggcaagttgttttagttacagcagctgctggtggaacaggacagttcgcagttcagctggcgaaattagcaggcaacaaggttgttgccacatgtggaggtgaaagtaaagctgaacttctggcttccttaggagttgatcgtgttatcaattacagaaatgaacgagtcaaagatgttctgaagaaagagtttccaagaggtgtagatatcatatatgaatctgtaggtggggaaatgtttgacttgtgcttgaatgcacttgcagtccatgggcatctcattgtaattggtatgatctcccagtatcaaggagaggatggctggaagccaaagaactacactggactatgtgagaagattctagctaaaagtcaaactgtggctggatttttccttgttcagtatgctcacttgtggcaagatcatcttaacaaactttttgacctgtatgcctctggaaagctaaaggtttccctagaccccaagcaattcttgggtgttgcttcagtcgtagatgcggtcgaatatcttcattctggcaagagtgttggcaaggtcgttgtgtgtattgatccatcatacggtcagatcgttgcaaaattataatccatggacatgatgcgcattgtcttccatggtcacgtaggttattgtcttatagttacacatatacatcaagaccgtattttcccagcgggtgacaaatgaataagggaacatgttggtgtatagtttagtttcatttttccaaagtgtaagatgcacaactatactgaaggacaagcatgggcatggaaatcgattaagtttctaatcccgtgcagtaggatatgcattcgtgtggcctcgttccacgttgtatgtatacagtatatattatataacttgtctcagtgccacatgcttcaattcgaaccggtaacaataattcaaacagctcatgcagatgcattctcaaatacacagcttggaacatcgatattttcttttgaagaaaat

SEQ ID NO: 211406 - DNA, 2616 bp, Zea Mays
cgcgaaatgaaacggaactgggacagcaaaggaagatacggcgcgatattttagattacaggagagtaggagaccggcgccgaaagctccgtggcctcgtctccttccccacttcggcctcggcagttccgcgtgccggccggagcctcgtctcgcttcgcatctcgcacttcgcgccttcgccgctgcgattcctcagcagctcctcggccgctccacccacccctgcgccggcgagatggagctcaagcccggcatgtcggcgctcgtcaccggcggcgcctctggcatcgggaaagcactttgtattgcttttgcaaggaggggtttatttgtgactgtcgttgatttctcagaggaaaatggaagagaagttgctacattagttcaaaaagaaaatagcaaatttcacggagatcttagaattccatcttcaatatttgttaagtgtgatgttagtaatgcagataatcttgctgcttgttttgagaagcatgtacagacatacaatggactagatatctgcatcaactgtgctggaattgctaataaaacactagtttatgatgatacatctgatggaactagaacatggaggcatgctgttaatgtgaaccttgttgctgtcattgatggtactcgcattgcaagtcaaataatgcgaaaccaaaagaagcccggtgtcataataaacattggttcagcggcaggtctttatcctatgttcctcgatcccgtatatagtgcggcaaaagggggtgtggttatgtttacaagatcactttctccattgaaacgccatggtgttcgtgtcaatgtgctctgcccggagtttgtccaaaccaatatggcggaacaaatgagccgcaaagttatagattcatctggtggatatttggagatggaagatgttgttaacggcacatttgagcttatacaggatgagagcaaggctggtgcttgcctttggataacaaaacgacgagggatggagtactggccaacaccagaagaacaaagaaagtatatggtgaatcctaacaaatcaaaaaggatgctgacaaacaatatatatcctagcatccgaatgcctgaattctttgagaagatagttgttcacacactcagccataattttcgcaatgctacaagacttgagcgtgtgcaactgagatttcctatcaaagcgcatagtgctctggttaaaataatatatgctggcgtaaatgctagtgatgtcaacttcagttcaggacgttattttagtggtaatcctaaagaaactgcttcacgccttccatttgatgctggttttgaaggtgtgggaattgttgccgctgttggagattcagtcagtcatatcaaagttggcactcctgtggcccttatgacttttgggagctatgctgaattcacggaggttccagccaaacatcttcttccagtgccaagaccagaccctgaggttgttgcaatgttgacatcaggactgactgcatcaattagtcttgaaaaggcaggacaaatgacatctgggcaagttgttttagttacagcagctgctggtggaacaggacagttcgcagttcagttcttagggacatactttggtagcttgtatttttactggattgagcaatgggcaagatattctagccttctaggacatggctggcgaaattagcaggcaacaaggttgttgccacatgtggaggtgaaagtaaagctgaacttctggcttccttaggagttgatcgtgttatcaattacagaaatgaacgagtcaaagatgttctgaagaaagagtttccaagaggtgtagatatcatatatgaatctgtaggtggggaaatgtttgacttgtgcttgaatgcacttgcagtccatgggcatctcattgtaattggtatgatctcccagtatcaaggagaggatggctggaagccaaagaactacactggactatgtgagaagattctagctaaaagtcaaactgtggctggatttttccttgttcagtatgctcacttgtggcaagatcatcttaacaaactttttgacctgtatgcctctggaaagctaaaggtttccctagaccccaagcaattcttgggtgttgcttcagtcgtagatgcggtcgaatatcttcattctggcaagagtgttggcaaggtcgttgtgtgtattgatccatcatacggtcagatcgttgcaaaattataatccatggacatgatgcgcattgtcttccatggtcacgtaggttattgtcttatagttacacatatacatcaagaccgtattttcccagcgggtgacaaatgaataagggaacatgttggtgtatagtttagtttcatttttccaaagtgtaagatgcacaactatactgaaggacaagcatgggcatggaaatcgattaagtttctaatcccgtgcagtaggatatgcattcgtgtggcctcgttccacgttgtatgtatacagtatatattatataacttgtctcagtgccacatgcttcaattcgaaccggtaacaataattcaaacagctcatgcagatgcattctcaaatacacagcttggaacatcgatattttcttttgaagaaaat

SEQ ID NO: 211407 - DNA, 2570 bp, Zea Mays
cgcgaaatgaaacggaactgggacagcaaaggaagatacggcgcgatattttagattacaggagagtaggagaccggcgccgaaagctccgtggcctcgtctccttccccacttcggcctcggcagttccgcgtgccggccggagcctcgtctcgcttcgcatctcgcacttcgcgccttcgccgctgcgattcctcagcagctcctcggccgctccacccacccctgcgccggcgagatggagctcaagcccggcatgtcggcgctcgtcaccggcggcgcctctggcatcgggaaagcactttgtattgcttttgcaaggaggggtttatttgtgactgtcgttgatttctcagaggaaaatggaagagaagttgctacattagttcaaaaagaaaatagcaaatttcacggagatcttagaattccatcttcaatatttgttaagtgtgatgttagtaatgcagataatcttgctgcttgttttgagaagcatgtacagacatacaatggactagatatctgcatcaactgtgctggaattgctaataaaacactagtttatgatgatacatctgatggaactagaacatggaggcatgctgttaatgtgaaccttgttgctgtcattgatggtactcgcattgcaagtcaaataatgcgaaaccaaaagaagcccggtgtcataataaacattggttcagcggcaggtctttatcctatgttcctcgatcccgtatatagtgcggcaaaagggggtgtggttatgtttacaagatcactttctccattgaaacgccatggtgttcgtgtcaatgtgctctgcccggagtttgtccaaaccaatatggcggaacaaatgagccgcaaagttatagattcatctggtggatatttggagatggaagatgttgttaacggcacatttgagcttatacaggatgagagcaaggctggtgcttgcctttggataacaaaacgacgagggatggagtactggccaacaccagaagaacaaagaaagtatatggtgaatcctaacaaatcaaaaaggatgctgacaaacaatatatatcctagcatccgaatgcctgaattctttgagaagatagttgttcacacactcagccataattttcgcaatgctacaagacttgagcgtgtgcaactgagatttcctatcaaagcgcatagtgctctggttaaaataatatatgctggcgtaaatgctagtgatgtcaacttcagttcaggacgttattttagtggtaatcctaaagaaactgcttcacgccttccatttgatgctggttttgaaggtgtgggaattgttgccgctgttggagattcagtcagtcatatcaaagttggcactcctgtggcccttatgacttttgggagctatgctgaattcacggaggtcttccattttgtgcccttctatcgcacaacaagttccagccaaacatcttcttccagtgccaagaccagaccctgaggttgttgcaatgttgacatcaggactgactgcatcaattagtcttgaaaaggcaggacaaatgacatctgggcaagttgttttagttacagcagctgctggtggaacaggacagttcgcagttcagctggcgaaattagcaggcaacaaggttgttgccacatgtggaggtgaaagtaaagctgaacttctggcttccttaggagttgatcgtgttatcaattacagaaatgaacgagtcaaagatgttctgaagaaagagtttccaagaggtgtagatatcatatatgaatctgtaggtggggaaatgtttgacttgtgcttgaatgcacttgcagtccatgggcatctcattgtaattggtatgatctcccagtatcaaggagaggatggctggaagccaaagaactacactggactatgtgagaagattctagctaaaagtcaaactgtggctggatttttccttgttcagtatgctcacttgtggcaagatcatcttaacaaactttttgacctgtatgcctctggaaagctaaaggtttccctagaccccaagcaattcttgggtgttgcttcagtcgtagatgcggtcgaatatcttcattctggcaagagtgttggcaaggtcgttgtgtgtattgatccatcatacggtcagatcgttgcaaaattataatccatggacatgatgcgcattgtcttccatggtcacgtaggttattgtcttatagttacacatatacatcaagaccgtattttcccagcgggtgacaaatgaataagggaacatgttggtgtatagtttagtttcatttttccaaagtgtaagatgcacaactatactgaaggacaagcatgggcatggaaatcgattaagtttctaatcccgtgcagtaggatatgcattcgtgtggcctcgttccacgttgtatgtatacagtatatattatataacttgtctcagtgccacatgcttcaattcgaaccggtaacaataattcaaacagctcatgcagatgcattctcaaatacacagcttggaacatcgatattttcttttgaagaaaat

SEQ ID NO: 211408 - DNA, 2875 bp, Zea Mays
cgcgaaatgaaacggaactgggacagcaaaggaagatacggcgcgatattttagattacaggagagtaggagaccggcgccgaaagctccgtggcctcgtctccttccccacttcggcctcggcagttccgcgtgccggccggagcctcgtctcgcttcgcatctcgcacttcgcgccttcgccgctgcgattcctcagcagctcctcggccgctccacccacccctgcgccggcgagatggagctcaagcccggcatgtcggcgctcgtcaccggcggcgcctctggcatcgaggaaaatggaagagaagttgctacattagttcaaaaagaaaatagcaaatttcacggagatcttagaattccatcttcaatatttgttaagtgtgatgttagtaatgcagataatcttgctgcttgttttgagaagcatgtacagacatacaatggactagatatctgcatcaactgtgctggaattgctaataaaacactagtttatgatgatacatctgatggaactagaacatggaggcatgctgttaatgtgaaccttgttgctgtcattgatggtactcgcattgcaagtcaaataatgcgaaaccaaaagaagcccggtgtcataataaacattggttcagcggcaggtctttatcctatgttcctcgatcccgtatatagtgcggcaaaagggggtgtggttatgtttacaagatcactttctccattgaaacgccatggtgttcgtgtcaatgtgctctgcccggagtttgtccaaaccaatatggcggaacaaatgagccgcaaagttatagattcatctggtggatatttggagatggaagatgttgttaacggtacaccatttctgtaatctagtgttattacaggactattagctttgtaaccatattttatgtgccatgatgatcaatgcaagcgtcagatgaattgttttaaacttctagtgttatgttgaggtggggtgttttaaagatgaactgcacaaaaacatttgttatcactgtaaaacatgtgaattccattgatataaattcaataatgtacatggtaggttgtgtaacctgcatgaataggccagttctgtttctgatcttgagaactttagcaagtgatggttaaccaaccaaatggtacggtatctcctggtagatatggttcagggatcttgtgatgtcatatttaacacaaacgtcagccctccaccccacctatttttttctattttttggcatcaggcacatttgagcttatacaggatgagagcaaggctggtgcttgcctttggataacaaaacgacgagggatggagtactggccaacaccagaagaacaaagaaagtatatggtgaatcctaacaaatcaaaaaggatgctgacaaacaatatatatcctagcatccgaatgcctgaattctttgagaagatagttgttcacacactcagccataattttcgcaatgctacaagacttgagcgtgtgcaactgagatttcctatcaaagcgcatagtgctctggttaaaataatatatgctggcgtaaatgctagtgatgtcaacttcagttcaggacgttattttagtggtaatcctaaagaaactgcttcacgccttccatttgatgctggttttgaaggtgtgggaattgttgccgctgttggagattcagtcagtcatatcaaagttggcactcctgtggcccttatgacttttgggagctatgctgaattcacggaggttccagccaaacatcttcttccagtgccaagaccagaccctgaggttgttgcaatgttgacatcaggactgactgcatcaattagtcttgaaaaggcaggacaaatgacatctgggcaagttgttttagttacagcagctgctggtggaacaggacagttcgcagttcagctggcgaaattagcaggcaacaaggttgttgccacatgtggaggtgaaagtaaagctgaacttctggcttccttaggagttgatcgtgttatcaattacagaaatgaacgagtcaaagatgttctgaagaaagagtttccaagaggtgtagatatcatatatgaatctgtaggtggggaaatgtttgacttgtgcttgaatgcacttgcagtccatgggcatctcattgtaattggtatgatctcccagtatcaaggagaggatggctggaagccaaagaactacactggactatgtgagaagattctagctaaaagtcaaactgtggctggatttttccttgttcagtatgctcacttgtggcaagatcatcttaacaaactttttgacctgtatgcctctggaaagctaaaggtttccctagaccccaagcaattcttgggtgttgcttcagtcgtagatgcggtcgaatatcttcattctggcaagagtgttggcaaggtcgttgtgtgtattgatccatcatacggtcagatcgttgcaaaattataatccatggacatgatgcgcattgtcttccatggtcacgtaggttattgtcttatagttacacatatacatcaagaccgtattttcccagcgggtgacaaatgaataagggaacatgttggtgtatagtttagtttcatttttccaaagtgtaagatgcacaactatactgaaggacaagcatgggcatggaaatcgattaagtttctaatcccgtgcagtaggatatgcattcgtgtggcctcgttccacgttgtatgtatacagtatatattatataacttgtctcagtgccacatgcttcaattcgaaccggtaacaataattcaaacagctcatgcagatgcattctcaaatacacagcttggaacatcgatattttcttttgaagaaaat

SEQ ID NO: 211409 - DNA, 3018 bp, Zea Mays
cgcgaaatgaaacggaactgggacagcaaaggaagatacggcgcgatattttagattacaggagagtaggagaccggcgccgaaagctccgtggcctcgtctccttccccacttcggcctcggcagttccgcgtgccggccggagcctcgtctcgcttcgcatctcgcacttcgcgccttcgccgctgcgattcctcagcagctcctcggccgctccacccacccctgcgccggcgagatggagctcaagcccggcatgtcggcgctcgtcaccggcggcgcctctggcatcgggaaagcactttgtattgcttttgcaaggaggggtttatttgtgactgtcgttgatttctcagaggaaaatggaagagaagttgctacattagttcaaaaagaaaatagcaaatttcacggagatcttagaattccatcttcaatatttgttaagtgtgatgttagtaatgcagataatcttgctgcttgttttgagaagcatgtacagacatacaatggactagatatctgcatcaactgtgctggaattgctaataaaacactagtttatgatgatacatctgatggaactagaacatggaggcatgctgttaatgtgaaccttgttgctgtcattgatggtactcgcattgcaagtcaaataatgcgaaaccaaaagaagcccggtgtcataataaacattggttcagcggcaggtctttatcctatgttcctcgatcccgtatatagtgcggcaaaagggggtgtggttatgtttacaagatcactttctccattgaaacgccatggtgttcgtgtcaatgtgctctgcccggagtttgtccaaaccaatatggcggaacaaatgagccgcaaagttatagattcatctggtggatatttggagatggaagatgttgttaacggtacaccatttctgtaatctagtgttattacaggactattagctttgtaaccatattttatgtgccatgatgatcaatgcaagcgtcagatgaattgttttaaacttctagtgttatgttgaggtggggtgttttaaagatgaactgcacaaaaacatttgttatcactgtaaaacatgtgaattccattgatataaattcaataatgtacatggtaggttgtgtaacctgcatgaataggccagttctgtttctgatcttgagaactttagcaagtgatggttaaccaaccaaatggtacggtatctcctggtagatatggttcagggatcttgtgatgtcatatttaacacaaacgtcagccctccaccccacctatttttttctattttttggcatcaggcacatttgagcttatacaggatgagagcaaggctggtgcttgcctttggataacaaaacgacgagggatggagtactggccaacaccagaagaacaaagaaagtatatggtgaatcctaacaaatcaaaaaggatgctgacaaacaatatatatcctagcatccgaatgcctgaattctttgagaagatagttgttcacacactcagccataattttcgcaatgctacaagacttgagcgtgtgcaactgagatttcctatcaaagcgcatagtgctctggttaaaataatatatgctggcgtaaatgctagtgatgtcaacttcagttcaggacgttattttagtggtaatcctaaagaaactgcttcacgccttccatttgatgctggttttgaaggtgtgggaattgttgccgctgttggagattcagtcagtcatatcaaagttggcactcctgtggcccttatgacttttgggagctatgctgaattcacggaggttccagccaaacatcttcttccagtgccaagaccagaccctgaggttgttgcaatgttgacatcaggactgactgcatcaattagtcttgaaaaggcaggacaaatgacatctgggcaagttgttttagttacagcagctgctggtggaacaggacagttcgcagttcagttcttagggacatactttggtagcttgtatttttactggattgagcaatgggcaagatattctagccttctaggacatggctggcgaaattagcaggcaacaaggttgttgccacatgtggaggtgaaagtaaagctgaacttctggcttccttaggagttgatcgtgttatcaattacagaaatgaacgagtcaaagatgttctgaagaaagagtttccaagaggtgtagatatcatatatgaatctgtaggtggggaaatgtttgacttgtgcttgaatgcacttgcagtccatgggcatctcattgtaattggtatgatctcccagtatcaaggagaggatggctggaagccaaagaactacactggactatgtgagaagattctagctaaaagtcaaactgtggctggatttttccttgttcagtatgctcacttgtggcaagatcatcttaacaaactttttgacctgtatgcctctggaaagctaaaggtttccctagaccccaagcaattcttgggtgttgcttcagtcgtagatgcggtcgaatatcttcattctggcaagagtgttggcaaggtcgttgtgtgtattgatccatcatacggtcagatcgttgcaaaattataatccatggacatgatgcgcattgtcttccatggtcacgtaggttattgtcttatagttacacatatacatcaagaccgtattttcccagcgggtgacaaatgaataagggaacatgttggtgtatagtttagtttcatttttccaaagtgtaagatgcacaactatactgaaggacaagcatgggcatggaaatcgattaagtttctaatcccgtgcagtaggatatgcattcgtgtggcctcgttccacgttgtatgtatacagtatatattatataacttgtctcagtgccacatgcttcaattcgaaccggtaacaataattcaaacagctcatgcagatgcattctcaaatacacagcttggaacatcgatattttcttttgaagaaaat

SEQ ID NO: 211410 - DNA, 1127 bp, Zea Mays
attttgtgcccttctatcgcacaacaagttccagccaaacatcttcttccagtgccaagaccagaccctgaggttgttgcaatgttgacatcaggactgactgcatcaattagtcttgaaaaggcaggacaaatgacatctgggcaagttgttttagttacagcagctgctggtggaacaggacagttcgcagttcaggcaacaaggttgttgccacatgtggaggtgaaagtaaagctgaacttctggcttccttaggagttgatcgtgttatcaattacagaaatgaacgagtcaaagatgttctgaagaaagagtttccaagaggtgtagatatcatatatgaatctgtaggtggggaaatgtttgacttgtgcttgaatgcacttgcagtccatgggcatctcattgtaattggtatgatctcccagtatcaaggagaggatggctggaagccaaagaactacactggactatgtgagaagattctagctaaaagtcaaactgtggctggatttttccttgttcagtatgctcacttgtggcaagatcatcttaacaaactttttgacctgtatgcctctggaaagctaaaggtttccctagaccccaagcaattcttgggtgttgcttcagtcgtagatgcggtcgaatatcttcattctggcaagagtgttggcaaggtcgttgtgtgtattgatccatcatacggtcagatcgttgcaaaattataatccatggacatgatgcgcattgtcttccatggtcacgtaggttattgtcttatagttacacatatacatcaagaccgtattttcccagcgggtgacaaatgaataagggaacatgttggtgtatagtttagtttcatttttccaaagtgtaagatgcacaactatactgaaggacaagcatgggcatggaaatcgattaagtttctaatcccgtgcagtaggatatgcattcgtgtggcctcgttccacgttgtatgtatacagtatatattatataacttgtctcagtgccacatgcttcaattcgaaccggtaacaataattcaaacagctcatgcagatgcattctcaaatacacagcttggaacatcgatattttcttttgaagaaaat

SEQ ID NO: 211411 - DNA, 972 bp, Zea Mays
gcaatgggcaagatattctagccttctaggacatggctggcgaaattagcaggcaacaaggttgttgccacatgtggaggtgaaagtaaagctgaacttctggcttccttaggagttgatcgtgttatcaattacagaaatgaacgagtcaaagataaagagtttccaagaggtgtagatatcatatatgaatctgtaggtggggaaatgtttgacttgtgcttgaatgcacttgcagtccatgggcatctcattgtaattggtatgatctcccagtatcaaggagaggatggctggaagccaaagaactacactggactatgtgagaagattctagctaaaagtcaaactgtggctggatttttccttgttcagtatgctcacttgtggcaagatcatcttaacaaactttttgacctgtatgcctctggaaagctaaaggtttccctagaccccaagcaattcttgggtgttgcttcagtcgtagatgcggtcgaatatcttcattctggcaagagtgttggcaaggtcgttgtgtgtattgatccatcatacggtcagatcgttgcaaaattataatccatggacatgatgcgcattgtcttccatggtcacgtaggttattgtcttatagttacacatatacatcaagaccgtattttcccagcgggtgacaaatgaataagggaacatgttggtgtatagtttagtttcatttttccaaagtgtaagatgcacaactatactgaaggacaagcatgggcatggaaatcgattaagtttctaatcccgtgcagtaggatatgcattcgtgtggcctcgttccacgttgtatgtatacagtatatattatataacttgtctcagtgccacatgcttcaattcgaaccggtaacaataattcaaacagctcatgcagatgcattctcaaatacacagcttggaacatcgatattttcttttgaagaaaat

SEQ ID NO: 211412 - DNA, 524 bp, Zea Mays
gtctgtgtcccttcctcgcgttctaggattgggtctctctctcattttcctgtggttctgtgttcagggatatctcaagtggattatttgaattcaattcttcgggagctacatctcagcatggcttgcatcagtttttattgtgattcccatgattgggagttggttggttaaaaattcgggacaagcaatttgccgaataaccattgctgcttctcctcaagctgaaatttgtttacaaattttatttggtgttccttggttgtttggtgggaaaaggaaccagagtcgagtctgaagttgtttagagacgcgatccaagcgggtatccaaccagtcaggctgcagctagccaggcgctagacgctcatacaaccaatcacatggtatatgaatctattccaagtatcagcctctttccgatgtggttgctgccgctggaagcatacggcctctactgttcatgtatagcgcccgctcacaacaagcatacatggccagctcctgcataaagcccgaacgat

SEQ ID NO: 211413 - DNA, 647 bp, Zea Mays
acttcaattcgtgtaaagattgtccacagaatcgacatgcggcgtgcaatgcaacagcacttccctctcattctattgtactatgagcattcctgcaaagcagccatgatgtcctccacgtcgacttttagcggcaagggaagcacagcacatgacccgggaagcccctccccagcgtctccaaaaggggtctgtgtcccttcctcgcgttctaggattgggtctctctctcattttcctgtggttctgtgttcagggatatctcaagtggattatttgaattcaattcttcgggagctacatctcagcatggcttgcatcagtttttattgtgattcccatgattgggagttggttggttaaaaattcgggacaagcaatttgccgaataaccattgctgcttctcctcaagctgaaatttgtttacaaattttatttggtgttccttggttgtttggtgggaaaaggaaccagagtcgagtctgaagttgtttaggttattagcgcttccatggcgactttttccctctcaacccctgctttttccagaagaaatcaggcctaccttctttttccactgcctcattcaattaatgttttttttgcgctacagactatagccatgtacatgaaacgaaaatcgtgc

SEQ ID NO: 211414 - DNA, 1784 bp, Zea Mays
caaaaaaaagggaaagcttgggctttgccaagctcaggtggtgggatggccaccaatccgaagctaccgcaagaacacgatgtctaccacccagctgaagggcagcaaggaggatgctgaggccaagcaggaccaggggttcctgtacgtcaaggtcagcatggatggcgcgccgtacctcaggaagattgacctcaagacttacaagaactacaaggacctgtcgactgcgcttgagaagatgttcagtggcttcagtactggtgagatgtctcgggttactctcctctcccggatggcacgtcagtatgtaattgtgtttcattttgatgtggatggtgtaagaagtacatcaagaagcctttaaaaagcatcataattgattccttggataagcaatagctttgacttaccgttagttttgagtaattgtgagattacaaacaattgaatccttggataagcaatagcttcgacttaccgttagttttgagtaattgtgagattacaaacaatctggcacatcttctttttttatctttagtgaactttttattccttgctaaacaaataccctgctgcttgttctgttattgcatttgcatcaagtctttcttagaaagattttatttcctgtaaggcaaaataatttttgtctccatgttatgattattcgaggatatcttcgggtcctgagtattattccagaaagctactatcactatgagagcaacatccactatatatttctgaaatttggagatctatggtctgtcctgtatttgtatatctaatatctcattagttgtcaccactttcttagaatcatggacatgaaaatgcggtccgagtcttttcagtagaaattttagtacaagaagaggttctcttctgctttccttttattggtcttacaggttagtatgggtgtaatgccatatcaggcaaggatggcttatctgagtaccgcaaggatggtgaatatgttctgacttacgaggacaaggatggagattggatgcttgttggcgatgtaccatgggagatgttcgctgactcttgccgcaggctcaggatcatgaaaggatcagatgcaattggacttgctccaagggcagctgataagtccaagaatcgcaactagaatggttgcttcttacagtccagagcaagagggagatatccagtgactgtagggatctttgtggaagccggaaaacgtctaacagtttcaagaagaattctgccttatggtctgtaccacatgtttttgctgctacgcaagtaaagaactccacgtctgtcaatgttagttttacaacatcgtctacggacaaaaaaaaaaccccccgctatttgattgttgctaagccttcgtacgacgtgtaaatggtttggtacaatgagtgctgcgactacgattgagcacccctctacctagtttgcaaaaaaacagtgtcccatggactgtctgttgtccctctatataaatgtccaatgaagcttgctaatgtgtggtcatcgtgttcatgttctggtccattcatctcgacagtgttgaaaccctgacgaagcaacttgtttcgaaagtgggcctcctctgtggagcagtttctttgtggaaactttgattcctctttttttttcttttttttgttaccagctttgatgcctaattgctggtggggcatgcagcgtatgcgattatttgtctgctgctgaaggtcatgatggttaccatctatgatcccacaccaaagtgtcattttttttaaaaaaaaaga

SEQ ID NO: 211415 - DNA, 760 bp, Zea Mays
caccgcagtagcaggcggtgccgcccccaatgggggctgactgggcgtgggagatgtgggccgtgaagcacgtcggcccctccgggaagccggtccaggctgcgctgctgctcaactacgccccctccgggccatctcggctccttcccgtcgtagtagagcaagagagaagacaactttcagcttttgatatgcaaccattcctggactttgtcaagaggggcaatctgcagactgaattcttttctgttgggccgacctatgtgtgaacttaattttgtttatatgacatgtcaaattgattgccattgttgtggccagcaatttgtgacagaaaattatgatttgtacatttggtcacgtcaatccatgagaactggttttgtgcctgttgcattaatagcacaaagtcaggaggtgaaggagtaatagctatgcagattggagcttacttgatagtctctatcttcacaagcaatggtggctgctgatcggtttgcaattcagattaaccggacgagtcactaatttctagtatagtttcatgagtaatgttgacccacaatttgttcgtgtttgggatcatagtgctagaacgcagtagatgaccatatgtaacttgtagtgttactattttcatgggtccgtagttgtgctaatgtaatagccaatattgactaatactaatgtttctagtgtgaggctgaagaagctcatgttgaatttgtgtttctgaagcattcaaaagcttaaaagagaa

SEQ ID NO: 211416 - DNA, 489 bp, Zea Mays
ccgcagtagcaggcggtgccgcccccaatgggggctgactgggcgtgggagatgtgggccgtgaagcacgtcggcccctccgggaagccggtccaggctgcgctgctgctcaactacgccccctccgggccatctcggctccttcccgtcgtagcaagagagaagacaactttcagcttttgatatgcaaccattcctggactttgtcaagaggggcaatctgcagactgaattcttttctgttgggccgacctatgtgtgaacttaattttgtttatatgacatgtcaaattgattgccattgttgtggccagcaatttgtgacagaaaattatgatttgtacatttggtcacgtcaatccatgagaactggttttgtgcctgttgcattaatagcacaaagtcaggaggtgaaggagtaatagctatgcagattggagcttacttgatagtctctattttcttaatttataagtatgatggttctct

SEQ ID NO: 211417 - DNA, 2200 bp, Zea Mays
cgagccccatcgacccccgactaaccggcgcttgggcgtagcagttccgaccgctccccccgtgggccgccgtcgccccaccgtctccatgtcagttttcagcgctatccaccatgccctccttcgcccgtcagctcgctgagcagacctcccagataagcaagccctgccgccgtccccggaagccgttgctgcatcgccctcggcaaaggatgtgccgctcctacccgacgcgggaatgcggcactgggccgcgtgcgggcggtttgcgcagtgcagcgggtccttccgcggtgaagtcgaccgggccaccgccgaggccttcctcctcacgaggctcccagtgatcctcctccgctacctcgggttcgccatcctatatgatactgaaagcaatattggaattgcgtgatccggtaataaccttcatctcctaagtcaaattgaaggcgttgaccttgatacatacaaagaaattgtttttcttaagtaagatgattatgataaattagattgttcaatgtattgcaagaaaattaatgtatttaaactgtataaagcgatcacgactcgcgcaagccgcgagcacgacactagtgacacatgagctggggacgggagcgagagattatacctaccttgtaagctccagcctattgctcgacaggcttcccacataatgccagtgctgccgttgctgtccgcaaagccatcccctccctgcacgccccctcggcccggtggtgagtggtaggcggccgaagaattccagggtgggtggggagcgcccggaccggagacaaggaagatcgaggcatgaaggacctggtgtcgtgcttcagcgagcacgccgtgcggatctccgacgtggcctgctccggctccggtcccgccaatgcggcggcgggcgccccggaggccggaggaggagggcgggcgccagcggtgagcgcggtgaccaccgcgtaccggtcgcggctgtcggcgtccgggaaggagctgctcatcgacgtgacttggtcatggtctcgggcgcccgacgggcccgcgctctccgtcgccgtccacgaggcggacgccgtctcgcgccaccgcgccgccagcggcgccgcggcgccgcggcacctgcacaagaagaaggggagcgggacgttcacggcgggcagctgcgtggtgggcgtgttctgggactacgccgcggcgcggtacggcgctggctcggggcccgagccgacgtccgggttctacgtcgccgtggtcgccgacgccgagttcgttctcctgctgggcgacctcagccgcgggtacgtggaccgcctgcacgggggcatcccgatcgccgggtcccggatggcgcggcgccgggagcggtttgtcgggtgcgggcgctggtccacgagagcccggttcttggagtccggcgaggagcacgagatcggcgtcgcgctgctggacggcgacgcggaggcgtgggtcaccgtggacggccgcaaggtcgtgcagctccggcggctgcggtggaacttccgcggctgccacaccatcttcctcgacggcggagcgccagtcgacgtgacgtgggacctgcacggctggctcttccacgcgggcgccgagtcgccccaaccgtcctccacttccccctgtgccgtgttcacgttccaggcgcgcggcgcgtcggagacaaagctgtggacggacgacgattgcttcgacgacggagaggaggcggacaagctgccggtgacgccgagcggtcggcaacagaaggcgggaggcggtggggcgtcggggtcggggcaggggttctgcctgctgatccaaggctccaggagcttttccatgagcacttaacctgtacatgccgttagagactttctatcgccattttttttcacttcttgcttggggtttgtgttgggattgattaggaatttaggatagacattcagctggttgactcttgttgattaatctgatgcatgacaaggggtgttgtgattgtgaatagttgggatagtgtcagagagagagagagagaggttgacacacagaattagaaagtgatgttgtctttccagtttgctgcatcgctgtgctgatttcgtacaatgacatgattgtaagttctgctagttacttatcagaaattgagaaacacaccaaagattggatcttacgattactgtttacatctttt

SEQ ID NO: 211418 - DNA, 2829 bp, Zea Mays
gcgtccgttcccggagcaaaaataaaaaaaatcaaaaacacaaaagaattcgctacttcgccggcgacaggggcgaccgcgcgcgccccggccggtgctgatccggactctcccatgcacccattctgctgtgcgccgctcgtgcctgtatcgcccgtggcctccgccgcggccgcgtcctctgcggtggcgggcgccccggccgtgatgccgccaccgcagcccccgcctcctccgcctcctccgccccgaagcaaccccgcctctggcggtgagaggcgcgcgcgcgcggcgggggtcagcggtggcggaggaggcggttcctcgccgcccgagggggtgaagctgaacgagatcgtcggcggcggcatctcgggaatcctgtacaagtgggtcaactacgggcgcggttggaggccgcgctggttcgctctccacgacggcgtgctctcctactacaagatccacgggcccgaccgcatcatcctatcgcgcgagaccgagcggggcgccaaggtcatcggcgatgattccctccgccgcctcaaccgcccctccacctcctcgtcgtcccactccaacggccaccaccatcctcgaaaccccatcggcgaaatccacctcaaggtgtcgaccgtgagggagagcagatcggacgacaggagattctccatcttctcggggacgaagacgttgcacctgagagcggagaccagggaggacagagctgcgtggctcgaggcgctgcgggcgaccaaggacatgttcccgaggatgtcctccagcgagatggtcgggccaggggacaccgcagcggcagtggccgtctcgaccgagcgcctaaggcagcggctgcagcaggaaggggtcagcgaggcggccattgctgacagcgagatgatcgtgcgggcagaattcgaggctctgcacaagcagcttgtgctctccaagcagaagcacgcgctcctcttggaaactcttcgccagctagagacagaaaaggttgatttggagaatacccttgtcgatgagagtcaaaggcagtcgaaagagtatggatctgcttctaaaccaagacatgagaagtatagtgaaggaagtgctagtgaatctgatgattataatgaaccacaagatcctgctgaagagactgatgatgatgagaacctttattttgatacaagagattttctatcctcaagctcttttaaaagtagtggatctgatttccaaagatctgaagctggttcagatgatgaagacgattatccaatggatggaattgatccttccatgaagtctattgggattagttatccatatgtaagaaggcggaagaagctaccagatccggttgagaaagaaaagggtgtaagtttgtggtcaatgatcaaggacaacataggaaaggatcttacaaaagtttgtctgcctgtttacttcaatgagccactttcatcgttacaaaaatgttttgaagatctggagtattcctaccttattgatcgtgcatctgaatgggggaaaagggggaatagtcttatgaggattcttagcgtagcagcatttgctgtttctggatatgcctctacagatggcaggagctgtaagccttttaacccccttcttggggagacatatgaagcagactatccagacaaaggcctccgttttttctctgaaaagtcatcaccctatggttgttgcttgccactgtgagggaactggctggaggttttgggctgatagcaacctaaagagtaaattctggggtcgttccatccaacttgatcctgttggtgaattaacactggagtttgatgatggggaagttttccaatggagcaaggtgacaacttcaatttacaatctcatattgggcaagctatattgcgatcactatggtactatgcgcattcaaggtaatcgtgagtattcatgtaagcttaagttcaaggagcagtcaattatcgatcgcaaccctcaccaggtgcaaggtgttgttcaagatagaaatggtcgaactgttgctacactatttggaaaatgggatgaaagcatgcactatgtaatgggtgattgctttgggaaaggcaagggaactgaacagttatcggaggcccatttgttgtggaaaagaagcaaaccacctaagtttcccactagatacaatctcactcaatttgcaattacattgaatgaacttacccctggattgaaggagaaactgccacctacagactcaagattacgaccagaccagagatgtctggagaacggtgaatatgaaagggcaaatgctgagaaattgaggcttgaacagagacaacggcaggcacgaaagatgcaggagagcggatggaagcctcggtggtttgcgaaggataaagctactgacacataccgttacgtcggtgggtactgggaatccagagaaaagagcagctgggaaggttgccccgacatcttcggacaagtccctaacgatctgatggtaactgactaggttcgagtaggttataggtcttttgcttctccttatcggtatcacttgattccggaaattttagtggttcatattatagagcaattaagtgcccgttgacaagtaaacattggcagtgcctccggtaatattggtctcgtacataataagaagaaaatggttcggtctcacatgttaccttatttttttttggcttttggtatagtaatagttttttttccttgtgaggttttcatgctcacaagttcagtcttcaaagtggtgtagcgtgggcgattagtggtcatgactaaatatatgtaactacgctacgcatacaggag

SEQ ID NO: 211419 - DNA, 2793 bp, Zea Mays
gcgtccgttcccggagcaaaaataaaaaaaatcaaaaacacaaaagaattcgctacttcgccggcgacaggggcgaccgcgcgcgccccggccggtgctgatccggactctcccatgcacccattctgctgtgcgccgctcgtgcctgtatcgcccgtggcctccgccgcggccgcgtcctctgcggtggcgggcgccccggccgtgatgccgccaccgcagcccccgcctcctccgcctcctccgccccgaagcaaccccgcctctggcggtgagaggcgcgcgcgcgcggcgggggtcagcggtggcggaggaggcggttcctcgccgcccgagggggtgaagctgaacgagatcgtcggcggcggcatctcgggaatcctgtacaagtgggtcaactacgggcgcggttggaggccgcgctggttcgctctccacgacggcgtgctctcctactacaagatccacgggcccgaccgcatcatcctatcgcgcgagaccgagcggggcgccaaggtcatcggcgatgattccctccgccgcctcaaccgcccctccacctcctcgtcgtcccactccaacggccaccaccatcctcgaaaccccatcggcgaaatccacctcaaggtgtcgaccgtgagggagagcagatcggacgacaggagattctccatcttctcggggacgaagacgttgcacctgagagcggagaccagggaggacagagctgcgtggctcgaggcgctgcgggcgaccaaggacatgttcccgaggatgtcctccagcgagatggtcgggccaggggacaccgcagcggcagtggccgtctcgaccgagcgcctaaggcagcggctgcagcaggaaggggtcagcgaggcggccattgctgacagcgagatgatcgtgcgggcagaattcgaggctctgcacaagcagcttgtgctctccaagcagaagcacgcgctcctcttggaaactcttcgccagctagagacagaaaaggttgatttggagaatacccttgtcgatgagagtcaaaggcagtcgaaagaaaggaagtgctagtgaatctgatgattataatgaaccacaagatcctgctgaagagactgatgatgatgagaacctttattttgatacaagagattttctatcctcaagctcttttaaaagtagtggatctgatttccaaagatctgaagctggttcagatgatgaagacgattatccaatggatggaattgatccttccatgaagtctattgggattagttatccatatgtaagaaggcggaagaagctaccagatccggttgagaaagaaaagggtgtaagtttgtggtcaatgatcaaggacaacataggaaaggatcttacaaaagtttgtctgcctgtttacttcaatgagccactttcatcgttacaaaaatgttttgaagatctggagtattcctaccttattgatcgtgcatctgaatgggggaaaagggggaatagtcttatgaggattcttagcgtagcagcatttgctgtttctggatatgcctctacagatggcaggagctgtaagccttttaacccccttcttggggagacatatgaagcagactatccagacaaaggcctccgttttttctctgaaaaggttagtcatcaccctatggttgttgcttgccactgtgagggaactggctggaggttttgggctgatagcaacctaaagagtaaattctggggtcgttccatccaacttgatcctgttggtgaattaacactggagtttgatgatggggaagttttccaatggagcaaggtgacaacttcaatttacaatctcatattgggcaagctatattgcgatcactatggtactatgcgcattcaaggtaatcgtgagtattcatgtaagcttaagttcaaggagcagtcaattatcgatcgcaaccctcaccaggtgcaaggtgttgttcaagatagaaatggtcgaactgttgctacactatttggaaaatgggatgaaagcatgcactatgtaatgggtgattgctttgggaaaggcaagggaactgaacagttatcggaggcccatttgttgtggaaaagaagcaaaccacctaagtttcccactagatacaatctcactcaatttgcaattacattgaatgaacttacccctggattgaaggagaaactgccacctacagactcaagattacgaccagaccagagatgtctggagaacggtgaatatgaaagggcaaatgctgagaaattgaggcttgaacagagacaacggcaggcacgaaagatgcaggagagcggatggaagcctcggtggtttgcgaaggataaagctactgacacataccgttacgtcggtgggtactgggaatccagagaaaagagcagctgggaaggttgccccgacatcttcggacaagtccctaacgatctgatggtaactgactaggttcgagtaggttataggtcttttgcttctccttatcggtatcacttgattccggaaattttagtggttcatattatagagcaattaagtgcccgttgacaagtaaacattggcagtgcctccggtaatattggtctcgtacataataagaagaaaatggttcggtctcacatgttaccttatttttttttggcttttggtatagtaatagttttttttccttgtgaggttttcatgctcacaagttcagtcttcaaagtggtgtagcgtgggcgattagtggtcatgactaaatatatgtaactacgctacgcatacaggag

SEQ ID NO: 211420 - DNA, 1468 bp, Zea Mays
tttttgaactgctaggattgagttcatcaggtgaagaacagatgggctggaaagaccatcgttgacctcttcactgatgagttcaaagggcgttcccgcgattactatgttcatgcagtgaagtgtgggaggcttcaggttgatgggcaaatggttcacacagactatattgtgaaatcatcacaaaagataagccacttcttgcataggcacgagccacctgtcttggcgggtgatatttcaatacttaagaatgaagttgatgtcgtaactatttgcaaaccagcttctgttccagttcatccatgtggtcaataccgcaagaatactgtagttgggattctgcaggcagagcatgggttaacacccctatttccggtgcatcggttagatcgtttggtttcaggcctccttatatttgcaaaaaatgccgacagagctgaatgtttcaggcaacagattgaagctggtctgctgcaaaaagaatatgtggccaaggttgttggggtttttcctgatggtgagcaaaccgtcgatgccaatgtaaatttcaacgcacgggaaggaaggagtaccgtggagattagtggtggtgctggtgaagaaccaaatggaaaacaagcactcactaggtttcaaaggatttgcacggatgggactcacagtattgtcttgtgcaaacctgtgactggtcgaactcaccagataagggtgcatctaaagcaagctggttatccaatagctaatgatgagctgtacctatcggggaacttttgtccacgatcaacaaaaggaacaaatgccagtaaaaaaattgcaccatcagatccagacagtagtgctgctgatcatggcagcaaagatgcaggaacggatgtggagtttgatatcgaccccatgtgcacaaactgtccaaatcttgctccagtaggttatgatagagatgaggaaggactatggttgcattgtgtgcggtacactggtcctgattggagctacgaatgtccttatcctgattgggcgttccttggtagcgtgtcaacaaagaagatgaagtcatgatgtagttcatggtgattggtgaatagtaagcccataaaaaaactgaacaatcaaatagtattgttttggcgttacctatgactgggcttccgaggttttcattcaaatcaaacacattagatccggttttcctcggcttctcattcagccaattcacggttcaaaatccactccttaaaattcaacatacattatcgcatccagcctttttgattggttccatatttacggcattcctgtgttgtgacgtcccagctttgaaaaaaaaatgcatgttgtaatttagatagcattccagtgttgtgcccgcgggacagacgttggaagttctgaactaacttgcatgtgaacaagctgcaggatgtatttgctagcagcagaggtgacgacaattgcacagtacgct

SEQ ID NO: 211421 - DNA, 2431 bp, Zea Mays
cagtcaaacccaccgtcccttgcacgctcggcttggctgaagcggagagtttcctctgttcccccattccgtcgtgtcaccaccgccgccgccggagtgtgtcatcgccgattcgcctggtatggcagcaccgcccgggggagcggggatagtgtggcagacgccggccaacccgcccgagtcgcacgactacatcatccgcaacggtgaagaacagatgggctggaaagaccatcgttgacctcttcactgatgagttcaaagggcgttcccgcgattactatgtatgatgccattatttcctttgaatttcatgtaccatactgtttcttttcattacacgccattgtggttatatcattgtctgccaggaggtcctagttgtagagagatgtccataacaggcttgctactgaatgaagtctctgttgtttattgaaccccatcgtcttgaaccgtgcatcttcctttttatttaaaccttgtgcttcagattttgagctcattcatagtaacatatgcattgctgcatgtaagtgaaaggtgaaattgctaggttcatgcagtgaagtgtgggaggcttcaggttgatgggcaaatggttcacacagactatattgtgaaatcatcacaaaagataagccacttcttgcataggtcagttgctttgatcaattttgaaattattacccccactaaacaagtgttcgataatttcacttcataagttcaacatagattactccatacaaacaaatgttccaaagattaggagcagcataaatcttcacaattttctgcagatacattatcctttacatgcttatatcataaaaatggcaagtgaatcaacaggtaagtaacagatgttttggttaatgtctcaatttgctctttctattggaattatttttagaatatcaataaaatattagttatactgatgaactgttgttgattccttgacttctaagttaatgatgtcatttagtttaactttgtgtgccattttaccttcatgtagttctctagttaaccagatacttcctgtggcatgcagacaggaacctagaccctctgtgttctgacttaacaaaaataattcacatgtctttttctcatttacaaatttttagttcaagtctttttctaaaggtgtttttttcttccaggcacgagccacctgtcttggcgggtgatatttcaatacttaagaatgaagttgatgtcgtaactatttgcaaaccagcttctgttccagttcatccatgtggtcaataccgcaagaatactgtagttgggattctgcaggcagagcatgggttaacacccctatttccggtgcatcggttagatcgtttggtttcaggcctccttatatttgcaaaaaatgccgacagagctgaatgtttcaggcaacagattgaagctggtctgctgcaaaaagaatatgtggccaaggttgttggggtttttcctgatggtgagcaaaccgtcgatgccaatgtaaatttcaacgcacgggaaggaaggagtaccgtggagattagtggtggtgctggtgaagaaccaaatggaaaacaagcactcactaggtttcaaaggatttgcacggatgggactcacagtattgtcttgtgcaaacctgtgactggtcgaactcaccagataagggtgcatctaaagcaagctggttatccaatagctaatgatgagctgtacctatcggggaacttttgtccacgatcaacaaaaggaacaaatgccagtaaaaaaattgcaccatcagatccagacagtagtgctgctgatcatggcagcaaagatgcaggaacggatgtggagtttgatatcgaccccatgtgcacaaactgtccaaatcttgctccagtaggttatgatagagatgaggaaggactatggttgcattgtgtgcggtacactggtcctgattggagctacgaatgtccttatcctgattgggcgttccttggtagcgtgtcaacaaagaagatgaagtcatgatgtagttcatggtgattggtgaatagtaagcccataaaaaaactgaacaatcaaatagtattgttttggcgttacctatgactgggcttccgaggttttcattcaaatcaaacacattagatccggttttcctcggcttctcattcagccaattcacggttcaaaatccactccttaaaattcaacatacattatcgcatccagcctttttgattggttccatatttacggcattcctgtgttgtgacgtcccagctttgaaaaaaaaatgcatgttgtaatttagatagcattccagtgttgtgcccgcgggacagacgttggaagttctgaactaacttgcatgtgaacaagctgcaggatgtatttgctagcagcagaggtgacgacaattgcacagtacgct

SEQ ID NO: 211422 - DNA, 2329 bp, Zea Mays
cagtcaaacccaccgtcccttgcacgctcggcttggctgaagcggagagtttcctctgttcccccattccgtcgtgtcaccaccgccgccgccggagtgtgtcatcgccgattcgcctggtatggcagcaccgcccgggggagcggggatagtgtggcagacgccggccaacccgcccgagtcgcacgactacatcatccgcaacggtcggcgctacgtgaggccttactacttcgagttcatctcccatgtgaagaacagatgggctggaaagaccatcgttgacctcttcactgatgagttcaaagggcgttcccgcgattactatgtatgatgccattatttcctttgaatttcatgtaccatactgtttcttttcattacacgccattgtggttatatcattgtctgccaggaggtcctagttgtagagagatgtccataacaggcttgctactgaatgaagtctctgttgtttattgaaccccatcgtcttgaaccgtgcatcttcctttttatttaaaccttgtgcttcagattttgagctcattcatagtaacatatgcattgctgcatgtaagtgaaaggtgaaattgctaggttcatgcagtgaagtgtgggaggcttcaggttgatgggcaaatggttcacacagactatattgtgaaatcatcacaaaagataagccacttcttgcatagatacattatcctttacatgcttatatcataaaaatggcaagtgaatcaacaggtaagtaacagatgttttggttaatgtctcaatttgctctttctattggaattatttttagaatatcaataaaatattagttatactgatgaactgttgttgattccttgacttctaagttaatgatgtcatttagtttaactttgtgtgccattttaccttcatgtagttctctagttaaccagatacttcctgtggcatgcagacaggaacctagaccctctgtgttctgacttaacaaaaataattcacatgtctttttctcatttacaaatttttagttcaagtctttttctaaaggtgtttttttcttccaggcacgagccacctgtcttggcgggtgatatttcaatacttaagaatgaagttgatgtcgtaactatttgcaaaccagcttctgttccagttcatccatgtggtcaataccgcaagaatactgtagttgggattctgcaggcagagcatgggttaacacccctatttccggtgcatcggttagatcgtttggtttcaggcctccttatatttgcaaaaaatgccgacagagctgaatgtttcaggcaacagattgaagctggtctgctgcaaaaagaatatgtggccaaggttgttggggtttttcctgatggtgagcaaaccgtcgatgccaatgtaaatttcaacgcacgggaaggaaggagtaccgtggagattagtggtggtgctggtgaagaaccaaatggaaaacaagcactcactaggtttcaaaggatttgcacggatgggactcacagtattgtcttgtgcaaacctgtgactggtcgaactcaccagataagggtgcatctaaagcaagctggttatccaatagctaatgatgagctgtacctatcggggaacttttgtccacgatcaacaaaaggaacaaatgccagtaaaaaaattgcaccatcagatccagacagtagtgctgctgatcatggcagcaaagatgcaggaacggatgtggagtttgatatcgaccccatgtgcacaaactgtccaaatcttgctccagtaggttatgatagagatgaggaaggactatggttgcattgtgtgcggtacactggtcctgattggagctacgaatgtccttatcctgattgggcgttccttggtagcgtgtcaacaaagaagatgaagtcatgatgtagttcatggtgattggtgaatagtaagcccataaaaaaactgaacaatcaaatagtattgttttggcgttacctatgactgggcttccgaggttttcattcaaatcaaacacattagatccggttttcctcggcttctcattcagccaattcacggttcaaaatccactccttaaaattcaacatacattatcgcatccagcctttttgattggttccatatttacggcattcctgtgttgtgacgtcccagctttgaaaaaaaaatgcatgttgtaatttagatagcattccagtgttgtgcccgcgggacagacgttggaagttctgaactaacttgcatgtgaacaagctgcaggatgtatttgctagcagcagaggtgacgacaattgcacagtacgct

SEQ ID NO: 211423 - DNA, 2472 bp, Zea Mays
cagtcaaacccaccgtcccttgcacgctcggcttggctgaagcggagagtttcctctgttcccccattccgtcgtgtcaccaccgccgccgccggagtgtgtcatcgccgattcgcctggtatggcagcaccgcccgggggagcggggatagtgtggcagacgccggccaacccgcccgagtcgcacgactacatcatccgcaacggtcggcgctacgtgaggccttactacttcgagttcatctcccatgtgaagaacagatgggctggaaagaccatcgttgacctcttcactgatgagttcaaagggcgttcccgcgattactatgtatgatgccattatttcctttgaatttcatgtaccatactgtttcttttcattacacgccattgtggttatatcattgtctgccaggaggtcctagttgtagagagatgtccataacaggcttgctactgaatgaagtctctgttgtttattgaaccccatcgtcttgaaccgtgcatcttcctttttatttaaaccttgtgcttcagattttgagctcattcatagtaacatatgcattgctgcatgtaagtgaaaggtgaaattgctaggttcatgcagtgaagtgtgggaggcttcaggttgatgggcaaatggttcacacagactatattgtgaaatcatcacaaaagataagccacttcttgcataggtcagttgctttgatcaattttgaaattattacccccactaaacaagtgttcgataatttcacttcataagttcaacatagattactccatacaaacaaatgttccaaagattaggagcagcataaatcttcacaattttctgcagatacattatcctttacatgcttatatcataaaaatggcaagtgaatcaacaggtaagtaacagatgttttggttaatgtctcaatttgctctttctattggaattatttttagaatatcaataaaatattagttatactgatgaactgttgttgattccttgacttctaagttaatgatgtcatttagtttaactttgtgtgccattttaccttcatgtagttctctagttaaccagatacttcctgtggcatgcagacaggaacctagaccctctgtgttctgacttaacaaaaataattcacatgtctttttctcatttacaaatttttagttcaagtctttttctaaaggtgtttttttcttccaggcacgagccacctgtcttggcgggtgatatttcaatacttaagaatgaagttgatgtcgtaactatttgcaaaccagcttctgttccagttcatccatgtggtcaataccgcaagaatactgtagttgggattctgcaggcagagcatgggttaacacccctatttctgcatcggttagatcgtttggtttcaggcctccttatatttgcaaaaaatgccgacagagctgaatgtttcaggcaacagattgaagctggtctgctgcaaaaagaatatgtggccaaggttgttggggtttttcctgatggtgagcaaaccgtcgatgccaatgtaaatttcaacgcacgggaaggaaggagtaccgtggagattagtggtggtgctggtgaagaaccaaatggaaaacaagcactcactaggtttcaaaggatttgcacggatgggactcacagtattgtcttgtgcaaacctgtgactggtcgaactcaccagataagggtgcatctaaagcaagctggttatccaatagctaatgatgagctgtacctatcggggaacttttgtccacgatcaacaaaaggaacaaatgccagtaaaaaaattgcaccatcagatccagacagtagtgctgctgatcatggcagcaaagatgcaggaacggatgtggagtttgatatcgaccccatgtgcacaaactgtccaaatcttgctccagtaggttatgatagagatgaggaaggactatggttgcattgtgtgcggtacactggtcctgattggagctacgaatgtccttatcctgattgggcgttccttggtagcgtgtcaacaaagaagatgaagtcatgatgtagttcatggtgattggtgaatagtaagcccataaaaaaactgaacaatcaaatagtattgttttggcgttacctatgactgggcttccgaggttttcattcaaatcaaacacattagatccggttttcctcggcttctcattcagccaattcacggttcaaaatccactccttaaaattcaacatacattatcgcatccagcctttttgattggttccatatttacggcattcctgtgttgtgacgtcccagctttgaaaaaaaaatgcatgttgtaatttagatagcattccagtgttgtgcccgcgggacagacgttggaagttctgaactaacttgcatgtgaacaagctgcaggatgtatttgctagcagcagaggtgacgacaattgcacagtacgct

SEQ ID NO: 211424 - DNA, 1836 bp, Zea Mays
gaaagggctacatttcaatctctcagacactagacacaacctatctactccaagatccacggcggcgtgctggcctactctaagatccgccggcgcgtcgtggcggctcctccgcgtcccgcctccgaggccgcgggcggcgtcaggctgatctgggtggcgcgcggcgccggggagcgccccatcgtattcgtgcctctcaagcctaggccatggagggggtatcatcagctccagaaatggacgaggctatctcaactgaccaatcaagcagatcaacaaaaagaagggctaaagtgtgggatcatgttgattcagagctaatagatgggaaagagaaggcggtttgcaaatactgtaaggcccacttatcttctgctgcgggtaaagagatttcatttcgaaagtgtgaagatccatcctggaaagaaatgataaattattgtcaaccatcttttcgattagtcggtcgacagactgtccgttcagattgtatgttgttgtatgaagaggagaagttgcagttaattgagcagtttacaaagttgaaatctcatgttagtttgactgctgatctttggtcctctaaccaaaaccttggatatcttggtgtaacagcacatttcattagtgaagattttgagttgcacaaaaagattattgcattcaagaagatttccttcccacatacatcttatgctgtgcaagatggtattacctcttgtttgctagagtggggattggttggtgatttgtttaccctgactttggataatgctagtgtaaacaatagagcaatgaaagatatgcgagatgctttgggcagccagatgtttttcagtggtgaacacctccatgtgaggtgttcttctcatgtgctcaacatcatggttcaagctggactaaaggtcgttccaaatgcagtcgggaaggtgagggacattatcaaggtcgtaatatctacaccatctcgtttacagatcttcaattctattgttcaaacgttgggtcttagaagtaaatcggggctgattcttgatgttccacatcgttggaatgcaacctatgatatgctaaatgaagccctaaaatataaggctgctctgaacagatatgcagtagagcaacaccatgaatgtcccactgaagaagattggtcgaaggcagaagctcttcatggttttctacaagagtttagtgatgcaaccaaagcattctcagcggataggcatcccacagctcatctttttctcaagatgttgctcgttatccgaggtgtgctgcttgatgagaattataactcaaatgaactccttaatgagatggcaaatgttatgtataccaagttccaaaaatattggataaatcctaatattgtgttgctcatagctgctgttctagatccatcaatgaaaactgaatttgtcaagttctatttctacacagttggtgacaatgttgatatgaagatgagggagctcaaaaggtacttgaagaaatattacctagagtacgagaaaatcatgaggagtcatagtttgcatgtctttattactcccgatgatcagatgagaagtgagccttctacctcttcacctctttgtggtaaaagaagggtggaacatgcatttgctcaatttgcatctcaaaatgcgaatgcccgtccagagcgaacagaaatggatacatacttggaggaccctaggatccttatcaagccagatgaatgcttcaatgttttaggatggtggaagaaaaattcagatgcttatccaatattgtctttaatggctagggatttcatggctattcctgtgagtacggtgtcctcagaat

SEQ ID NO: 211425 - DNA, 1631 bp, Zea Mays
ctaaagggcataagcccgtggatcatgtgaaagggctacatttcaatctctcagacactagacacaacctatctactccaagatccacggcggcgtgctggcctactctaagatccgccggcgcgtcgtggcggctcctccgcgtcccgcctccgaggccgcgggcggcgtcaggctgatctgggtggcgcgcggcgccggggagcgccccatcgtattcgtgcctctcaaggccatggagggggtatcatcagctccagaaatggacgaggctatctcaactgaccaatcaagcagatcaacaaaaagaagggctaaagtgtgggatcatgttgattcagagctaatagatgggaaagagaaggcggtttgcaaatactgtaaggcccacttatcttctgctgcgggtaaagcacatttcattagtgaagattttgagttgcacaaaaagattattgcattcaagaagatttccttcccacatacatcttatgctgtgcaagatggtattacctcttgtttgctagagtggggattggttggtgatttgtttaccctgactttggataatgctagtgtaaacaatagagcaatgaaagatatgcgagatgctttgggcagccagatgtttttcagtggtgaacacctccatgtgaggtgttcttctcatgtgctcaacatcatggttcaagctggactaaaggtcgttccaaatgcagtcgggaaggtgagggacattatcaaggtcgtaatatctacaccatctcgtttacagatcttcaattctattgttcaaacgttgggtcttagaagtaaatcggggctgattcttgatgttccacatcgttggaatgcaacctatgatatgctaaatgaagccctaaaatataaggctgctctgaacagatatgcagtagagcaacaccatgaatgtcccactgaagaagattggtcgaaggcagaagctcttcatggttttctacaagagtttagtgatgcaaccaaagcattctcagcggataggcatcccacagctcatctttttctcaagatgttgctcgttatccgaggtgtgctgcttgatgagaattataactcaaatgaactccttaatgagatggcaaatgttatgtataccaagttccaaaaatattggataaatcctaatattgtgttgctcatagctgctgttctagatccatcaatgaaaactgaatttgtcaagttctatttctacacagttggtgacaatgttgatatgaagatgagggagctcaaaaggtacttgaagaaatattacctagagtacgagaaaatcatgaggagtcatagtttgcatgtctttattactcccgatgatcagatgagaagtgagccttctacctcttcacctctttgtggtaaaagaagggtggaacatgcatttgctcaatttgcatctcaaaatgcgaatgcccgtccagagcgaacagaaatggatacatacttggaggaccctaggatccttatcaagccagatgaatgcttcaatgttttaggatggtggaagaaaaattcagatgcttatccaatattgtctttaatggctagggatttcatggctattcctgtgagtacggtgtcctcagaat

SEQ ID NO: 211426 - DNA, 623 bp, Zea Mays
gtatttctgtcaggaaattgatctacttagcactgagcttgaagggatggccgaccctacaaggaaggaggtggagtcgataaggaagcggatcgacacggtgaaccgtcagctcaagcctctcagcaagagctgcgtcaagaaggagaaggagtacaaggaggtcctggaggcgtacaacgagaagagcaaagagaaggctctgctagtgaacaggctaatcgagcttgtgagcgaaagcgagaggatgcggatgaagaagctcgaggagctcaacaagacggtcgactcgctctactagacgccagtcggtgctccgtgctctgctcacccacctctccatccactcatccatccagagcttgcacgctcgccctctgtaatctgatccccgtgtgccgtggattcgtgacctgttcaaggtggtgcttgtagtaactgatgtttttcgttgggtgatccttttctcttctttttttcttcttctctctttggtctcttttatttcaccagttcgtacgagtctcgttgcactgtcattgtcgagtaaaactgacgtactgtatttataagcaacaaacaggtaccagctgctgtctaaccacgttttgatggttcattca

SEQ ID NO: 211427 - DNA, 2865 bp, Zea Mays
gctcttctacgtacgcctgcacgctgagatctccgcgtccgcaggcagggccgaatccagttgaaggcaggcggcgaagagccaaagatgggactcgacgcaaccaacgccctgctgcacatcaagagcgcgttgcgttcttccgccaggcttgcctgccagtccgcgtccgagtaccccgtggcgctcggcgtcggcacgctgctgctgttcctgcacaggctctgccctgccctgctcgctctcctcctgtcctcgtcgccggtgttcctgctaaccgcgcttctgctcggggcgctgctgagctacggggagccaggtgacggcgctccagcgaccggagacggagagggcccgtccccccctgatgctgtggctgtggctgtggctgtggctgtggctgtatccacaccatccgttgctgagtcttgtccagcagttgccgtggaggttcagcgtgtcgccgccgtcgcccacatgccaaggagttcttctgcgagccccgttgtccgcgccgaggaaacaacgtccggtaccaccttcttccatgaagcccaccgtgacgagggcagtatcgtcgcatctgtctctgctgacgacgctcttcgccgcgcggaagttgttgttgtggaaagagaggagcagccggccaccaaggaaatctgcgagaatgttcagctgcggcagtttcggagcagcgctggtgaaggtgttccgatcgaagtggacagcaaagcttctggagctgtttcgcttgatgctcggtgggtggctatggagtcttctagctttcacagggacaacggtgccatcgctgaaggagagggagaggaggatgagcatgttaaggagatatgccagcaggctgagagcgccgtcgcagggaggtgtggtggctatggagtttgcagccagtatcagttcggtgagctcatgagctcgtgttggcaacctgttacgcggcaggatccttgttccgagtccgagtcggattctagtgaaagctcttcggatgcgtcgatcagtgacatcataccgatgctcgacgagctgaacccgcctgtggacttgggtgctggccacccttcctcagccttcagagagaagttgagcgccggctcatcggatgatgaagatggctcggaggaggacaataaccttagctcagatgaagatggagaagaggaagaggaggaggaagagaaaggtgatggaaacaactggaagggctctgtggatccaaactctctggaagctgaagaaaagaacgggagctcggagagtctgatggcgcggcgaagagcaaagaacgctctcgtgttcgatctcgacaggaggctaatggacctgcaggcagctgatgcagtctcgaaaatggaggcggcgtcacgcttccgcgtccaggtgccctccatctccacaccgaggcggcctggcccttcagacgatccagcagagggggacacagtggagctgccgcagatccctggctcggcgccgccgtccgttctgcttccacggaggaaaccatccgatgatgctccgttcgacgaccagatcgtggaccgcgacaggcgtctgcaggagacctggactcctcctcgctcaggctttccatcatcagcacagggtagtaggacacctgacactggcagcttgttcgtgaggccgtcttcttctccgcgacatggcagtggcgtggtagaagtagaagcagaggagcctggattgtccggtgccaaagatgccgctgacgaccactcggagtcggagagcggttccgaggaggaaccgccgcttccgcttggcagcaatggcaggctattcggctcgctggaaccgcgtattggcgacgagatcagaattctgggcgcggcggtctcagacgtgtgcgtgctagaactagaagcaaatctgggaagaagtaatggaggcagcgctggttccatcgacgccgcagattcctctcatgtccaaaagcccgtgtcgagcagcgggtcggatgatgcggacgattcagcttccgcagatgcaggcaatgcgcgatcggtagtactgcgtcctctatctgaagaagaagaagaagacggcggtgctgaggaacacgtcgtcgttgatgaagaaggagaagaaggctccatgagcgaggccacctcgctgttcaagtgccgcatggagcaagtgctggtgcagtccgtttcggaggccggcgtagggcagcccctggcggttggacccgggcgtgagcggctgagcctgagcgatgctctgttacctcctgcgacccctttggttgttactggtgaggcgagaccgtcggcaaaggagctgctgagctcacggcttgctcaggtggatggagaagaagcgctggcgccggtgatgcctgctgctgctggtagcccagagtcggagctcatgtgtgctgttggttgcggtgtgctgggtcgtgacgcagaacctgcttcggaggacgacgccaacgaccctactactactactcatgtgccgtcaagcatcggcggccgcggcggcggcgacattgctggtgatggccaagtataaccctgcttgtgcttgctcaaggtggtggtgggaatgggcgagggagacgtcatcgtcttctcggatgtgtgttttttgatcttcggagagaatggagtgcgcatgtgtatggtggtctgttcttttttttttcttttttctgtttagtttagttcgtctgttcatacttgttccttttctttttttttttattgtcgaattcggatggacaaagtagggcgacgcatgcagtttggtagcagcgtggatcgctggttgtttcgtgtaacgcgtgccgagtgcagttttttttaaaaaaaa

SEQ ID NO: 211428 - DNA, 2177 bp, Zea Mays
ctggaatttcaccagttcgatgcctggtagattttcgctgttttccaaactagcccttcaagttacgttttccctgatggcctgatctctttggctcatcgaattcggattccttcttaccaaatactgatctgctgctctcccaccgtggacttcgccccttcgttgggcagtcttggtattgttggacttgggcagtacgcgctcccaaatctcacttgaattttccccttgggctgccaaattggccgctttggcgctctctcctcttataacgaagaacgtgccaaaggcacggtcgtgaaaataatcggggaagctggagaacaaccagatcccgtggcgtggggactcggcgttgaccgacgggaaggaagcggggctggatctttccaagggaatgtatgatgctggggatcacatgaagttcaccttcccgatggcattcacggcgacggtgctctcgtggtcggtgctggagtacggggatcagatgagcgcggcaaagcaactggaccctgccctcgatgcactgaagtggattacagatttccttattgctgcacatccttctgacaatgtgctgtatatccaggtcggtgatcctgatctggaccacaattgttgggaaaggccagaaacaatgaccgagaaaagacctctcacacagatcaacaagaagactcccggatcagatgttgctgctgaggcagcagcagccatggcagctgcttcaatggtcttcaaatccagagataccacgtattctgatgtgcttcttcagcatgctcagaaactattcacttttgctgacacttatagaggcctctcaagcgagagctatcccaagctccaggatttctataactccaccagttacgttgatgagcttctatgggcagcgagttggctctaccacgccacaggcgaccagacgtatctcagctatgtaactgtacagaacgggaaaagttatgctgattggggaaggccaacatggttcagttgggatgacaaaaatccaggcacacaggtgcttttgtccagactaaatttcttcgggtccaaacagatatctaatgccgaaaatgaggggttgaaaatgtatagagatactgcagaagctgtcatttgtggtctgattccagattcgcctcaagccactgccagcagaactggaggaggcttggtgtggataagcgggtggaattctctccagcatgccaccaacgctgcgttcctatctgttgtgtacagcgactacatgctctcgacgcggacagcggcagtgcagtgcagcgggaagtactacagccctaccgatatacgcaactttgctgcatcacaggctaactatatcctgggagacaacccgatgaagcttagctaccttgtgggatatgggagcagctacccaaagcaagtacaccacagaggggcgtcgatccccgcggatgcgaaaacaggctgcaaagggttcgagtatctccactcacccagcccgaacccaaacgtggctacgggcgccctggtgggtgggccgttccagaacgacaccttcgtggactcccgtgacaacgccgtgcagacggagtccagcacctacaacagtggcaccctggtcggtctcctctccggcctcgtcaccacttcctccgtggtacagtcgttcacctagagggctcctcctatgttctggcctggagcgatgcgtgtacgagtacgattgcagtttttttgcttggcgtggctgatggtgatgcgcgatctgtgactgtgagagagaaagcttggttgccaaccgttcagttcagacggatggcatatgcaggatgcagcagtagtttagtagtgcccacgcgtttcttctgttgtgtgtgtacaatgacggtgctgctcctgcagtgcagctatagtttttcaccgcgtgctcctatctggtttgctggtgtgcctgtaaggctgtagctacgagtaatgtattagactatttgtaggtcgtatttcatttgttcattctgtggtgaggtagttcagcagagctttgtactgtaccgatgaattgcaccgtctcccaactgaaatgtgccttgtggattcacagctggaggtgaatggcacgcattcgtgcggctcttcgctccatgtttttttttaaaaaaaactgggataaaata

SEQ ID NO: 211429 - DNA, 2081 bp, Zea Mays
ctcactcctccggtgaccgtgcacccaacaattccttattactacggagctgtgcgcacccaccccgactgcgccacacccacacccacaccgcaccaaccaaccccggccggccagccagcccacgagccccatcccgccatccgcccgcgcggcgagcgcagagccgagccgagctgccggaacgcaggcagcggccaccgggaggcctccgaaacgcagcggaacacctgaggaggcggcttcccggcgaatgctctaggaggaggcgcggcgccggcggagatggggtccaagtacacgcgcgggtgctgcggctggctgatcgtggcgctgattgcggcgctggtggccacggccgcgatgttcgccatcatgaagcgcaagcccgggggccgccacatcaagccgctgccggtgccggggccgccgggggccatcgactccaagtacggcgacgcgctcggggtcgcgctccagttcttccaggtccagaagggtcggtgatcctgatctggaccacaattgttgggaaaggccagaaacaatgaccgagaaaagacctctcacacagatcaacaagaagactcccggatcagatgttgctgctgaggcagcagcagccatggcagctgcttcaatggtcttcaaatccagagataccacgtattctgatgtgcttcttcagcatgctcagaaactattcacttttgctgacacttatagaggcctctcaagcgagagctatcccaagctccaggatttctataactccaccagttacgttgatgagcttctatgggcagcgagttggctctaccacgccacaggcgaccagacgtatctcagctatgtaactgtacagaacgggaaaagttatgctgattggggaaggccaacatggttcagttgggatgacaaaaatccaggcacacaggtgcttttgtccagactaaatttcttcgggtccaaacagatatctaatgccgaaaatgaggggttgaaaatgtatagagatactgcagaagctgtcatttgtggtctgattccagattcgcctcaagccactgccagcagaactggaggaggcttggtgtggataagcgggtggaattctctccagcatgccaccaacgctgcgttcctatctgttgtgtacagcgactacatgctctcgacgcggacagcggcagtgcagtgcagcgggaagtactacagccctaccgatatacgcaactttgctgcatcacaggctaactatatcctgggagacaacccgatgaagcttagctaccttgtgggatatgggagcagctacccaaagcaagtacaccacagaggggcgtcgatccccgcggatgcgaaaacaggctgcaaagggttcgagtatctccactcacccagcccgaacccaaacgtggctacgggcgccctggtgggtgggccgttccagaacgacaccttcgtggactcccgtgacaacgccgtgcagacggagtccagcacctacaacagtggcaccctggtcggtctcctctccggcctcgtcaccacttcctccgtggtacagtcgttcacctagagggctcctcctatgttctggcctggagcgatgcgtgtacgagtacgattgcagtttttttgcttggcgtggctgatggtgatgcgcgatctgtgactgtgagagagaaagcttggttgccaaccgttcagttcagacggatggcatatgcaggatgcagcagtagtttagtagtgcccacgcgtttcttctgttgtgtgtgtacaatgacggtgctgctcctgcagtgcagctatagtttttcaccgcgtgctcctatctggtttgctggtgtgcctgtaaggctgtagctacgagtaatgtattagactatttgtaggtcgtatttcatttgttcattctgtggtgaggtagttcagcagagctttgtactgtaccgatgaattgcaccgtctcccaactgaaatgtgccttgtggattcacagctggaggtgaatggcacgcattcgtgcggctcttcgctccatgtttttttttaaaaaaaactgggataaaata

SEQ ID NO: 211430 - DNA, 673 bp, Zea Mays
cgaacggcccataaagccacaacccggaaacgcgcaaagcgaagagggaaggggggatatcggggaaaaaaacgcaaggtaccaccgtaccagcagcgcaaagatcaggcggccgccatggcggatcagttcgcggattcggcgaacaacgtgatcatcgaggaggtgaacaagggactgaacccaggaatggtggttctgctcgtggttgccagcttcctgctgctcttctttgccgggaactacgcgctgtatgtgtacgcgcagaagacgctcccgccgaagaagaagaagccggtctccaagaagaagctgaagagggaaaagctgaagcagggtgtctccgcgccaggggagtgaacagacagggatgccgccgatcggcccgtcctgagcccgccccctatttacatgattgtcgaagaaaaaagatacacctgctggagccgcggtgttcgtagtaattttgttctgtagatgctttttgttgtcttcgatggtagtgcatttgtattggacaccttgtttcagcaactgatgaatctttagcctaaaccgagttactcttttgttcctgtaaactacaagtacttcaaatgacgctggtgatggtgaacctgagtaaaattggcgagtcccagctcccgcctactcttctgcggttggttttttt

SEQ ID NO: 211431 - DNA, 2728 bp, Zea Mays
gcacatagcactagtcacgtccatgtccatcccggcccttggtagcactaacatcgaagcatcctcctccgtccacgacccacaccgccgtgctcaaattcggccttgccagcgccgccgagcgtccagcgccgacccaagcacgtgaggagttggacaccaccgagaggaactctctggtcctgctcgtggtggtcgtcgtcatcgcttcccgggcctgagaactgtgactgtagactacaattgcatcctgaagaataaaatggaccaacatgattccatggctgactcaccaaggaggcggcacaaccttttgcgtgacaaggtccaattggtgaaaaggaaagattcagatcgctatgagatcgtccgcttccatgatccactgtcttttgagaaaggcttctttgttgtgatccgtgcttgccagcttttggcacagcacaatgacgggataatatttgttggtgttgctggcccctctggtgctgggaagactgtgttcactgagaaggtggtcaatttcatgcctgatgttgctgtgatatcaatggacaactataatgacgcaactcgcatagtcgatggcaattttgatgatccacgtctgacagactatgacacactgctggaaaatatacatggtctgaaggaaggaaggtcagttcaggttccaatatatgatttcaagtcaagctgccggactggttatagaacagttgatgtccctagctcccgaattgttatcattgaaggtatttatgcactgagtgagaagttacggccagtgatagacttgcgtgtttctgtcactggtggtgttcattttgacctagtcaagagggttttaagggatatacagcgagctggccaggagcctgaagaaataattcatcagatctctgaaacggtttatccaatgtacaaggctttcatcgaaccagatttggagaccgcacatattaagatcatcaacaagttcaacccattttcagggttccaaaatcctatgtacattctaaagtcaccaaggtctctaggacctgagaaaatcaaggctgtgcttggtgatgatcatacggaaagcaacgaagaaacttatgatatatatctgcttccacctggtgaagacccagaagcatgccaatcttacttgagaatgcggaatagggaagggaaatataatctaatgtttgaggaatgggtgaccgacaattcttttatcatatcaccaaggatcacttttgaagtcagtgttcgtcttcttggtggtttgatggcattgggatatactatagcagctatactgaagagaagcactcgtgttttttctgatggcaaggcaactgttaaaattgattggctggaataaatctgtagcggatcagttaggtttggatggttcttacataccacgcacatatattgaacaaattcagctggagaaattgattaatgatgttatggcgttaccagaagatttgaagacaaagctcagcatcgacgatgagctggtctcaagtccaaaggaagccttttcccgtgtttcggctgatcggagaaacaaacttatgaagagtggcctatctcaatcatattcaacacacggagacaaaaatattgtgaaattgagtaaactaacagaaaccaataggaggtttggtggagggcgggcccttgaaccgcctgctatcaaccagggtgcaatcacccagctttcagaacagatatcaacattgaatgaaaggatggatgagtttacctctcgagttgaagaactcaactcgaaatttacagtgaaaaaacatttgcccagtcagcagaacttagctcttccaaatgatgcttgcaatggttccacgcctacaaatctctttgtctctcatttaggcaatggtactctgatacctcattcttcatcatcaaaccaactttcaaaggattccccgatgatagaagagattatgaacataacaagaggtcagcgccaggttatacatcagctcgacaatctgacaaatctgcttcacgagcatttggtcttaacacgccagactaataataccgccagcaggaaccgggtgctggatagcgacacactcatctgtccacttatttgcctgactgttgccagtatcggttacttcatgtttaaaggtctcagtaggggctgagcaaagtgagttggcccaaacatgtgctccgaggctcaccaccaagttttggcagaactggagctaaaggaagacagttcttgaaccgtttacatcaggaagatcatatctaacagcttacggtcttattaagacaggtaaacctatataccagcacatggaacaaagctttcgcttttcagggagttattactcccaaacgcagaaaatggtgtaccagaagcatacacttctgtaacaggcactgacagttcccagtgctaataaattttggaggttaaaataatgctcagataatgtcgaagaaattatgagagatctataagtttaactgaacattgtcgttgtctttgtcgtgatttctgagtgcgagcactatctcatgatgccatctgaattcacgattctacaaaattgtcttttattttattctcacaagtaaccgggattaacaattgctgcatatttgacgttccgtatggtacaactgtcggaaacgttgaaacggaggagagggtgtagaattcgtcgcgcgctaaaaataacaaagaaaa

SEQ ID NO: 211432 - DNA, 1520 bp, Zea Mays
acttctctttttatatttactaggaatgggtgaccgacaattcttttatcatatcaccaaggatcacttttgaagtcagtgttcgtcttcttggtggtttgatggcattgggatatactatagcagctatactgaagagaagcactcgtgttttttctgatggcaaggcaactgttaaaattgattggctggaacaacttaacagacaatatatacaagtgcaaggaagagatcggctttatgttaaatctgtagcggatcagttaggtttggatggttcttacataccacgcacatatattgaacaaattcagctggagaaattgattaatgatgttatggcgttaccagaagatttgaagacaaagctcagcatcgacgatgagctggtctcaagtccaaaggaagccttttcccgtgtttcggctgatcggagaaacaaacttatgaagagtggcctatctcaatcatattcaacacacggagacaaaaatattgtgaaattgagtaaactaacagaaaccaataggaggtttggtggagggcgggcccttgaaccgcctgctatcaaccagggtgcaatcacccagctttcagaacagatatcaacattgaatgaaaggatggatgagtttacctctcgagttgaagaactcaactcgaaatttacagtgaaaaaacatttgcccagtcagcagaacttagctcttccaaatgatgcttgcaatggttccacgcctacaaatctctttgtctctcatttaggcaatggtactctgatacctcattcttcatcatcaaaccaactttcaaaggattccccgatgatagaagagattatgaacataacaagaggtcagcgccaggaaccgggtgctggatagcgacacactcatctgtccacttatttgcctgactgttgccagtatcggttacttcatgtttaaaggtctcagtaggggctgagcaaagtgagttggcccaaacatgtgctccgaggctcaccaccaagttttggcagaactggagctaaaggaagacagttcttgaaccgtttacatcaggaagatcatatctaacagcttacggtcttattaagacaggtaaacctatataccagcacatggaacaaagctttcgcttttcagggagttattactcccaaacgcagaaaatggtgtaccagaagcatacacttctgtaacaggcactgacagttcccagtgctaataaattttggaggttaaaataatgctcagataatgtcgaagaaattatgagagatctataagtttaactgaacattgtcgttgtctttgtcgtgatttctgagtgcgagcactatctcatgatgccatctgaattcacgattctacaaaattgtcttttattttattctcacaagtaaccgggattaacaattgctgcatatttgacgttccgtatggtacaactgtcggaaacgttgaaacggaggagagggtgtagaattcgtcgcgcgctaaaaataacaaagaaaa

SEQ ID NO: 211433 - DNA, 1324 bp, Zea Mays
ctcaatgccatttttgtctcaggtgcaaggaagagatcggctttatgttaaatctgtagcggatcagttaggtttggatggttcttacataccacgcacatatattgaacaaattcagctggagaaattgattaatgatgttatggcgttaccagaagatttgaagacaaagctcagcatcgacgatgagctggtctcaagtccaaaggaagccttttcccgtgtttcggctgatcggagaaacaaacttatgaagagtggcctatctcaatcatattcaacacacggagacaaaaatattgtgaaattgagtaaactaacagaaaccaataggaggtttggtggagggcgggcccttgaaccgcctgctatcaaccagggtgcaatcacccagctttcagaacagatatcaacattgaatgaaaggatggatgagtttacctctcgagttgaagaactcaactcgaaatttacagtgaaaaaacatttgcccagtcagcagaacttagctcttccaaatgatgcttgcaatggttccacgcctacaaatctctttgtctctcatttaggcaatggtactctgatacctcattcttcatcatcaaaccaactttcaaaggattccccgatgatagaagagattatgaacataacaagaggtcagcgccaggaaccgggtgctggatagcgacacactcatctgtccacttatttgcctgactgttgccagtatcggttacttcatgtttaaaggtctcagtaggggctgagcaaagtgagttggcccaaacatgtgctccgaggctcaccaccaagttttggcagaactggagctaaaggaagacagttcttgaaccgtttacatcaggaagatcatatctaacagcttacggtcttattaagacaggtaaacctatataccagcacatggaacaaagctttcgcttttcagggagttattactcccaaacgcagaaaatggtgtaccagaagcatacacttctgtaacaggcactgacagttcccagtgctaataaattttggaggttaaaataatgctcagataatgtcgaagaaattatgagagatctataagtttaactgaacattgtcgttgtctttgtcgtgatttctgagtgcgagcactatctcatgatgccatctgaattcacgattctacaaaattgtcttttattttattctcacaagtaaccgggattaacaattgctgcatatttgacgttccgtatggtacaactgtcggaaacgttgaaacggaggagagggtgtagaattcgtcgcgcgctaaaaataacaaagaaaa

SEQ ID NO: 211434 - DNA, 2074 bp, Zea Mays
cgggccgcacatagttctgaagccccagtttgggaattaggattagagccccttgtgaatctcgacccattaccagacccacgcgtgcgctctcctgggccgaacaaaaccccggacggctaccgttcagtggccagcgtttcaacagtaatcagagtaatctctctgtgcctgcgacgacgactaggtgggttaccgccgtcgcgccgccgccgccgccgccgtcatactacaggtgcgaggccttcatcggtatcttaacaggcgacgaacaccaaccagtctgcactctacgatggcggcgcctccggccacggctcccgcggcctcccggtgtctctccggtgccaagtcgtgctgggctgctgagcggagctccagctcgtttgccgtctcggcgccttctactggcctccggcaaagtaggagccgcgtcctcagcgttcgtgccaaggttgccactggcgtgcagagagccagcactgtggatgatggagcgaaaaggccgtggaagctcagtgatgctcgtcttgtcctggaagatggttcagtgtggagggccaagtcttttggcgcatcaggaacacaagtcggtgaagttgttttcaacacatcactgacaggctatcaggagattttgacagatccaagctatgctggtcaatttgtcctgatgaccaatccccatattggtaacactggcgttaatcctgacgatgaagaatcaaaccaatgttttcttggtggccttatcataagaaatctaagcatatgtacttccaactggcgatgcaaagaaacacttgaagagtatctgactaagaggaacatcatgggaatatatgacgtggatacacgtgctataacacgaagattaagagaagacggcagtcttattggtgtcttgagtactgatcagtctcagacagacaatgagttgttggaaatggccaaaaagtggaaaattgttggagttgatttgattagtggtgtcacatgtgatgctccatatgaatggttggacaagactgactcagaatgggagttcaagagggatcagtcaagtgaaacttttcatgtggttgcctatgactttggtatcaaacataatattttgagacgattgacatcatatggatgcaaaataacagttgttccagcaaattggcctgcttcagaggtactcaatttgaagcctaatggtgttctttttagcaatggtcctggagatccagctgcagttccctatgctgtgaagacagtacaagacataattggaaaggttcctgttttcggcatctgtatgggccaccaattgattgggcaggcgcttggtgggaagacatttaaaatgaaatttggtcatcatggtgggaatcaccctgtctgtgatctccgtagtgggcgtgtagacataagtgcacagaaccataactacgcagttgacccagaatcacttccagaaggagcagaagtaactcacgtcaatctcaacgacaatagttgtgctggccttcagtacgccaagatgaagcttgtgtctctccagtaccatcctgagtcttccccaggtccgcatgattccgacacagccttcggtgagtttatagagctcatgaagagcaacagattgtgagggaggggagtactggcaaaggtcaacaattgtcttggtgctctctcgcagcaagctcaaaagaatttgtttcattttagtgtttttctttgggatgttcatgtacttgaattttgggtccagaggacatagcataagatgctctgcagctgtaccatgaattgaagtagtgaactggttgaatttcttgagaataacatgttatcaaattgcacggtacagtatactcagattatgctcgcgaatttctggccggcaagtaaagtggtgagcaccagtagactagttagtatagagataaaggatggccatgaaggctcgtcagtggatacttctgttgttccaagctaatcagatgtgcacaagcacaacgttgttgccagctttttaaatgactgatggaaaatcatccagcttttgttggcgacaaggttcgtg

SEQ ID NO: 211435 - DNA, 1125 bp, Zea Mays
tctccactgatggacctaaaaggagttgatttgattagtggtgtcacatgtgatgctccatatgaatggttggacaagactgactcagaatgggagttcaagagggatcagtcaagtgaaacttttcatgtggttgcctatgactttggtatcaaacataatattttgagacgattgacatcatatggatgcaaaataacagttgttccagcaaattggcctgcttcagaggtactcaatttgaagcctaatggtgttctttttagcaatggtcctggagatccagctgcagttccctatgctgtgaagacagtacaagacataattggaaaggttcctgttttcggcatctgtatgggccaccaattgattgggcaggcgcttggtgggaagacatttaaaatgaaatttggtcatcatggtgggaatcaccctgtctgtgatctccgtagtgggcgtgtagacataagtgcacagaaccataactacgcagttgacccagaatcacttccagaaggagcagaagtaactcacgtcaatctcaacgacaatagttgtgctggccttcagtacgccaagatgaagcttgtgtctctccagtaccatcctgagtcttccccaggtccgcatgattccgacacagccttcggtgagtttatagagctcatgaagagcaacagattgtgagggaggggagtactggcaaaggtcaacaattgtcttggtgctctctcgcagcaagctcaaaagaatttgtttcattttagtgtttttctttgggatgttcatgtacttgaattttgggtccagaggacatagcataagatgctctgcagctgtaccatgaattgaagtagtgaactggttgaatttcttgagaataacatgttatcaaattgcacggtacagtatactcagattatgctcgcgaatttctggccggcaagtaaagtggtgagcaccagtagactagttagtatagagataaaggatggccatgaaggctcgtcagtggatacttctgttgttccaagctaatcagatgtgcacaagcacaacgttgttgccagctttttaaatgactgatggaaaatcatccagcttttgttggcgacaaggttcgtg

SEQ ID NO: 211436 - DNA, 1103 bp, Zea Mays
gtttaagttctattcaatacgaagaattaaaaattgataaatgtttatcttttacatatctcttaacatatattttagaacatgaattctaatattgttagagcgtctccaagtgatcctaaaaacaaatcttttaatatatggaaattaagatcttcttaagggctcgtttggtagcccatttcctggcggcagggaacctcgtcatttccttgtgccggcagcccactgtgaaatttccacggggacagagattcagtctgtttggaagacagcttcgtgcggatatctgcccatcctaaggcaaatttccgcgtggaaacgcgtccggccttcggacgtcgggcgactttccacttctcgagcacgccacgtctcctctcgcctctcgctcggagtcgctcgagcacgccgacgccccgcttccgctcgcctgagcacgctgccaccttcgctcacctagagtcgcttgacgttgtcgcctccgctcgcctgccgccgctcctctcgcctagaggctggagtcgcctgagcacgtcgccttctctggcctagagtctccgagcatgtcgtcgcctcggtcactccgcctcctcaggcgttactagtctgtggttggggacttgaggcaacagatagcagcaggcagtgaccagtgtcaggattagagaatgttaagtggaaacaacacatgaagctaacatggagaaggatgacagtcgatataagctgctgctgatcagcttgccaagagaggactcctcatccagcagcctgtcctatttgtggtcaggaagaagaatcaatccagcgcctgtgctttccagtgtctttgctcaacaggtttggtttataattttccagtggctgggcctcactgccatgccatcacaccacaatcttccaccggcatattctcaaattggtggtgcaaggtaatgaaggtggtccccaaaggtcgagaaagggcttattatttcactagctggatgcccgtgcgttgcaacgggaatatataataccagtatactacgataacttatatacaaaatctgtattatattgttatgagaaaatgtttcataatcaatttgtgatcctag

SEQ ID NO: 211437 - DNA, 1204 bp, Zea Mays
ccatttcctggcggcagggaacctcgtcatttccttgtgccggcagcccactgtgaaatttccacggggacagagattcagtctgtttggaagacagcttcgtgcggatatctgcccatcctaaggcaaatttccgcgtggaaacgcgtccggccttcggacgtcgggcgactttccacttctcgagcacgccacgtctcctctcgcctctcgctcggagtcgctcgagcacgccgacgccccgcttccgctcgcctgagcacgctgccaccttcgctcacctagagtcgcttgacgttgtcgcctccgctcgcctgccgccgctcctctcgcctagaggctggagtcgcctgagcacgtcgccttctctggcctagagtctccgagcatgtcgtcgcctcggtcactccgcctcctcaggcgttactagtctgtggttggggacttgaggcaacagatagcagcaggcagtgaccagtgtcaggattagagaatgttaagtggaaacaacacatgaagctaacatggagaaggatgacagtcgatataagtttagcaccatacgctgctggcggaggtgttaccgaagagatgagcccctctagagcagaggttgtgcatgaaggcggacgcagcgcgcggcagctccttgcccaggtggaaccccaggcgaccggcgtcgtcctccattttctgtgcaagcaccacggctgcagcagcacgttggagcagtgcccacacaagaagcagcacatatgaaccaagcgcaaggtccattcgcaccaccgttgccacctcttctgccaccgcttctgcaacagtttggtactttcggtcacgacgctggaggattgatatggaagtaggacctttcgggatgatgcctagctccatgcctccgcctccgataagcacgaggacggggccgcgtccttcggagggggattgggagcttcagaagctgcgaactttgtgcagcgggtggggctttttcgcccgcgagaagatggatacagtacagtttgggttgtttttatatttgtcactaaaatctaaattcggatgagaatattaagatatattgtgtcagagaaaatacatactcctaactagcattaagaccctctcaagaatccttgacgaggtatagagatggcaatggagatccgattctcgattctctgcgggtaatttttcgattagg

SEQ ID NO: 211438 - DNA, 1199 bp, Zea Mays
ccatttcctggcggcagggaacctcgtcatttccttgtgccggcagcccactgtgaaatttccacggggacagagattcagtctgtttggaagacagcttcgtgcggatatctgcccatcctaaggcaaatttccgcgtggaaacgcgtccggccttcggacgtcgggcgactttccacttctcgagcacgccacgtctcctctcgcctctcgctcggagtcgctcgagcacgccgacgccccgcttccgctcgcctgagcacgctgccaccttcgctcacctagagtcgcttgacgttgtcgcctccgctcgcctgccgccgctcctctcgcctagaggctggagtcgcctgagcacgtcgccttctctggcctagagtctccgagcatgtcgtcgcctcggtcactccgcctcctcaggcgttactagtctgtggttggggacttgaggcaacagatagcagcaggcagtgaccagtgtcaggattagagaatgttaagtggaaacaacacatgaagctaacatggagaaggatgacagtcgatataagcaccatacgctgctggcggaggtgttaccgaagagatgagcccctctagagcagaggttgtgcatgaaggcggacgcagcgcgcggcagctccttgcccaggtggaaccccaggcgaccggcgtcgtcctccattttctgtgcaagcaccacggctgcagcagcacgttggagcagtgcccacacaagaagcagcacatatgaaccaagcgcaaggtccattcgcaccaccgttgccacctcttctgccaccgcttctgcaacagtttggtactttcggtcacgacgctggaggattgatatggaagtaggacctttcgggatgatgcctagctccatgcctccgcctccgataagcacgaggacggggccgcgtccttcggagggggattgggagcttcagaagctgcgaactttgtgcagcgggtggggctttttcgcccgcgagaagatggatacagtacagtttgggttgtttttatatttgtcactaaaatctaaattcggatgagaatattaagatatattgtgtcagagaaaatacatactcctaactagcattaagaccctctcaagaatccttgacgaggtatagagatggcaatggagatccgattctcgattctctgcgggtaatttttcgattagg

SEQ ID NO: 211439 - DNA, 1545 bp, Zea Mays
gtttaactttcagagtgcaattctttggctctacctttcgatcaaaagtagaccagacaattatggaatactgttttccttgacatcacgcaatcactttgtgccatgagccaaccctgtcaccaccaacaggatgcaatctgatatctcacggctggaagctaagattgagagaatggatgctcaattagcagcgaaagatcgagagctagccactcttactcgaacggaggccaaaaacactgctgctctgaagtctcagattgataagctgcaacaagaacgtgatgaatttcagaaaatggttataggaaatcagcaagtacgcacccagcaaattcatgaaatgaagaagaaagagaaagaatacataaagttgcaggaaaagctaaatcaggtattgatggagaagaaaaaggaatcatcccgttctggaatggagataatgaacttgttacagaaagaaggacgacaacgcggaacatggaatggaaaaaagaacgacaatgattattacaaaatgattgttgatgcatatgaagtgaagaaacaagagctgatgcaagagaatgcagatttacgggcactgttacgttcaatgcagatggacatgcgtgactttctcaatgccccgaatgggtcatcacaatctactgttactgataatggaagacaggagtcagggtctcctcagtctccgcttggtggcaagacggatgtttttgacttgccctttcatatggccagagatcagatagaagagagtttgcgcacaaaaatgacttcaatcaaggcacgaatgacacaacttcaagatgctcagaaaggtgcagaagtgacttctgaggcaactgaccgggagcttgagcttgaagctcaactggttgaagcaagaagcatcatccaagagcaggcctgcatcatgtccaagcacttcaagtctgataagccaagtggcaggaggcatagcggtctggatggcgagcgtgaggcatctgccgaggtgtaaaagcatgtctgtagcaaggatatatctgttctgcaagacctcctgattttagtaagtaccgaggtagtatgttgcaggatataacatggtcctgtgctgttgtagcccgagtttaggtgctgtctatgcagtatgatgtgcaggagcatatcctccagcacatggctaacccgatcacatctaagtcacatgtagcgtaactgtaatcctattcatactatatgaagaatgtcagtgtagcaacccttgaaaaaaatggacctttcggaccttacatcttgaagctctgttcgcatgattttttttttagtttattctatcagcggtgacagcacgttgtgacccttgttccctgctgaaacatgcaagttggttgccacctgggcataatctggtagtagattattagcccagctttaggatgttgagaagatccttctccaatgtactgtcacacggatccttttttttttgaaagccaaccgcttggcattgtgtactgctgtcctgtttcccccaaatatatatgacttgtg

SEQ ID NO: 211440 - DNA, 2162 bp, Zea Mays
cgagatcagatctgtgtgtgtgaccattcgtgccacagacatcgcggccctaccttaccgttgccggcctgcccttcccagcccggcagtccacaccgtccccgtcctcccactccccactcgcaaccatttcaaatcgctctctcgacccaactgtactcgccgtcgtcaattcatcatccatccccatccccccatcgactcccagatctctatccccctctccctgtcctcactctctcgagcgcgttgtggcggatgtcctcgtcggcgcgtttcgatctccgggcctcgtcgcatcagttgcagccgccgccgtcgcacgccagcatgagcgacgggggcgcgttcgcaaacgcggagaacctggagcactgcgcccggtacctgaaccagacgctcgtcaccttcggattcccggcatctctcgacctcttcgccaccgatccggtctcgattgcaagaacttgtaactgcatctatgcgctgctgcagcagcgacagagggacattgagttcagggagtctacaaatgaccagcggcagcggatgcaatctgatatctcacggctggaagctaagattgagagaatggatgctcaattagcagcgaaagatcgagagctagccactcttactcgaacggaggccaaaaacactgctgctctgaagtctcagattgataagctgcaacaagaacgtgatgaatttcagaaaatggttataggaaatcagcaagtacgcacccagcaaattcatgaaatgaagaagaaagagaaagaatacataaagttgcaggaaaagctaaatcaggtattgatggagaagaaaaaggaatcatcccgttctggaatggagataatgaacttgttacagaaagaaggacgacaacgcggaacatggaatggaaaaaagaacgacaatgattattacaaaatgattgttgatgcatatgaagtgaagaaacaagagctgatgcaagagaatgcagatttacgggcactgttacgttcaatgcagatggacatgcgtgactttctcaatgccccgaatgggtcatcacaatctactgttactgataatggaagacaggagtcagggtctcctcagtctccgcttggtggcaagacggatgtttttgacttgccctttcatatggccagagatcagatagaagagagtttgcgcacaaaaatgacttcaatcaaggcacgaatgacacaacttcaagatgctcagaaaggtgcagaagtgacttctgaggcaactgaccgggagcttgagcttgaagctcaactggttgaagcaagaagcatcatccaagagcagagtttctatagacagtgtatgaagggcgggcctagtgcagcggtagagcctaccgtctgtaaccggaaggtcccggattcgagccccatattatgcggataaggcttgtcgcttaaagatacccttccccagaccccgcacagtgcgggaagcctacgacactgggtacgccctatagacagtgtatatccaagtgcataacaaaaggcctgcatcatgtccaagcacttcaagtctgataagccaaggaggcatagcggtctggatggcgagcgtgaggcatctgccgaggtgtaaaagcatgtctgtagcaaggatatatctgttctgcaagacctcctgattttagtaagtaccgaggtagtatgttgcaggatataacatggtcctgtgctgttgtagcccgagtttaggtgctgtctatgcagtatgatgtgcaggagcatatcctccagcacatggctaacccgatcacatctaagtcacatgtagcgtaactgtaatcctattcatactatatgaagaatgtcagtgtagcaacccttgaaaaaaatggacctttcggaccttacatcttgaagctctgttcgcatgattttttttttagtttattctatcagcggtgacagcacgttgtgacccttgttccctgctgaaacatgcaagttggttgccacctgggcataatctggtagtagattattagcccagctttaggatgttgagaagatccttctccaatgtactgtcacacggatccttttttttttgaaagccaaccgcttggcattgtgtactgctgtcctgtttcccccaaatatatatgacttgtg

SEQ ID NO: 211441 - DNA, 944 bp, Zea Mays
gtttaactttcagagtgcaattctttggctctacctttcgatcaaaagtagaccagacaattatggaatactgttttccttgacatcacgcaatcactttgtgccatgagccaaccctgtcaccaccaacaggatgcaatctgatatctcacggctggaagctaagattgagagaatggatgctcaattagcagcgaaagatcgagagctagccactcttactcgaacggaggccaaaaacactgctgctctgaagtctcagattgataagctgcaacaagaacgtgatgaatttcagaaaatggttataggaaatcagcaagtacgcacccagcaaattcatgaaatgaagaagaaagagaaagaatacataaagttgcaggaaaagctaaatcaggtattgatggagaagaaaaaggaatcatcccgttctggaatggagataatgaacttgttacagaaagaaggacgacaacgcggaacatggaatggaaaaaagaacgacaatgattattacaaaatgattgttgatgcatatgaagtgaagaaacaagagctgatgcaagagaatgcagatttacgggcactgttacgttcaatgcagatggacatgcgtgactttctcaatgccccgaatgggtcatcacaatctactgttactgataatggaagacaggagtcagggtctcctcagtctccgcttggtggcaagacggatgtttttgacttgccctttcatatggccagagatcagatagaagagagtttgcgcacaaaaatgacttcaatcaaggcacgaatgacacaacttcaagatgctcagaaaggtgcagaagtgacttctgaggcaactgaccgggagcttgagcttgaagctcaactggttgaagcaagaagcatcatccaagagcagagtttctatagacagtgtatgaagggcgggc

SEQ ID NO: 211442 - DNA, 1363 bp, Zea Mays
cgagatcagatctgtgtgtgtgaccattcgtgccacagacatcgcggccctaccttaccgttgccggcctgcccttcccagcccggcagtccacaccgtccccgtcctcccactccccactcgcaaccatttcaaatcgctctctcgacccaactgtactcgccgtcgtcaattcatcatccatccccatccccccatcgactcccagatctctatccccctctccctgtcctcactctctcgagcgcgttgtggcggatgtcctcgtcggcgcgtttcgatctccgggcctcgtcgcatcagttgcagccgccgccgtcgcacgccagcatgagcagcgacgggggcgcgttcgcaaacgcggagaacctggagcactgcgcccggtacctgaaccagacgctcgtcaccttcggattcccggcatctctcgacctcttcgccaccgatccggtctcgattgcaagaacttgtaactgcatctatgcgctgctgcagcagcgacagagggacattgagttcagggagtctacaaatgaccagcggcagcggatgcaatctgatatctcacggctggaagctaagattgagagaatggatgctcaattagcagcgaaagatcgagagctagccactcttactcgaacggaggccaaaaacactgctgctctgaagtctcagattgataagctgcaacaagaacgtgatgaatttcagaaaatggttataggaaatcagcaagtacgcacccagcaaattcatgaaatgaagaagaaagagaaagaatacataaagttgcaggaaaagctaaatcaggtattgatggagaagaaaaaggaatcatcccgttctggaatggagataatgaacttgttacagaaagaaggacgacaacgcggaacatggaatggaaaaaagaacgacaatgattattacaaaatgattgttgatgcatatgaagtgaagaaacaagagctgatgcaagagaatgcagatttacgggcactgttacgttcaatgcagatggacatgcgtgactttctcaatgccccgaatgggtcatcacaatctactgttactgataatggaagacaggagtcagggtctcctcagtctccgcttggtggcaagacggatgtttttgacttgccctttcatatggccagagatcagatagaagagagtttgcgcacaaaaatgacttcaatcaaggcacgaatgacacaacttcaagatgctcagaaaggtgcagaagtgacttctgaggcaactgaccgggagcttgagcttgaagctcaactggttgaagcaagaagcatcatccaagagcagagtttctatagacagtgtatgaagggcgggc

SEQ ID NO: 211443 - DNA, 970 bp, Zea Mays
caccttcaccaaggctcctctttccctcgattttctctcccttctgccttggcatcgcaaccgcagcccgggatgcgctccaccccgaccgccaagcgcctgtcgccgcccgcgatgcgctcgaccccaacaaattctctcacaagatctggcgaaacccatcacctccgctctcctcctctaccctcgggatcctggtggccaacgtcgtcctcgttggcgagatgacctccaagctccaccagacctcgcgctccaccgacgactggaggcctctgccccttcgggatctccttattcacaaggcgtcgaggccgccgtcgaccacgtcatgccgctacgctaggaggaggcgtcgaccaacatcggcttcgcagtggcctaggcgtgccgtgctgatgtgctccgccgtttcgcccgcctccctccccaaagctgcttctaggccgtcgcgatggaggcaatcagcaacaccaggttaaccctcgagatcctggtggccgacagcgtggtcctcgtcggcgagatggtgacctccaagctcttccaaatctggcactccgctgacgtccagaggcctccgccctttgggatctccttaatcacaaggtgggacaagcaccacggcttctagctctacttgagcgacccagctggcaactacggcgggtggaaggtcgtccctattggggccaacagccagtgtgcacaagggggaacagagccgtgtggcttctggtgcccgttgaggaaaggtgaggcgaggtgctcaccatgcacctcaaggtggatgacctcacgtggccatatacgccctttgtttaagttcttgcagatcaactttatgcagagcttgtggaacctgagaagcacatgcagatattctctcgtaggaaaaatgagatttaccaaaaaaactcagaagataggcatgagagctataaatattcttggaataaaagtgtgtttc

SEQ ID NO: 211444 - DNA, 1592 bp, Zea Mays
cctgaccgtcccgtactgtcgcacgaaccctaactactagccgtccctgccgccttccccttcggaggtactactggattcaacaacaaccccctctcgcgggtcccgggccgacgcgacgaaagacaaaggcagcggaggtggcgctgcagtccaccagttcttgggctcttggcaacgtcgccatcgtcatcggccatggttcttggcaacgtcgccatcgtcatcggctccggaattgtcggatcagtacttacaggcgttcttgaccaagagtgcaaagccaggcaaggatgggccgtctaccagcagtccacatactgctgagttgttcagccaggtcaatcatctcagagaggagctgcaaatgttgtctaaatcaaatcatgtttccattgtcactgttgatggtagacctggccctggtgcatacggtataacagctgttgttattggaggagctattggctatttattcataagatggaaggggtggaaactttctgatatgatgtttgtgacgaagcgtgggttatcagatgcttgcaatgtagtggggaaacaagtggatcaggtttcagaaagtgttaatgttgcaaagaaacatcttgctggaaggattgatcgtgtagattgtagtttagatgaatgccaagaaattacagaagccacaaaggaagaggttacaatcatccatggagatctaagtgccttccagaaggaaatggaaacagttcatctcgtagttcgtagtctggagacaaagcttggacgcctagcttatactcaagatcggacaacacgaggaatatatgatttgtgtgaattcactaaaagattggatcagagcccgaaagctgatactcgtcaggttacatcatcaacttctcgtcctgctattgaatcctcagagagaattgttagggttgcttctttacccctggctttggaaccggagtctcctagaattgaggcacctaaggttgtgcgctcatctacagtcatgtcagcatcgggtcttagtttgctagctggaactacaataccacctaaaagagatcaaccgggtgtgtacagcagagcaagttcaatgaaggaaggatcctctgagttgccgagtggcgtgcgaaactcagcagaaccaagccccaggagatctggtgcttcaaccctgtttggagggcttgggtttctaaggaactacaccagctgagatgtatgtgctcagataggtgttttttttcccaaggagaccagcagtttgagctgtatatgtaggtagtaggtaatagggcagttgccaaaaggacggctcccttttcctattgggaattgcgaatttttgtaggaactaataccttgcagagcaatgcctcgatgccaagatacaaactttaaatttaatgttgggttagatgctggaagagaaacatcctattgtatattgcagtggaatgtactgctggaatacatgtttgggaaggagcaattacaactaagtttgtgcttttggtggactggactctacttgctggctgatgttaggatagcatgcactgtatgcagctgcaggctgcagccatgtctggaat

SEQ ID NO: 211445 - DNA, 1578 bp, Zea Mays
ccgtactgtcgcacgaaccctaactactagccgtccctgccgccttccccttcggaggtactactggattcaacaacaaccccctctcgcgggtcccgggccgacgcgacgaaagacaaaggcagcggaggtggcgctgcagtccaccagttcttgggctcttggcaacgtcgccatcgtcatcggccatggttcttggcaacgtcgccatcgtcatcggctccggaattgtcggatcagtacttacaggcggtgagtttggccttcccgacttcagggatgcaatctctggtgctttcaagttcttgaccaagagtgcaaagccaggcaaggatgggccgtctaccagcagtccacatactgctgagttgttcagccaggtcaatcatctcagagaggagctgcaaatgttgtctaaatcaaatcatgtttccattgtcactgttgatggtagacctggccctggtgcatacggtataacagctgttgttattggaggagctattggctatttattcataagatggaaggggtggaaactttctgatatgatgtttgtgacgaagcgtgggttatcagatgcttgcaatgtagtggggaaacaagtggatcaggtttcagaaagtgttaatgttgcaaagaaacatcttgctggaaggattgatcgtgtagattgtagtttagatgaatgccaagaaattacagaagccacaaaggaagaggttacaatcatccatggagatctaagtgccttccagaaggaaatggaaacagttcatctcgtagttcgtagtctggagacaaagcttggacgcctagcttatactcaagatcggacaacacgaggaatatatgatttgtgtgaattcactaaaagattggatcagagcccgaaagctgatactcgtcaggttgcttctttacccctggctttggaaccggagtctcctagaattgaggcacctaaggttgtgcgctcatctacagtcatgtcagcatcgggtcttagtttgctagctggaactacaataccacctaaaagagatcaaccgggtgtgtacagcagagcaagttcaatgaaggaaggatcctctgagttgccgagtggcgtgcgaaactcagcagaaccaagccccaggagatctggtgcttcaaccctgtttggagggcttgggtttctaaggaactacaccagctgagatgtatgtgctcagataggtgttttttttcccaaggagaccagcagtttgagctgtatatgtaggtagtaggtaatagggcagttgccaaaaggacggctcccttttcctattgggaattgcgaatttttgtaggaactaataccttgcagagcaatgcctcgatgccaagatacaaactttaaatttaatgttgggttagatgctggaagagaaacatcctattgtatattgcagtggaatgtactgctggaatacatgtttgggaaggagcaattacaactaagtttgtgcttttggtggactggactctacttgctggctgatgttaggatagcatgcactgtatgcagctgcaggctgcagccatgtctggaat

SEQ ID NO: 211446 - DNA, 1919 bp, Zea Mays
atctttatacgagttcctggcgaaaaaactcacaactacactagttgtggcgactcagtcacacacagacacacacgactacacgagccgccgcagccgccgagccgagctccaagcggaggagaataggagagaccaccgatccgccgtcggagatgagggaggaggcgctggagcggctgcgcggggtggtacgggacagcgccgggaagcacctctacacgtcggccatcttcctcgccgacaaggtggcggcggccacgggggaccctggcgacgtctacatgctcgcgcaggcactcttcctcggccgtcaattccgtcacgcgctccacctcctcaacaattctcgcctgctccgcgacctccggttcagattcctcgccgccaagtgcctcgaggagttgaaagagtggcatcagtgtttgttgatgcttggggatgcaaaagtggatgagcatggaaatgtccttgatcatgatgatgacagtgatatttattttgataaggacgcggaagatcatgagatcaatatcaaatcagctctatgtttcttacgtggtaaggcatatgaagcactggacaaccgtgatcttgctcgccaatggtacaaggcagctgttaaagccgatcctctgtgttatgaggctctcgaacgtcttgttgataattatatgttgacatgtgaggaagaatctgagttattatcctctctgcaatttggggaagaagatgggtggctatcatcattctactcgtgtttgatcacgaagcatgaaaaagaatatttagttgaagcaaaattcaagaaacttgaagaagaggcctgcaatattttgtcctcgagttctggtgaaacaatgaaaaacaacattgatgttttggtttgcaaagctgaatactaccaccagagtggagagtaccaaaagtgttttaaactcacatcctcgttacttgagagagaccctttccatctaaagtgcacattagttcatttggcaactgcaatggagcttggtcattccaatgatctttatcttttagcatgcaacttagtgaaggattatcctgaaaaagctctttcatggtttgctgtcggttgctattactactgtattaagaagtatgatcaagcgcgaagatacttcggcaaagctacaggtttagatgggacgtttcctcctgcttggattggtacaggcattgcctatgctgctcaagaggaaggtgaccaagcaatggctgcatttcggacggcagctcggttatttcctggatgtcatctgccaactttatacatgggcatgcaatatgtgcgaatgcacaatttcaaacttgcagagcaggtaccgaaaagcagttcagttgtttgagttaacattggaccatacttcatcctctctgaatgaaatgtgggaaccaacattggtgaatcttgggcatgcacttcggaaactcaaggaatatcagaaagcagtatcatgttatgaaaaggcactcacttttccaaccaaaagtttgagtgcatttgctggtcttgcttatagttaccatcttatggataattttgaggctgccataaattattaccacaaggctctatggttgaaaccagacgaccagttttgcacagagatgctaacatatgctcttgagtccatctgtcaaagcactgctcgtagaaggcctagttgaggtttgctaatcgcaacatgctaggatattctttaccttacaagactagtagccaaattatatgtaaatttgttgttgtacaatatgtaattgctcaagttcatttcagccacttgaggctgatcgcattgtaaagccaaagttttcgatcttttaatttttatacaccccctccgttgtcatataataattaagttcgtcccgatgctatagcttcaaaagac

SEQ ID NO: 211447 - DNA, 1343 bp, Zea Mays
cgcaaatccgagcgtatttgggcaaaatccttgtaatctgagttattatcctctctgcaatttggggaagaagatgggtggctatcatcattctactcgtgtttgatcacgaagcatgaaaaagaatatttagttgaagcaaaattcaagaaacttgaagaagaggcctgcaatattttgtcctcgagttctggtgaaacaatgaaaaacaacattgatgttttggtttgcaaagctgaatactaccaccagagtggagagtaccaaaagtgttttaaactcacatcctcgttacttgagagagaccctttccatctaaagtgcacattagttcatttggcaactgcaatggagcttggtcattccaatgatctttatcttttagcatgcaacttagtgaaggattatcctgaaaaagctctttcatggtttgctgtcggttgctattactactgtattaagaagtatgatcaagcgcgaagatacttcggcaaagctacaggtttagatgggacgtttcctcctgcttggattggtacaggcattgcctatgctgctcaagaggaaggtgaccaagcaatggctgcatttcggacggcagctcggttatttcctggatgtcatctgccaactttatacatgggcatgcaatatgtgcgaatgcacaatttcaaacttgcagagcagttcttcacacaagcaaaatccatctgcccatctgatccacttatttacaatgagttgggggttgttgcgtataatatgaaggagtaccgaaaagcagttcagttgtttgagttaacattggaccatacttcatcctctctgaatgaaatgtgggaaccaacattggtgaatcttgggcatgcacttcggaaactcaaggaatatcagaaagcagtatcatgttatgaaaaggcactcacttttccaaccaaaagtttgagtgcatttgctggtcttgcttatagttaccatcttatggataattttgaggctgccataaattattaccacaaggctctatggttgaaaccagacgaccagttttgcacagagatgctaacatatgctcttgagtccatctgtcaaagcactgctcgtagaaggcctagttgaggtttgctaatcgcaacatgctaggatattctttaccttacaagactagtagccaaattatatgtaaatttgttgttgtacaatatgtaattgctcaagttcatttcagccacttgaggctgatcgcattgtaaagccaaagttttcgatcttttaatttttatacaccccctccgttgtcatataataattaagttcgtcccgatgctatagcttcaaaagac

SEQ ID NO: 211448 - DNA, 1138 bp, Zea Mays
tatcactccgtgtaacaattaggcccgactagcacaacaagcggcacgcacggcgttaacctgcccagcgtgaaataattgctacctatttctctcgccggcgacgagcctccgcggaaaccagtgccaagccagagagtgcttctttctccgccagactgctgctccgcgcgagaagagccaccacggagtctgcgtgactcgggacagtggagaaaatcagcggcacagcgtgggtctcgcgacctccagcgaacgtggatttgggactgcgatggaggagcagttcatcctccgcgtgccgccatccgtcgcagagcggatcgagcgcctcatgaatgaatccgccgcctcctcctccaaccccgacgaggcctccctggacctctccttctcagaggatggaagaaatggcacatttatgatcggtaatgagagctttcctgcatctctcttggatctacctgctgtggtggagtcatacaaaacatatgatgattctgtactaattaaaactgctgatgttggtcagatgattatggtaagagaagaaaatgatcctgctccagaaggagtcgagtacaagcatgggcttactcctccaatgagggatgcacgcaggcgacgtttccgcagagaaccagacttgaacgcagagctggttaaccaagttgagaagcatcttatcagtatcatgcatggagtatctgtcaaccagaacgccagtgcgacaggaggcgaagaaggtggtgatcgtaagaaacctccagtagctcgtgcagcaaagcagcctggggttcaggagcccgccgcgaatggagaggaagctgatcctgagaggagcgacagtgatgattcagataactgaaatggaggacctggactgggtgcagcctcagtggtccaggcgagccatgccaaacttcgcaatttgaataaatcagaatgtatatatttgtaacaaacaatgtgtttgttgttcgctgaagcatgtactgtcacggtaaacatgatgtgacgctataatgccaaacaagatgatgttactgcatgtactagcaaaatagttataaataacaactgctaagtagcattttattggatttaatttgatttgaactcgttttaaaatcaagaa

SEQ ID NO: 211449 - DNA, 2200 bp, Zea Mays
gtttcgttgaggcgggccattaatatccttccttgagggaagcagaaccgccttgaccgacgtgactacggtacggcccccaaacccggaacggcagcgaaacgacagccatgcttctccagccgatccccaccgccaccctcgccgctcgaccgagatcaagcgaagcttccttcccctttcgttgccaccgccgccgccgcgtgctcctcccagtccgcgccgacttgaccccgatctccctctcggcctccgccccctcgcggccggccaagccggccgtttgcaccgccgacgagctccactacgcctccgtcgacggtgccgggtggcgactcgcgctctggcggtacaggccaccgcgcaatgctcccgtcaggaatcacccgctgatgctgctgtcgggagtcgggacgaacgccgtcggattcgacctctcacccggggcttcgtttgcccgtcacatgtctagccaaggatttgatacatggatagttgaagtaagaggtgctggtctgagcatgcgtgaatatgatgattctactccatctggctcagtcacttttgaggatgtctctagtggtattcaacctcttaatagtacattcgaggccacttccattcagagttctggtggctatgctagtgattgtgatgaccttggaatagttgctttggatgaaccacctttacttgctgaactttctaatttttttgatcgaatctcaaaactcatggaagaggctgtagttaatggaaattttcatgagatcacagaaaaagtttctgttctctcagaaatggtagagagctctaccattattggtccagtgagagaagaaagtctacgtcttcttaagaattttcaggaccagttggattcatgggagcgttttgtagcaacacaaatggatctgacttctgagtataattgggacttcgaccattacctagaggaggatataccagccgcgctggagtatattaaacaacacagcagagcaaaagatggcaagttgcttgccattggacactcaatggggggaattttgttgtatgcaatgctgtcaagatctggttttgaaggagtttcgtcaaatttagcagctattgtcactttggcttcttctgttgactatacaacatccaattcatcgctgaagctgttactgcctcttgctcatcctgcacaagctcttaatgtccctgctgttccattgggtacattgttggcagcggcgtatccgtgggcatctggtccaccatatcttttttcctggcttaatcctcaaatatcagctcaggacatgatgcatccggagttgctggctaagcttgtttcaaacaacttttgtacagtgcctgcaaaggttgttctgcaacttacaaccgctttcagggaaggtgggctgtgcaaccgaaatggaaccttctcatacaaggatcatttgcgagagtgtcagactcctgtccttgcattggctggagataaagacctaatctgccctccagatgctgtttatgaaactgtgaaactcattccgaatcacaaggtggactatagagtgtttggaaagccacaaggcccgcattatgcacattatgacttggttggaggccgactggcgatcaatgaggtgtatccatgtatcatagagttcctctctcgtcatgatggttattgatttgattatatgatgctaatacagagtaacttacaacaccatgttcatctcaaaggttttttaagttgagctgaacagtcttttccatggcttggccagaaaataggtgcatgcacgaattctcgtgtgtgttgaagagagagaaaaaaacacgagctcatctgatgtatccttgtaacaagcatcgaccacgtacttcggcgacgaagcaattgatttcgggtcacgccttcgcaacatcaatgtccacacgaagctctgcgactttttttcctggcctgcaagttacccccggcgaaggttttcttcgttgtcttttcgtgatgtaacacattttcacaccccgaatttaagggataaagctgggtgcgtctcatatgtgcgccaaagaagaacaacacatataatgaccaagtgtatagagataaatgtcataatcattattacatagcggaagagtcttacagaaataaatgataacaataaagcgaactaaataattattccttggcgcc

SEQ ID NO: 211450 - DNA, 1597 bp, Zea Mays
gatgagtgaccagctcgccaccctgggttctgatgaaattcccgctgcctggtgccagccagccgcgcggaggagctcgctgatggacgcgcgctgcacgcggggaatcgttccggatttgtttatttgtctctatatatataggtggttcgaggtgatcggcagaaccacacaggcaaagatggcgagcgtgcacaaggccaccacccttgttctcatgttctgcctgctagcgctggggagagcggagtacctcaagtacaaggacccaaagcagcccgtcgctgttcgcatcaaggacctgctgggtcggatgactctcgccgaaaagatcggccagatgacgcagatcgagagggaaaacgccacggccgacgcgctggccaaatacttcataggtagcgtgctgagcggcggaggcagcgtgcctgctcctcaggcgtctgctcaggcttgggccgccatggtgaccgagatgcagaagggcgctctttctacgcgtctgggtataccgatcatctacggtatcgatgcagtgcatgggcacaacaacgtctacaaagctactattttccctcacaacgtcgggcttggagctaccagggaccctgacctcgttaagagaattggagaagcaactgctcttgaagttagagctactggaattccttacgcctttgctccctgtatagcggtctgtagagatccaagatggggacgttgctatgagagctacagtgaggatccaaaggttgtccagtcactgacttcactcatctctggcctgcaaggtgacgctcctgcggattccgcgggaaggccgtatgttgggggaagtaagaaggttgctgcatgcgcgaagcactatgtcggtgatggtggaacgcataacggaatcaacgagaacaacacgatcatcgacacacacgggctgctgagcatccatatgcctccttactacaactctatcatccgaggtgtctccacggtcatggtctcctactccagctggaacggagtgaagatgcacgcgaaccatttcctggtcacggattttctcaagaacaagctcaagtttaggggttttgtgatttccgactgggagggcattgatcggatcactactcctcctcacgccaactactcttactcaattgaggctggtgttggtgctggaattgacatgatcatggttccattcagatacacagaattcatcgacgatctgacgacacaagttcagaacaaggtcatccccatgagcagaatcgacgacgccgtctacaggatccttcgtgtcaagttcaccatgggtctgttcgagaacccttaccccgactctagcctcgccggcgagctcgggaagcaagaacaccgggaactggcgcgcgaagccgtcaggaaatcccttgttctcctgaagaacggcaagtcctcctacgctccgttgctgcccctcccgaagaaggccggcaagatcctggtcgccggcagccacgccaacgacctgggcaaccagtgcggggggtggacgatcacgtggcaaggaagcagcggcaacaccactgccggattcgtgagcaacgaccgacctgga

SEQ ID NO: 211451 - DNA, 1137 bp, Zea Mays
cctccactccttgctgggaaacaaattgcggcccagctgcctggccggacggacaacgaggtcaagaacttctggaactcgtacatcaagaagaggctcagggagcgcggcatcgaccccgccacccaccagccgctcgccgagcctgccgccgcagccactgccaccaccaccaccacggtctcccgccgcgcggtgtttggggacgtcgacctcatcccgactactactactactacaatccaggtgccgccgccgtcgttcgagggcggcccaatgctggagagcgtgaagctagcggtggagctggactggcccgtcgctggcgacggggtaacgtcaaggccatgctacctgcaggggggctgcttcgacatggacgcgctgcagcagcactgcggctccatcccgccggtgccggtcgtcccgtcggcctccgccagctccagcacgctgacctcgatggcggaagcggaacactgcagcaccaacaacgtcgccgccggcggcaacctcccatggctggagctcggggcaaacgcggtggctgacgccggcggccacgtcgtcggcagctgctacgccggcgcgctggacgagctcaggtggtcggagtacttcgacagtgccttccaggccgccgagagccagcaaggcgccctgcagccggggcagtgtgtctacggcggcaaggatgacgtcccggtgcacttcgacgtccatggcgggctaagcaactggtgctagtccagtaatccatcacgtactcaatgcaaagaaaccacggaacaagaaacagtccatcagtgtgaattaattactgtctatatatagtctgcagatgcaaattcttacgggcatttcatctggtgttacccctccccctttctattctcatgttgctgtgttgattagcagcggataaaagttcatgtgatgagtacatttgaagtgtttaacacacatgtaaagtaatacatacgctgttgttaattagtaaatactgcagagagagagagagagggacagagatatgatgagtgggccatgcggttaaataaaaatgtgaattattatgtcattatctcagcatattaattatagcatgcatgcatgcacggattaatttgactttat

SEQ ID NO: 211452 - DNA, 1610 bp, Zea Mays
aaacccccgcgtccaatcaaaacacgacagcgggacgagcgaaaccaccgtggtttcgccaaaccgctttccttcccatctaaaaccgccccctcccttcctcttctcctagctctcttgcctgcgcaccactcgagtcgagactcgagaggcacctgatctttccttcccgtcttcctcccacacgtccccatcaccattgctgcgacgagagtgagcgggagagggtaggtggcgaggcggcggagatggggcgggggccggtgcagctgcgccggatcgagaacaagatcaaccgccaggtgaccttctccaagcgccggaacgggctgctgaagaaggcccacgagatctccgtgctctgcgacgcagaggtcgcgctcatcgtcttctccactaaggggaagctctacgagtactctagccattccagcatggaaggcattcttgagcgttaccagcgttactcatttgaagaaagggcagtacttaacccaagtattgaagaccaggcaaattggggagatgaatatgtccggttaaaatccaaacttgatgcacttcagaagagtcaaaggcagctgttaggagaacaattgagttcactgaccataaaagaactccagcaactggagcaacaactggacagttctttgaagcatattaggtcaagaaagctctatttttttttggtacagaatcagctcatgttcgattcaatttccgcgcttcagaaaaaggagaaagcacttacagatcaaaacggtgtcctgcaaaagttcatggaggcagagaaggagaaaaacaaggctttgatgaacgcgcagctccgggagcagcaaaatggagcatcaacaagctccccatcactttcaccaccaatagttccagattccatgccaactctaaatatagggccatgtcaacatagaggggcagcagaatctgagtctgaaccgtctcctgctcctgcacaagcaaacaggggcaacctgccaccatggatgctccgcactgtcaagtaacaggtgaggtcttcccagtgtagttttgcagctgatctcgacagcaacacacctgtcaccgaaatgcttcggtgaccctagatatcaaccgatgcacgatccatctcgatcctgtgatcgaataccggcgtaggtactaccaataaagtcaggccccgtcaaatgctttacatggtgattgaagtctggagcttctcagcaccaccatatattgtgttcagttcctgtgtttattgccatagctaccctttttttctctgatctacgagctagacgtagctttgtgcttggagattccactactatgtttcctctgtcctgtgtatgctttaacggagatgcacgttgtacccgtggtaatatatataaatttgcgttgtaaagatcaagtggctcttttctccgaaatgttatgaagtctcaggtgtcaaacatgcgtgactttttaactttgaactgtacgtttcagtattcaagtgtcttgacaatttgaaccgcgtgactagcttctagtcgtggttaatatatgctacacatacactggtgaatctagtattcagtgtcatactgtcatgacaatttgag

SEQ ID NO: 211453 - DNA, 970 bp, Zea Mays
ataaattatcataataataattatctatattaactgactatacaagagtgtcgtataaaattatcataaaaactaaacaccttgtatacaggaaaaacgataaacaaaagagtaaaaaaccaaaaaacaaaaacaaagtaccatcgcccttccggttttctccccagcccccgccccggtcgcggagccgtcgttctcgtctttcggtactcgcgcgcgccagctcacttctctacttcccttccccagatctacctccattcttccctcaaaatcacagatctctctcggccccgtgcccagcgctccgaaaccctagcgccgccgcgggtgccaggccgcgagcgtcgccatgggcatcgtgtttacgcggctcttctcgtcggtcttcggtaaccgcgaggctcgcatcctcgtcctcggcctggacaatgctggcaagaccaccatactctatagactgcaaatgggagaggtcgtctccacgatcccgacaattggattcaacgttgagacggtgcagtacaacaacatcaagttccaagtatgggatcttggtggtcaaacaagcatcaggccatactggcggtgctactttccaaacacccaggctatcatatatgttgttgattcaagcgatacagataggcttgtaacagcaaaagaagaattccatgccatccttgaggaggatgaacttaaaggtgcagttgtccttgtgtatgcaaataagcaggatcttccaggtgcactcgatgatgctgccattacagagtcattagaactacacaaaattaagagccgccaatgggcgattttcaaaacatctgcaataaagggagaggggctcttcgaaggtttggactggctcagtaacacgctcaaatctggaagcagctaaggagcctccgcctcgtcatgaatcatttgctggatggaaaaagatttgccggtaggcccgggcgtccac

SEQ ID NO: 211454 - DNA, 1434 bp, Zea Mays
gaattgaggatatgactcagtatatagggtaatgtatgtaggactcgagagactgagccctataattatttgatgaaattttataaaatagagccaatgttggaagagtgttttatggttttgattcatataattaaaataggattatgtttagagtctttatgatcttagctacctaattccactgccaatttttagccaaataactagctaaacaaacacccctcggcactgatagaagagagaagaaacagacagcctaaagcccttcctctctcctcggcgccggaatggcgaaaagcggcggcgagtccactgtggaggttcctattcccgcttccgcgtcggctacgaggccgaaggcgaaacaccgtatagagatcgaggggtaccctgtggatggcgtctccattggcggtcaagagacttgcgtcatcttcccgactctgagcctcgccttcgacatcggccggtgcccgcagcgcgccgtctcccaggagttcctcttcgtctctcacgggcacctcgaccacatcgggggccttcccatgtatgtggccacgcgggggctcttcaggctgcgtccgcccaccatcttcgtccccgcgtgcctccgggacctcgtggagaggctatttgaggtgcaccgcgccatggaccagtccgagctcaaccacaacctggtccccctggaggtcggggaggagtacgagctcaggagggacctcaaggtcagggctttcaggacctatcacgccatacccagccaggggtatgtgatatactcggtgaagcagaagcttaagcaggagttcattggcctaccagggagcgagatcaagcggctcaagctatcagatcacaaatacggtgtccacccctgaaattgctttctcgggggatacaacagcagatttcattcttgatccggataatgcagatgtgctgcaggcaaaaattcttgttgtcgagagtacctttctagacgactcaatttcagttgagcatgcaagagaatatgggcacacacatttatttgagataacaagtcaggccgacaagcttcaaaacaaagctattctactgatccacttttctgctcgttatactacagaggaaattgatgcggcaataaacaaattgccaccgtctttccgtagcagagtttatgccttgaaggaaggcttctaataaaaacatgaaccaggaaatcagtattgaagttttgtcggagcagttttccaaattggattgcgtgggtatttttcaccggaaacctttttgctatgtgtgctctgatgatactataccaatcatctgaaggttcatgcggggctttttgttgtcggtactcatgcttgtgacattggaatgtttgaatggtgaaatgcgaaacatcatgtataatttacggcgtctgcagctccggcgcct

SEQ ID NO: 211455 - DNA, 2400 bp, Zea Mays
ctctctctctctctctctctctctctctctctctctctctctctctctctctctctctcgctctctctctctcgctctctctctctctctctctctctctcccccccccccgggctaagtccatttggcttctcctccgtgtcggacgcccgctggtcgctgactcgtgttgctgttggggcggcgtcgacgctgcaaagttattgctgctggcattgcggcgcggtaagaggagaggagcgaggagggatcggcggagaatgaagatgaaggcgctggcgtgctgccggcggcggccccaggacttgagcatcgacatggaccaagagcccgacagggtgatgacatataatggcctggagacctgcattatcaactgttccgcctatgacgatgatagtggcatcagtgcaacaacatgcggagatggctgtgtcaccgctgattcccttgatgatgaagtctctagctgctttagtaaagatgcttctggttcttccttctcttcacactgccttagcaagcaggaggagcattcgctagatgagttgggtacacccatcgcaattcatctactccctttcaaagcgaagaaaccaatcacatataccttgagtgcttcagatattgaaaacatgaagaaaaaatttgcgaagcttttgctcggttatgatacttcaggaggcgctaggggcgtttgtgcggctctggccttgtctaatggcataatcaatctctctgctactgtttttggagaactctggaagctggaaccattgtgcgaagataaaaagatcaggtggagaaaagaaatggactggttgatgtctcctacaacttatatagtggagctggttccaaggaaacaaagcggagcagatggatgcacatttgagattatgactccaaaggcccgctcagatgttcatgtgaaccttcctgcccttcagaagcttgatacgatgctcattgaagtaatggactctatgatagatacagagttctggtatgaggagagtggtagcagagctgatggtccggtgaaaattaccggcccaaggaagagtaaaaagtggtggctcccatctcctcgtgtccctgagcaagggctatctcgatttcagcggaaaaggcttgtttttcaggctaagcttgttcaccagatcctcaaagccgcaaaatccatcaacgaacaagtcctgttccacatgcctattccggcagctgttatggatgcccttccaaagtctgggagagctagcttgggtgaagatttgtaccaggctataacgaccgagtatattcccatagaggaaatatttgtttccctcagtttgaaaactgagcatagtgtgctcgagactatgaaccagttggagggggcaatgtttgcatggaaccaaagaatcttagaggagcgaagcaagaggtcaccgggacgtcattcctggagcttcatgaaggacagctcgtcagaactcgacaagatgtctgcatgcatcgaaagggtcgacacccttgtgcagcttctgaaagccagatatccgaacctgcctccaacttttatagatgttctaaaggtccagtacaatgtggatgtggggaatgcaatcgtggaggcatactctagggttcttgtcggggtagcattcagcatactgtcgcgcgtggcggagatactgctggaggatgacctggtcaagaggcccaacacccccatggcctcactgaagttcgacctctcctccgacgtgtacttggccggcataacagagacgccgccgggacacgtccggaggtcccttatggatcagatcagcatggtcgacgggcgcttcaacgctgctgtgaagaagaaaggagcgaagcagctgaggtggtgaggacagtcggctgttgtgtgaaatcttttggccatgtacagggtgggtgatgcagagcccagtgtccgctccacaaggacacaaggcaaggttaccatagcaatagcgccagtgtaatgtatttggcaacgagtttatagcttactgtaagagcaagcattaggcgaatcctgcctgtcgaagtctccggatgttgctgttccgtctgaacatctgatgctcttggtcagcctctgctgcatttcttgctggcacctgatgatagcatgtctatggcgagggaccttgcttgagtgcttgacgggttcatgctgacgcgtcttccgctctggaagcagtccgcgtgtggacgcttgtggaattgagactttagagaagagaacgaattccgaagtcagattgggagccagtcgggtgcaaaagggaaggaaatgcactcggcccaacaaatcttccccgcacggtcattcggtcagcgatcctctagttataggaaaggaacattgtttttgttttg

SEQ ID NO: 211456 - DNA, 2509 bp, Zea Mays
ctctctctctctctctctctctctctctctctctctctctctctctctctctctctctcgctctctctctctcgctctctctctctctctctctctctctcccccccccccgggctaagtccatttggcttctcctccgtgtcggacgcccgctggtcgctgactcgtgttgctgttggggcggcgtcgacgctgcaaagttattgctgctggcattgcggcgcggtaagaggagaggagcgaggagggatcggcggagaatgaagatgaaggcgctggcgtgctgccggcggcggccccaggacttgagcatcgacatggaccaagagcccgacaaaatacagccaatggaaacacaagattcacaacagcttctaggaagttcgcacaggggtgatgacatataatggcctggagacctgcattatcaactgttccgcctatgacgatgatagtggcatcagtgcaacaacatgcggagatggctgtgtcaccgctgattcccttgatgatgaagtctctagctgctttagtaaagatgcttctggttcttccttctcttcacactgccttagcaagcaggaggagcattcgctagatgagttgggtacacccatcgcaattcatctactccctttcaaagcgaagaaaccaatcacatataccttgagtgcttcagatattgaaaacatgaagaaaaaatttgcgaagcttttgctcggttatgatacttcaggaggcgctaggggcgtttgtgcggctctggccttgtctaatggcataatcaatctctctgctactgtttttggagaactctggaagctggaaccattgtgcgaagataaaaagatcaggtggagaaaagaaatggactggttgatgtctcctacaacttatatagtggagctggttccaaggaaacaaagcggagcagatggatgcacatttgagattatgactccaaaggcccgctcagatgttcatgtgaaccttcctgcccttcagaagcttgatacgatgctcattgaagtaatggactctatgatagatacagagttctggtatgaggagagtggtagcagagctgatggtccggtgaaaattaccggcccaaggaagagtaaaaagtggtggctcccatctcctcgtgtccctgagcaagggctatctcgatttcagcggaaaaggcttgtttttcaggctaagcttgttcaccagatcctcaaagccgcaaaatccatcaacgaacaagtcctgttccacatgcctattccggcagctgttatggatgcccttccaaagtctgggagagctagcttgggtgaagatttgtaccaggctataacgaccgagtatattcccatagaggaaatatttgtttccctcagtttgaaaactgagcatagtgtgctcgagactatgaaccagttggagggggcaatgtttgcatggaaccaaagaatcttagaggagcgaagcaagaggtcaccgggacgtcattcctggagcttcatgaaggacagctcgtcagaactcgacaagatgtctgcatgcatcgaaagggtcgacacccttgtgcagcttctgaaagccagatatccgaacctgcctccaacttttatagatgttctaaaggtccagtacaatgtggatgtggggaatgcaatcgtggaggcatactctagggttcttgtcggggtagcattcagcatactgtcgcgcgtggcggagatactgctggaggatgacctggtcaagaggcccaacacccccatggcctcactgaagttcgacctctcctccgacgtgtacttggccggcataacagagacgccgccgggacacgtccggaggtcccttatggatcagatcagcatggtcgacgggcgcttcaacgctgctgtgaagaagaaaggagcgaagcagctgaggtggtgaggacagtcggctgttgtgtgaaatcttttggccatgtacagggtgggtgatgcagagcccagtgtccgctccacaaggacacaaggcaaggttaccatagcaatagcgccagtgtaatgtatttggcaacgagtttatagcttactgtaagagcaagcattaggcgaatcctgcctgtcgaagtctccggatgttgctgttccgtctgaacatctgatgctcttggtcagcctctgctgcatttcttgctggcacctgatgatagcatgtctatggcgagggaccttgcttgagtgcttgacgggttcatgctgacgcgtcttccgctctggaagcagtccgcgtgtggacgcttgtggaattgagactttagagaagagaacgaattccgaagtcagattgggagccagtcgggtgcaaaagggaaggaaatgcactcggcccaacaaatcttccccgcacggtcattcggtcagcgatcctctagttgtatccttgatttttcagatttctgtcatcaatgtcactattatagaatctacggcatacatatttttaggttttttttcac

SEQ ID NO: 211457 - DNA, 3566 bp, Zea Mays
gcgcaaacaagttcgcatcgccatctcgctcgcagggaggagaggggagtctctaaccctaaccctacccgcccctgtcgccatagccatggctgccggcggagagctctccccctcccccgtgccccccgcatcccccatcaagcattctcgctcacccgacgatgcccagcccgacgcatccccgaagcgtcgcaagcgccaccatcaccgccgccaccaccaccaccgtcggcaccgtcacgccgattccccggtacccgtggcagccgacgaagaggtagaggagggggagatactcgaagatgccaccgccgcctctgccatggaggtcgatgctgagtccgccgccccagaggctttccttgctccggagcactttggtaatggtgctgatacagactcaaacacagatgcaaccaagatgcaagctcctgctctgcctacccttccatcctcagaagatggaaggaggtcacttcatgatgcccctgagtctgaaagaggagatattctttcaagtgatgttgaggacaacaaaggacatgaacgaaggcaaagacaaaaccgttctaaatctccaaagtctagaagggagaaggaaaggaggcacaaagatgaccatcacacttcatcttcaaaagattatcattccagaaatcactctagaacatctccttactcaaggcatcaaagtgaagctcattcgagagatctgtacttgagatatagagagaaaggtgattacactaatggttctcgtgcaaatcttagggatggttctgatcatgagagcaatgatcggaatgggaagtctggcagacatacgactaggacccacgggagtgaaagagaaaggagcagcagccatggtattcatgatagacatggtgacaggtacagtgacagacgtgccagccaggaaaggcatagagacgataggatatatagagacaaaatcgattcattagaagctgctcctaggcacagagaaagaagcaggagtcatagtagatcggatccaagggaaaatacacgtcttcgtgatcaaagcagggagagggaaagacggagtggtagttcaaggcatagggatcatgacagcaagagggatacaagtaaagatcggcatagagaatctgacagggttaacagtgcacatgaaagggatagagggagagaggctagggacagggaatggcatagggtcaagggaagtgaaactcatagagctaaggaaggacgggacaaagttagcgataatgataggcacagggattcaacacgctcaaaatatagcgtgtctgatggttacaaagagaggacaagatctggggagaaaggtagagatgctgaccataaaaaccggaagtttgaagaaatgaaggaaaattctctcaaggaggaagatgaagaggagtaccaagagaaaatagaacagcagttagcaatgcaggaggaagacgaccctgaaaaaatcaaagaggaagcaaggaggaggaaagaagctatcatggcaaagtacaggcagcagcaatcgcagaaagaggatatggaatctaaaccaagtggcaatgatgaagaagtaagagcaatggatggaaacgaagctatacatcagaaagatgatatcgatagcagctttatgggcaatgtcgaagctgaaaataagcatgattcttcagaggtatttgatggcaagacaggctttaatgtgggaaggtctcctgctcacaattatgcttcaactagcacgggagcattcactgatgagaggacaataggtgtttcaggtcttggagagggttctcccaagagtgagagatcagcagacatgttttgtgatgacattttcggagaatcacccaccggaattagaaaattgggaaaggatgatggtttgcatattgagagaaatgctcttcatgacaactgggatgatgcagatgggtactacacttatcggttcggagaattgctggatggccgttatgaaatcatagcagcacatgggaagggtgtgttctcaacagttgtgcgggcaaaagatcttaaagcgagtaaggatgatcctgaagaagttgccatcaaaattattcgcaacaatgagacaatgtacaaggctggtaagcaagaggtttcaatattggaaaaacttgcaagtgcggaccgtgaggacaaacgccactgcgtgcggtttatttctagtttcatcttttcatcgccctgaagcacctgaagaactgcaaagttttgcactgtgatataaaaccagataatatgctggtgaatgaggctaagaatgtgctcaaggtatgtgattttggcaacgctatgcttgctggtatgaatgaagttacgccttatcttgtcagccgtttctatcgggcacctgagatcgttcttgggttagcctatgatcaccctttagacatgtggtcagttggttgctgtctatatgagctttataccgggaaagtcttatttcctggtccatcaaacaatgccatgcttcggcttcatatggaattgaagggtccattccctaagaagatgcttcgaaagggtgcctttactatgcaacacttcgatcaagatctcaattttcatgctaccgaggaggatcctgtgacaaaaacggctgtgagaaggttaattttgaacattaaaccaaaggatgttggttctttgtttccgaactttcctggcgaggatccaaaaatgctatccagttttaaggatcttcttgataaaatatttacattagatccagaaaagaggataactgtatcgcaagcacttagccatccatttatcactggcaagtgacacaagatgacgattcctcttgaccttgaacttagcatcttcactgtaaaatacattttgggttcctcttgtctaatcatcaacgtttctgtcttgtgtcctgggagctctgagaaaaagtacatggatgaagcacggaacttcggaagagatggctatctgcagaccttgttgcatgcacttatcatttggatatattctgttgcttgattctgccagggcctctgctatgtgcacattttatatgcttaagggccaacataagaaggtcctgggatggaggtcgctggaccctctactcacttgccatggtacaacacgaaacgacaatgaagcaaaccttcgtcaagagcagcttgcaaaccggaaaataggagctgtggagctttgagcgtacattgatgcctcgaaggagaatgctgaagttgtccgctttggcgccaaaagggcttcgtgcacaaaagaagaaagtaagagttgttgaagacttgtacaacaagaaagaatgaaaaagacagtattgcccctgtgatgcttgtaaaccatgtgtaattttttttggcatacttgtaaattcatacaaagttgtacctctcccctacaaataggtgaacaatgccatgcatagattcacttttcgagggtccatagcttcacttagatcagcttcgaagtaacctagagctatttctcgtgtgaagacgaaggtgcgcttctaattatatgttatgttgaga

SEQ ID NO: 211458 - DNA, 3543 bp, Zea Mays
gcgcaaacaagttcgcatcgccatctcgctcgcagggaggagaggggagtctctaaccctaaccctacccgcccctgtcgccatagccatggctgccggcggagagctctccccctcccccgtgccccccgcatcccccatcaagcattctcgctcacccgacgatgcccagcccgacgcatccccgaagcgtcgcaagcgccaccatcaccgccgccaccaccaccaccgtcggcaccgtcacgccgattccccggtacccgtggcagccgacgaagaggtagaggagggggagatactcgaagatgccaccgccgcctctgccatggaggtcgatgctgagtccgccgccccagaggctttccttgctccggagcactttggtaatggtgctgatacagactcaaacacagatgcaaccaagatgcaagctcctgctctgcctacccttccatcctcagaagatggaaggaggtcacttcatgatgcccctgagtctgaaagaggagatattctttcaagtgatgttgaggacaacaaaggacatgaacgaaggcaaagacaaaaccgttctaaatctccaaagtctagaagggagaaggaaaggaggcacaaagatgaccatcacacttcatcttcaaaagattatcattccagaaatcactctagaacatctccttactcaaggcatcaaagtgaagctcattcgagagatctgtacttgagatatagagagaaaggtgattacactaatggttctcgtgcaaatcttagggatggttctgatcatgagagcaatgatcggaatgggaagtctggcagacatacgactaggacccacgggagtgaaagagaaaggagcagcagccatggtattcatgatagacatggtgacaggtacagtgacagacgtgccagccaggaaaggcatagagacgataggatatatagagacaaaatcgattcattagaagctgctcctaggcacagagaaagaagcaggagtcatagtagatcggatccaagggaaaatacacgtcttcgtgatcaaagcagggagagggaaagacggagtggtagttcaaggcatagggatcatgacagcaagagggatacaagtaaagatcggcatagagaatctgacagggttaacagtgcacatgaaagggatagagggagagaggctagggacagggaatggcatagggtcaagggaagtgaaactcatagagctaaggaaggacgggacaaagttagcgataatgataggcacagggattcaacacgctcaaaatatagcgtgtctgatggttacaaagagaggacaagatctggggagaaaggtagagatgctgaccataaaaaccggaagtttgaagaaatgaaggaaaattctctcaaggaggaagatgaagaggagtaccaagagaaaatagaacagcagttagcaatgcaggaggaagacgaccctgaaaaaatcaaagaggaagcaaggaggaggaaagaagctatcatggcaaagtacaggcagcagcaatcgcagaaagaggatatggaatctaaaccaagtggcaatgatgaagaagtaagagcaatggatggaaacgaagctatacatcagaaagatgatatcgatagcagctttatgggcaatgtcgaagctgaaaataagcatgattcttcagaggtatttgatggcaagacaggctttaatgtgggaaggtctcctgctcacaattatgcttcaactagcacgggagcattcactgatgagaggacaataggtgtttcaggtcttggagagggttctcccaagagtgagagatcagcagacatgttttgtgatgacattttcggagaatcacccaccggaattagaaaattgggaaaggatgatggtttgcatattgagagaaatgctcttcatgacaactgggatgatgcagatgggtactacacttatcggttcggagaattgctggatggccgttatgaaatcatagcagcacatgggaagggtgtgttctcaacagttgtgcgggcaaaagatcttaaagcgagtaaggatgatcctgaagaagttgccatcaaaattattcgcaacaatgagacaatgtacaaggctggtaagcaagaggtttcaatattggaaaaacttgcaagtgcggaccgtgaggacaaacgccactgccttttcatcgccctgaagcacctgaagaactgcaaagttttgcactgtgatataaaaccagataatatgctggtgaatgaggctaagaatgtgctcaaggtatgtgattttggcaacgctatgcttgctggtatgaatgaagttacgccttatcttgtcagccgtttctatcgggcacctgagatcgttcttgggttagcctatgatcaccctttagacatgtggtcagttggttgctgtctatatgagctttataccgggaaagtcttatttcctggtccatcaaacaatgccatgcttcggcttcatatggaattgaagggtccattccctaagaagatgcttcgaaagggtgcctttactatgcaacacttcgatcaagatctcaattttcatgctaccgaggaggatcctgtgacaaaaacggctgtgagaaggttaattttgaacattaaaccaaaggatgttggttctttgtttccgaactttcctggcgaggatccaaaaatgctatccagttttaaggatcttcttgataaaatatttacattagatccagaaaagaggataactgtatcgcaagcacttagccatccatttatcactggcaagtgacacaagatgacgattcctcttgaccttgaacttagcatcttcactgtaaaatacattttgggttcctcttgtctaatcatcaacgtttctgtcttgtgtcctgggagctctgagaaaaagtacatggatgaagcacggaacttcggaagagatggctatctgcagaccttgttgcatgcacttatcatttggatatattctgttgcttgattctgccagggcctctgctatgtgcacattttatatgcttaagggccaacataagaaggtcctgggatggaggtcgctggaccctctactcacttgccatggtacaacacgaaacgacaatgaagcaaaccttcgtcaagagcagcttgcaaaccggaaaataggagctgtggagctttgagcgtacattgatgcctcgaaggagaatgctgaagttgtccgctttggcgccaaaagggcttcgtgcacaaaagaagaaagtaagagttgttgaagacttgtacaacaagaaagaatgaaaaagacagtattgcccctgtgatgcttgtaaaccatgtgtaattttttttggcatacttgtaaattcatacaaagttgtacctctcccctacaaataggtgaacaatgccatgcatagattcacttttcgagggtccatagcttcacttagatcagcttcgaagtaacctagagctatttctcgtgtgaagacgaaggtgcgcttctaattatatgttatgttgaga

SEQ ID NO: 211459 - DNA, 3761 bp, Zea Mays
gcgcaaacaagttcgcatcgccatctcgctcgcagggaggagaggggagtctctaaccctaaccctacccgcccctgtcgccatagccatggctgccggcggagagctctccccctcccccgtgccccccgcatcccccatcaagcattctcgctcacccgacgatgcccagcccgacgcatccccgaagcgtcgcaagcgccaccatcaccgccgccaccaccaccaccgtcggcaccgtcacgccgattccccggtacccgtggcagccgacgaagaggtagaggagggggagatactcgaagatgccaccgccgcctctgccatggaggtcgatgctgagtccgccgccccagaggctttccttgctccggagcactttggtaatggtgctgatacagactcaaacacagatgcaaccaagatgcaagctcctgctctgcctacccttccatcctcagaagatggaaggaggtcacttcatgatgcccctgagtctgaaagaggagatattctttcaagtgatgttgaggacaacaaaggacatgaacgaaggcaaagacaaaaccgttctaaatctccaaagtctagaagggagaaggaaaggaggcacaaagatgaccatcacacttcatcttcaaaagattatcattccagaaatcactctagaacatctccttactcaaggcatcaaagtgaagctcattcgagagatctgtacttgagatatagagagaaaggtgattacactaatggttctcgtgcaaatcttagggatggttctgatcatgagagcaatgatcggaatgggaagtctggcagacatacgactaggacccacgggagtgaaagagaaaggagcagcagccatggtattcatgatagacatggtgacaggtacagtgacagacgtgccagccaggaaaggcatagagacgataggatatatagagacaaaatcgattcattagaagctgctcctaggcacagagaaagaagcaggagtcatagtagatcggatccaagggaaaatacacgtcttcgtgatcaaagcagggagagggaaagacggagtggtagttcaaggcatagggatcatgacagcaagagggatacaagtaaagatcggcatagagaatctgacagggttaacagtgcacatgaaagggatagagggagagaggctagggacagggaatggcatagggtcaagggaagtgaaactcatagagctaaggaaggacgggacaaagttagcgataatgataggcacagggattcaacacgctcaaaatatagcgtgtctgatggttacaaagagaggacaagatctggggagaaaggtagagatgctgaccataaaaaccggaagtttgaagaaatgaaggaaaattctctcaaggaggaagatgaagaggagtaccaagagaaaatagaacagcagttagcaatgcaggaggaagacgaccctgaaaaaatcaaagaggaagcaaggaggaggaaagaagctatcatggcaaagtacaggcagcagcaatcgcagaaagaggatatggaatctaaaccaagtggcaatgatgaagaagtaagagcaatggatggaaacgaagctatacatcagaaagatgatatcgatagcagctttatgggcaatgtcgaagctgaaaataagcatgattcttcagaggtatttgatggcaagacaggctttaatgtgggaaggtctcctgctcacaattatgcttcaactagcacgggagcattcactgatgagaggacaataggtgtttcaggtcttggagagggttctcccaagagtgagagatcagcagacatgttttgtgatgacattttcggagaatcacccaccggaattagaaaattgggaaaggatgatggtttgcatattgagagaaatgctcttcatgacaactgggatgatgcagatgggtactacacttatcggttcggagaattgctggatggccgttatgaaatcatagcagcacatgggaagggtgtgttctcaacagttgtgcgggcaaaagatcttaaagcgagtaaggatgatcctgaagaagttgccatcaaaattattcgcaacaatgagacaatgtacaaggctggtaagcaagaggtttcaatattggaaaaacttgcaagtgcggaccgtgaggacaaacgccactgcgtgcggtttatttctagtttcatgtaccggaaccatctttgcttagtttttgaatctctcaatatgaatcttcgtgaggttttaaagaaatttggtcgtaatattgggcttaaactgactgcggtgagggcatattcaaagcagcttttcatcgccctgaagcacctgaagaactgcaaagttttgcactgtgatataaaaccagataatatgctggtgaatgaggctaagaatgtgctcaaggtatgtgattttggcaacgctatgcttgctggtatgaatgaagttacgccttatcttgtcagccgtttctatcgggcacctgagatcgttcttgggttagcctatgatcaccctttagacatgtggtcagttggttgctgtctatatgagctttataccgggaaagtcttatttcctggtccatcaaacaatgccatgcttcggcttcatatggaattgaagggtccattccctaagaagatgcttcgaaagggtgcctttactatgcaacacttcgatcaagatctcaattttcatgctaccgaggaggatcctgtgacaaaaacggctgtgagaaggttaattttgaacattaaaccaaaggatgttggttctttgtttccgaactttcctggcgaggatccaaaaatgctatccagttttaaggatcttcttgataaaatatttacattagatccagaaaagaggataactgtatcgcaagcacttagccatccatttatcactggcaagtgacacaagatgacgattcctcttgaccttgaacttagcatcttcactgtaaaatacattttgggttcctcttgtctaatcatcaacgtttctgtcttgtgtcctgggagctctgagaaaaagtacatggatgaagcacggaacttcggaagagatggctatctgcagaccttgttgcatgcacttatcatttggatatattctgttgcttgattctgccagggcctctgctatgtgcacattttatatgcttaagggccaacataagaaggtcctgggatggaggtcgctggaccctctactcacttgccatggagagatgcgtatcatttcattgagtaaagaggctacagggaaagaaatccaacatagcccgcccctcctccctctaagcacacaagacctgaaaggttctcagcctgttagcaccatggaatgctcttatttgtgattgcctgcagcaccgccatcataacacttgcaatgatgccattaaaaagacatcatactgatgtttccagatctctcaagccaccaagatacaatggagaacctcaagctcaaacatggaaagcaacaaattacaactaagcaacattaacaagcaaaacaattctacactgactaaaaattcacaagcattttctttctcttttcatcgaaccgatcatccatcctatgtatcagacgtgcgtatggtatatttctaatgtatgcgggccaaggcgaaggagtcaacacctcaagaccttagaagctgtgttgaaggcctacaatacatgcggaagaaccaacctgagaggcgcatgttttc

SEQ ID NO: 211460 - DNA, 3533 bp, Zea Mays
gcgcaaacaagttcgcatcgccatctcgctcgcagggaggagaggggagtctctaaccctaaccctacccgcccctgtcgccatagccatggctgccggcggagagctctccccctcccccgtgccccccgcatcccccatcaagcattctcgctcacccgacgatgcccagcccgacgcatccccgaagcgtcgcaagcgccaccatcaccgccgccaccaccaccaccgtcggcaccgtcacgccgattccccggtacccgtggcagccgacgaagaggtagaggagggggagatactcgaagatgccaccgccgcctctgccatggaggtcgatgctgagtccgccgccccagaggctttccttgctccggagcactttggtaatggtgctgatacagactcaaacacagatgcaaccaagatgcaagctcctgctctgcctacccttccatcctcagaagatggaaggaggtcacttcatgatgcccctgagtctgaaagaggagatattctttcaagtgatgttgaggacaacaaaggacatgaacgaaggcaaagacaaaaccgttctaaatctccaaagtctagaagggagaaggaaaggaggcacaaagatgaccatcacacttcatcttcaaaagattatcattccagaaatcactctagaacatctccttactcaaggcatcaaagtgaagctcattcgagagatctgtacttgagatatagagagaaaggtgattacactaatggttctcgtgcaaatcttagggatggttctgatcatgagagcaatgatcggaatgggaagtctggcagacatacgactaggacccacgggagtgaaagagaaaggagcagcagccatggtattcatgatagacatggtgacaggtacagtgacagacgtgccagccaggaaaggcatagagacgataggatatatagagacaaaatcgattcattagaagctgctcctaggcacagagaaagaagcaggagtcatagtagatcggatccaagggaaaatacacgtcttcgtgatcaaagcagggagagggaaagacggagtggtagttcaaggcatagggatcatgacagcaagagggatacaagtaaagatcggcatagagaatctgacagggttaacagtgcacatgaaagggatagagggagagaggctagggacagggaatggcatagggtcaagggaagtgaaactcatagagctaaggaaggacgggacaaagttagcgataatgataggcacagggattcaacacgctcaaaatatagcgtgtctgatggttacaaagagaggacaagatctggggagaaaggtagagatgctgaccataaaaaccggaagtttgaagaaatgaaggaaaattctctcaaggaggaagatgaagaggagtaccaagagaaaatagaacagcagttagcaatgcaggaggaagacgaccctgaaaaaatcaaagaggaagcaaggaggaggaaagaagctatcatggcaaagtacaggcagcagcaatcgcagaaagaggatatggaatctaaaccaagtggcaatgatgaagaagtaagagcaatggatggaaacgaagctatacatcagaaagatgatatcgatagcagctttatgggcaatgtcgaagctgaaaataagcatgattcttcagaggtatttgatggcaagacaggctttaatgtgggaaggtctcctgctcacaattatgcttcaactagcacgggagcattcactgatgagaggacaataggtgtttcaggtcttggagagggttctcccaagagtgagagatcagcagacatgttttgtgatgacattttcggagaatcacccaccggaattagaaaattgggaaaggatgatggtttgcatattgagagaaatgctcttcatgacaactgggatgatgcagatgggtactacacttatcggttcggagaattgctggatggccgttatgaaatcatagcagcacatgggaagggtgtgttctcaacagttgtgcgggcaaaagatcttaaagcgagtaaggatgatcctgaagaagttgccatcaaaattattcgcaacaatgagacaatgtacaaggctggtaagcaagaggtttcaatattggaaaaacttgcaagtgcggaccgtgaggacaaacgccactgcgtgcggtttatttctagtttcatgtaccggaaccatctttgcttagtttttgaatctctcaatatgaatcttcgtgaggttttaaagaaatttggtcgtaatattgggcttaaactgactgcggtgagggcatattcaaagcagcttttcatcgccctgaagcacctgaagaactgcaaagttttgcactgtgatataaaaccagataatatgctggtgaatgaggctaagaatgtgctcaaggtatgtgattttggcaacgctatgcttgctggtatgaatgaagttacgccttatcttgtcagccgtttctatcgggcacctgagatcgttcttgggttagcctatgatcaccctttagacatgtggtcagttggttgctgtctatatgagctttataccgggaaagtcttatttcctggtccatcaaacaatgccatgcttcggcttcatatggaattgaagggtccattccctaagaagatgcttcgaaagggtgcctttactatgcaacacttcgatcaagatctcaattttcatgctaccgaggaggatcctgtgacaaaaacggctgtgagaaggttaattttgaacattaaaccaaaggatgttggttctttgtttccgaactttcctggcgaggatccaaaaatgctatccagttttaaggatcttcttgataaaatatttacattagatccagaaaagaggataactgtatcgcaagcacttagccatccatttatcactggcaagtgacacaagatgacgattcctcttgaccttgaacttagcatcttcactgtaaaatacattttgggttcctcttgtctaatcatcaacgtttctgtcttgtgtcctgggagctctgagaaaaagtacatggatgaagcacggaacttcggaagagatggctatctgcagaccttgttgcatgcacttatcatttggatatattctgttgcttgattctgccagggcctctgctatgtgcacattttatatgcttaagggccaacataagaaggtcctgggatggaggtcgctggaccctctactcacttgccatgcaatggagaacctcaagctcaaacatggaaagcaacaaattacaactaagcaacattaacaagcaaaacaattctacactgactaaaaattcacaagcattttctttctcttttcatcgaaccgatcatccatcctatgtatcagacgtgcgtatggtatatttctaatgtatgcgggccaaggcgaaggagtcaacacctcaagaccttagaagctgtgttgaaggcctacaatacatgcggaagaaccaacctgagaggcgcatgttttc

SEQ ID NO: 211461 - DNA, 3886 bp, Zea Mays
caaacatgttattgaataattatgcaccgtcgcaacgcacggacactatactagttcaatactatgactgatttgatattagatagctctgccaccatcgactcggtcccaagcgcaaacaagttcgcatcgccatctcgctcgcagggaggagaggggagtctctaaccctaaccctacccgcccctgtcgccatagccatggctgccggcggagagctctccccctcccccgtgccccccgcatcccccatcaagcattctcgctcacccgacgatgcccagcccgacgcatccccgaagcgtcgcaagcgccaccatcaccgccgccaccaccaccaccgtcggcaccgtcacgccgattccccggtacccgtggcagccgacgaagaggtagaggagggggagatactcgaagatgccaccgccgcctctgccatggaggtcgatgctgagtccgccgccccagaggctttccttgctccggagcactttggtaatggtgctgatacagactcaaacacagatgcaaccaagatgcaagctcctgctctgcctacccttccatcctcagaagatggaaggaggtcacttcatgatgcccctgagtctgaaagaggagatattctttcaagtgatgttgaggacaacaaaggacatgaacgaaggcaaagacaaaaccgttctaaatctccaaagtctagaagggagaaggaaaggaggcacaaagatgaccatcacacttcatcttcaaaagattatcattccagaaatcactctagaacatctccttactcaaggcatcaaagtgaagctcattcgagagatctgtacttgagatatagagagaaaggtgattacactaatggttctcgtgcaaatcttagggatggttctgatcatgagagcaatgatcggaatgggaagtctggcagacatacgactaggacccacgggagtgaaagagaaaggagcagcagccatggtattcatgatagacatggtgacaggtacagtgacagacgtgccagccaggaaaggcatagagacgataggatatatagagacaaaatcgattcattagaagctgctcctaggcacagagaaagaagcaggagtcatagtagatcggatccaagggaaaatacacgtcttcgtgatcaaagcagggagagggaaagacggagtggtagttcaaggcatagggatcatgacagcaagagggatacaagtaaagatcggcatagagaatctgacagggttaacagtgcacatgaaagggatagagggagagaggctagggacagggaatggcatagggtcaagggaagtgaaactcatagagctaaggaaggacgggacaaagttagcgataatgataggcacagggattcaacacgctcaaaatatagcgtgtctgatggttacaaagagaggacaagatctggggagaaaggtagagatgctgaccataaaaaccggaagtttgaagaaatgaaggaaaattctctcaaggaggaagatgaagaggagtaccaagagaaaatagaacagcagttagcaatgcaggaggaagacgaccctgaaaaaatcaaagaggaagcaaggaggaggaaagaagctatcatggcaaagtacaggcagcagcaatcgcagaaagaggatatggaatctaaaccaagtggcaatgatgaagaagtaagagcaatggatggaaacgaagctatacatcagaaagatgatatcgatagcagctttatgggcaatgtcgaagctgaaaataagcatgattcttcagaggtatttgatggcaagacaggctttaatgtgggaaggtctcctgctcacaattatgcttcaactagcacgggagcattcactgatgagaggacaataggtgtttcaggtcttggagagggttctcccaagagtgagagatcagcagacatgttttgtgatgacattttcggagaatcacccaccggaattagaaaattgggaaaggatgatggtttgcatattgagagaaatgctcttcatgacaactgggatgatgcagatgggtactacacttatcggttcggagaattgctggatggccgttatgaaatcatagcagcacatgggaagggtgtgttctcaacagttgtgcgggcaaaagatcttaaagcgagtaaggatgatcctgaagaagttgccatcaaaattattcgcaacaatgagacaatgtacaaggctggtaagcaagaggtttcaatattggaaaaacttgcaagtgcggaccgtgaggacaaacgccactgcgtgcggtttatttctagtttcatgtaccggaaccatctttgcttagtttttgaatctctcaatatgaatcttcgtgaggttttaaagaaatttggtcgtaatattgggcttaaactgactgcggtgagggcatattcaaagcagcttttcatcgccctgaagcacctgaagaactgcaaagttttgcactgtgatataaaaccagataatatgctggtgaatgaggctaagaatgtgctcaaggtatgtgattttggcaacgctatgcttgctggtatgaatgaagttacgccttatcttgtcagccgtttctatcgggcacctgagatcgttcttgggttagcctatgatcaccctttagacatgtggtcagttggttgctgtctatatgagctttataccgggaaagtcttatttcctggtccatcaaacaatgccatgcttcggcttcatatggaattgaagggtccattccctaagaagatgcttcgaaagggtgcctttactatgcaacacttcgatcaagatctcaattttcatgctaccgaggaggatcctgtgacaaaaacggctgtgagaaggttaattttgaacattaaaccaaaggatgttggttctttgtttccgaactttcctggcgaggatccaaaaatgctatccagttttaaggatcttcttgataaaatatttacattagatccagaaaagaggataactgtatcgcaagcacttagccatccatttatcactggcaagtgacacaagatgacgattcctcttgaccttgaacttagcatcttcactgtaaaatacattttgggttcctcttgtctaatcatcaacgtttctgtcttgtgtcctgggagctctgagaaaaagtacatggatgaagcacggaacttcggaagagatggctatctgcagaccttgttgcatgcacttatcatttggatatattctgttgcttgattctgccagggcctctgctatgtgcacattttatatgcttaagggccaacataagaaggtcctgggatggaggtcgctggaccctctactcacttgccatgtattcaagtgcaggagagatgcgtatcatttcattgagtaaagaggctacagggaaagaaatccaacatagcccgcccctcctccctctaagcacacaagacctgaaaggttctcagcctgttagcaccatggaatgctcttatttgtgattgcctgcagcaccgccatcataacacttgcaatgatgccattaaaaagacatcatactgatgtttccagatctctcaagccaccaagatacaatggagaacctcaagctcaaacatggaaagcaacaaattacaactaagcaacattaacaagcaaaacaattctacactgactaaaaattcacaagcattttctttctcttttcatcgaaccgatcatccatcctatgtatcagacgtgcgtatggtatatttctaatgtatgcgggccaaggcgaaggagtcaacacctcaagaccttagaagctgtgttgaaggcctacaatacatgcggaagaaccaacctgagaggcgcatgttttc

SEQ ID NO: 211462 - DNA, 3961 bp, Zea Mays
gcgcaaacaagttcgcatcgccatctcgctcgcagggaggagaggggagtctctaaccctaaccctacccgcccctgtcgccatagccatggctgccggcggagagctctccccctcccccgtgccccccgcatcccccatcaagcattctcgctcacccgacgatgcccagcccgacgcatccccgaagcgtcgcaagcgccaccatcaccgccgccaccaccaccaccgtcggcaccgtcacgccgattccccggtacccgtggcagccgacgaagaggtagaggagggggagatactcgaagatgccaccgccgcctctgccatggaggtcgatgctgagtccgccgccccagaggctttccttgctccggagcactttggtaatggtgctgatacagactcaaacacagatgcaaccaagatgcaagctcctgctctgcctacccttccatcctcagaagatggaaggaggtcacttcatgatgcccctgagtctgaaagaggagatattctttcaagtgatgttgaggacaacaaaggacatgaacgaaggcaaagacaaaaccgttctaaatctccaaagtctagaagggagaaggaaaggaggcacaaagatgaccatcacacttcatcttcaaaagattatcattccagaaatcactctagaacatctccttactcaaggcatcaaagtgaagctcattcgagagatctgtacttgagatatagagagaaaggtgattacactaatggttctcgtgcaaatcttagggatggttctgatcatgagagcaatgatcggaatgggaagtctggcagacatacgactaggacccacgggagtgaaagagaaaggagcagcagccatggtattcatgatagacatggtgacaggtacagtgacagacgtgccagccaggaaaggcatagagacgataggatatatagagacaaaatcgattcattagaagctgctcctaggcacagagaaagaagcaggagtcatagtagatcggatccaagggaaaatacacgtcttcgtgatcaaagcagggagagggaaagacggagtggtagttcaaggcatagggatcatgacagcaagagggatacaagtaaagatcggcatagagaatctgacagggttaacagtgcacatgaaagggatagagggagagaggctagggacagggaatggcatagggtcaagggaagtgaaactcatagagctaaggaaggacgggacaaagttagcgataatgataggcacagggattcaacacgctcaaaatatagcgtgtctgatggttacaaagagaggacaagatctggggagaaaggtagagatgctgaccataaaaaccggaagtttgaagaaatgaaggaaaattctctcaaggaggaagatgaagaggagtaccaagagaaaatagaacagcagttagcaatgcaggaggaagacgaccctgaaaaaatcaaagaggaagcaaggaggaggaaagaagctatcatggcaaagtacaggcagcagcaatcgcagaaagaggatatggaatctaaaccaagtggcaatgatgaagaagtaagagcaatggatggaaacgaagctatacatcagaaagatgatatcgatagcagctttatgggcaatgtcgaagctgaaaataagcatgattcttcagaggtatttgatggcaagacaggctttaatgtgggaaggtctcctgctcacaattatgcttcaactagcacgggagcattcactgatgagaggacaataggtgtttcaggtcttggagagggttctcccaagagtgagagatcagcagacatgttttgtgatgacattttcggagaatcacccaccggaattagaaaattgggaaaggatgatggtttgcatattgagagaaatgctcttcatgacaactgggatgatgcagatgggtactacacttatcggttcggagaattgctggatggccgttatgaaatcatagcagcacatgggaagggtgtgttctcaacagttgtgcgggcaaaagatcttaaagcgagtaaggatgatcctgaagaagttgccatcaaaattattcgcaacaatgagacaatgtacaaggctggtaagcaagaggtttcaatattggaaaaacttgcaagtgcggaccgtgaggacaaacgccactgcgtgcggtttatttctagtttcatgtaccggaaccatctttgcttagtttttgaatctctcaatatgaatcttcgtgaggttttaaagaaatttggtcgtaatattgggcttaaactgactgcggtgagggcatattcaaagcagcttttcatcgccctgaagcacctgaagaactgcaaagttttgcactgtgatataaaaccagataatatgctggtgaatgaggctaagaatgtgctcaaggtatgtgattttggcaacgctatgcttgctggtatgaatgaagttacgccttatcttgtcagccgtttctatcgggcacctgagatcgttcttgggttagcctatgatcaccctttagacatgtggtcagttggttgctgtctatatgagctttataccgggaaagtcttatttcctggtccatcaaacaatgccatgcttcggcttcatatggaattgaagggtccattccctaagaagatgcttcgaaagggtgcctttactatgcaacacttcgatcaagatctcaattttcatgctaccgaggaggatcctgtgacaaaaacggctgtgagaaggttaattttgaacattaaaccaaaggatgttggttctttgtttccgaactttcctggcgaggatccaaaaatgctatccagttttaaggatcttcttgataaaatatttacattagatccagaaaagaggataactgtatcgcaagcacttagccatccatttatcactggcaagtgacacaagatgacgattcctcttgaccttgaacttagcatcttcactgtaaaatacattttgggttcctcttgtctaatcatcaacgtttctgtcttgtgtcctgggagctctgagaaaaagtacatggatgaagcacggaacttcggaagagatggctatctgcagaccttgttgcatgcacttatcatttggatatattctgttgcttgattctgccagggcctctgctatgtgcacattttatatgcttaagggccaacataagaagataaacactggtgggaagctgaaattttactgtgtaattagtattcaagtgcaggagagatgcgtatcatttcattgagtaaagaggctacagggaaagaaatccaacatagcccgcccctcctccctctaagcacacaagacctgaaaggttctcagcctgttagcaccatggaatgctcttatttgtgattgcctgcagcaccgccatcataacacttgcaatgatgccattaaaaagacatcatactgatgtttccagatctctcaagccaccaagatagtgagttcaggcctttcttgctatatcatttggcacttgtcagcctagctcaaaccggcttgataacttattgatgataggttgaggcgcaatggaaataatccaagcctgccagattggtaaccattctttagactgccatttagtaagtcaggttgaacctattaccatctataaggacttgttcggttagctctcaatccatgtggattgagtgggattggatgggtttgaatcccaaacaagtcaaacttcttctcaattttttccaatcccatccaatccatatgtattaggaataaccgaacaagccctaagtgggcatgcaaatggcattgtgttggattggaccattgtaaacggtttctcgtgttggatgcaagcattctgtagttgttttgagttgttttttattatctgtagtacttgctgggtaaatctaaagaactggatttgtgtca

SEQ ID NO: 211463 - DNA, 4228 bp, Zea Mays
gcgcaaacaagttcgcatcgccatctcgctcgcagggaggagaggggagtctctaaccctaaccctacccgcccctgtcgccatagccatggctgccggcggagagctctccccctcccccgtgccccccgcatcccccatcaagcattctcgctcacccgacgatgcccagcccgacgcatccccgaagcgtcgcaagcgccaccatcaccgccgccaccaccaccaccgtcggcaccgtcacgccgattccccggtacccgtggcagccgacgaagaggtagaggagggggagatactcgaagatgccaccgccgcctctgccatggaggtcgatgctgagtccgccgccccagaggctttccttgctccggagcactttggtaatggtgctgatacagactcaaacacagatgcaaccaagatgcaagctcctgctctgcctacccttccatcctcagaagatggaaggaggtcacttcatgatgcccctgagtctgaaagaggagatattctttcaagtgatgttgaggacaacaaaggacatgaacgaaggcaaagacaaaaccgttctaaatctccaaagtctagaagggagaaggaaaggaggcacaaagatgaccatcacacttcatcttcaaaagattatcattccagaaatcactctagaacatctccttactcaaggcatcaaagtgaagctcattcgagagatctgtacttgagatatagagagaaaggtgattacactaatggttctcgtgcaaatcttagggatggttctgatcatgagagcaatgatcggaatgggaagtctggcagacatacgactaggacccacgggagtgaaagagaaaggagcagcagccatggtattcatgatagacatggtgacaggtacagtgacagacgtgccagccaggaaaggcatagagacgataggatatatagagacaaaatcgattcattagaagctgctcctaggcacagagaaagaagcaggagtcatagtagatcggatccaagggaaaatacacgtcttcgtgatcaaagcagggagagggaaagacggagtggtagttcaaggcatagggatcatgacagcaagagggatacaagtaaagatcggcatagagaatctgacagggttaacagtgcacatgaaagggatagagggagagaggctagggacagggaatggcatagggtcaagggaagtgaaactcatagagctaaggaaggacgggacaaagttagcgataatgataggcacagggattcaacacgctcaaaatatagcgtgtctgatggttacaaagagaggacaagatctggggagaaaggtagagatgctgaccataaaaaccggaagtttgaagaaatgaaggaaaattctctcaaggaggaagatgaagaggagtaccaagagaaaatagaacagcagttagcaatgcaggaggaagacgaccctgaaaaaatcaaagaggaagcaaggaggaggaaagaagctatcatggcaaagtacaggcagcagcaatcgcagaaagaggatatggaatctaaaccaagtggcaatgatgaagaagtaagagcaatggatggaaacgaagctatacatcagaaagatgatatcgatagcagctttatgggcaatgtcgaagctgaaaataagcatgattcttcagaggtatttgatggcaagacaggctttaatgtgggaaggtctcctgctcacaattatgcttcaactagcacgggagcattcactgatgagaggacaataggtgtttcaggtcttggagagggttctcccaagagtgagagatcagcagacatgttttgtgatgacattttcggagaatcacccaccggaattagaaaattgggaaaggatgatggtttgcatattgagagaaatgctcttcatgacaactgggatgatgcagatgggtactacacttatcggttcggagaattgctggatggccgttatgaaatcatagcagcacatgggaagggtgtgttctcaacagttgtgcgggcaaaagatcttaaagcgagtaaggatgatcctgaagaagttgccatcaaaattattcgcaacaatgagacaatgtacaaggctggtaagcaagaggtttcaatattggaaaaacttgcaagtgcggaccgtgaggacaaacgccactgcgtgcggtttatttctagtttcatcttttcatcgccctgaagcacctgaagaactgcaaagttttgcactgtgatataaaaccagataatatgctggtgaatgaggctaagaatgtgctcaaggtatgtgattttggcaacgctatgcttgctggtatgaatgaagttacgccttatcttgtcagccgtttctatcgggcacctgagatcgttcttgggttagcctatgatcaccctttagacatgtggtcagttggttgctgtctatatgagctttataccgggaaagtcttatttcctggtccatcaaacaatgccatgcttcggcttcatatggaattgaagggtccattccctaagaagatgcttcgaaagggtgcctttactatgcaacacttcgatcaagatctcaattttcatgctaccgaggaggatcctgtgacaaaaacggctgtgagaaggttaattttgaacattaaaccaaaggatgttggttctttgtttccgaactttcctggcgaggatccaaaaatgctatccagttttaaggatcttcttgataaaatatttacattagatccagaaaagaggataactgtatcgcaagcacttagccatccatttatcactggcaagtgacacaagatgacgattcctcttgaccttgaacttagcatcttcactgtaaaatacattttgggttcctcttgtctaatcatcaacgtttctgtcttgtgtcctgggagctctgagaaaaagtacatggatgaagcacggaacttcggaagagatggctatctgcagaccttgttgcatgcacttatcatttggatatattctgttgcttgattctgccagggcctctgctatgtgcacattttatatgcttaagggccaacataagaagagttttcacctaatagttgattatgggttggtacatcaaggctgattcagttcaattttagcaacctttactgtttattaggtgcatttccaatattttgtgttttggttagtaatttcttttgccagtttcatcaaacattgatcttctaaacaatttgtttgttttttgtgtgcctgccaaacttcttcatattaatgggttatgagattcaagtactatatgctttacatgaaagctgtattctctaccattcagcgaaatgtgcgaaacatgagaaacatttttgtcttgtgtaacaatttgagagctgattattacattgactgctagttataaaaccgtgggcttattacttttactttgtatctagatttgctgcatgtagataaacactggtgggaagctgaaattttactgtgtaattagtattcaagtgcaggagagatgcgtatcatttcattgagtaaagaggctacagggaaagaaatccaacatagcccgcccctcctccctctaagcacacaagacctgaaaggttctcagcctgttagcaccatggaatgctcttatttgtgattgcctgcagcaccgccatcataacacttgcaatgatgccattaaaaagacatcatactgatgtttccagatctctcaagccaccaagatagtgagttcaggcctttcttgctatatcatttggcacttgtcagcctagctcaaaccggcttgataacttattgatgataggttgaggcgcaatggaaataatccaagcctgccagattggtaaccattctttagactgccatttagtaagtcaggttgaacctattaccatctataaggacttgttcggttagctctcaatccatgtggattgagtgggattggatgggtttgaatcccaaacaagtcaaacttcttctcaattttttccaatcccatccaatccatatgtattaggaataaccgaacaagccctaagtgggcatgcaaatggcattgtgttggattggaccattgtaaacggtttctcgtgttggatgcaagcattctgtagttgttttgagttgttttttattatctgtagtacttgctgggtaaatctaaagaactggatttgtgtca

SEQ ID NO: 211464 - DNA, 4238 bp, Zea Mays
gcgcaaacaagttcgcatcgccatctcgctcgcagggaggagaggggagtctctaaccctaaccctacccgcccctgtcgccatagccatggctgccggcggagagctctccccctcccccgtgccccccgcatcccccatcaagcattctcgctcacccgacgatgcccagcccgacgcatccccgaagcgtcgcaagcgccaccatcaccgccgccaccaccaccaccgtcggcaccgtcacgccgattccccggtacccgtggcagccgacgaagaggtagaggagggggagatactcgaagatgccaccgccgcctctgccatggaggtcgatgctgagtccgccgccccagaggctttccttgctccggagcactttggtaatggtgctgatacagactcaaacacagatgcaaccaagatgcaagctcctgctctgcctacccttccatcctcagaagatggaaggaggtcacttcatgatgcccctgagtctgaaagaggagatattctttcaagtgatgttgaggacaacaaaggacatgaacgaaggcaaagacaaaaccgttctaaatctccaaagtctagaagggagaaggaaaggaggcacaaagatgaccatcacacttcatcttcaaaagattatcattccagaaatcactctagaacatctccttactcaaggcatcaaagtgaagctcattcgagagatctgtacttgagatatagagagaaaggtgattacactaatggttctcgtgcaaatcttagggatggttctgatcatgagagcaatgatcggaatgggaagtctggcagacatacgactaggacccacgggagtgaaagagaaaggagcagcagccatggtattcatgatagacatggtgacaggtacagtgacagacgtgccagccaggaaaggcatagagacgataggatatatagagacaaaatcgattcattagaagctgctcctaggcacagagaaagaagcaggagtcatagtagatcggatccaagggaaaatacacgtcttcgtgatcaaagcagggagagggaaagacggagtggtagttcaaggcatagggatcatgacagcaagagggatacaagtaaagatcggcatagagaatctgacagggttaacagtgcacatgaaagggatagagggagagaggctagggacagggaatggcatagggtcaagggaagtgaaactcatagagctaaggaaggacgggacaaagttagcgataatgataggcacagggattcaacacgctcaaaatatagcgtgtctgatggttacaaagagaggacaagatctggggagaaaggtagagatgctgaccataaaaaccggaagtttgaagaaatgaaggaaaattctctcaaggaggaagatgaagaggagtaccaagagaaaatagaacagcagttagcaatgcaggaggaagacgaccctgaaaaaatcaaagaggaagcaaggaggaggaaagaagctatcatggcaaagtacaggcagcagcaatcgcagaaagaggatatggaatctaaaccaagtggcaatgatgaagaagtaagagcaatggatggaaacgaagctatacatcagaaagatgatatcgatagcagctttatgggcaatgtcgaagctgaaaataagcatgattcttcagaggtatttgatggcaagacaggctttaatgtgggaaggtctcctgctcacaattatgcttcaactagcacgggagcattcactgatgagaggacaataggtgtttcaggtcttggagagggttctcccaagagtgagagatcagcagacatgttttgtgatgacattttcggagaatcacccaccggaattagaaaattgggaaaggatgatggtttgcatattgagagaaatgctcttcatgacaactgggatgatgcagatgggtactacacttatcggttcggagaattgctggatggccgttatgaaatcatagcagcacatgggaagggtgtgttctcaacagttgtgcgggcaaaagatcttaaagcgagtaaggatgatcctgaagaagttgccatcaaaattattcgcaacaatgagacaatgtacaaggctggtaagcaagaggtttcaatattggaaaaacttgcaagtgcggaccgtgaggacaaacgccactgcgtgcggtttatttctagtttcatcttttcatcgccctgaagcacctgaagaactgcaaagttttgcactgtgatataaaaccagataatatgctggtgaatgaggctaagaatgtgctcaaggtatgtgattttggcaacgctatgcttgctggtatgaatgaagttacgccttatcttgtcagccgtttctatcgggcacctgagatcgttcttgggttagcctatgatcaccctttagacatgtggtcagttggttgctgtctatatgagctttataccgggaaagtcttatttcctggtccatcaaacaatgccatgcttcggcttcatatggaattgaagggtccattccctaagaagatgcttcgaaagggtgcctttactatgcaacacttcgatcaagatctcaattttcatgctaccgaggaggatcctgtgacaaaaacggctgtgagaaggttaattttgaacattaaaccaaaggatgttggttctttgtttccgaactttcctggcgaggatccaaaaatgctatccagttttaaggatcttcttgataaaatatttacattagatccagaaaagaggataactgtatcgcaagcacttagccatccatttatcactggcaagtgacacaagatgacgattcctcttgaccttgaacttagcatcttcactgtaaaatacattttgggttcctcttgtctaatcatcaacgtttctgtcttgtgtcctgggagctctgagaaaaagtacatggatgaagcacggaacttcggaagagatggctatctgcagaccttgttgcatgcacttatcatttggatatattctgttgcttgattctgccagggcctctgctatgtgcacattttatatgcttaagggccaacataagaaggtcctgggatggaggtcgctggaccctctactcacttgccatggtaaatcctctcaactctggatgtcttccatttttttcttattaaagagttttcacctaatagttgattatgggttggtacatcaaggctgattcagttcaattttagcaacctttactgtttattaggtgcatttccaatattttgtgttttggttagtaatttcttttgccagtttcatcaaacattgatcttctaaacaatttgtttgttttttgtgtgcctgccaaacttcttcatattaatgggttatgagattcaagtactatatgctttacatgaaagctgtattctctaccattcagcgaaatgtgcgaaacatgagaaacatttttgtcttgtgtaacaatttgagagctgattattacattgactgctagttataaaaccgtgggcttattacttttactttgtatctagatttgctgcatgtagataaacactggtgggaagctgaaattttactgtgtaattagtattcaagtgcaggagagatgcgtatcatttcattgagtaaagaggctacagggaaagaaatccaacatagcccgcccctcctccctctaagcacacaagacctgaaaggttctcagcctgttagcaccatggaatgctcttatttgtgattgcctgcagcaccgccatcataacacttgcaatgatgccattaaaaagacatcatactgatgtttccagatctctcaagccaccaagatagttgaggcgcaatggaaataatccaagcctgccagattggtaaccattctttagactgccatttagtaagtcaggttgaacctattaccatctataaggacttgttcggttagctctcaatccatgtggattgagtgggattggatgggtttgaatcccaaacaagtcaaacttcttctcaattttttccaatcccatccaatccatatgtattaggaataaccgaacaagccctaagtgggcatgcaaatggcattgtgttggattggaccattgtaaacggtttctcgtgttggatgcaagcattctgtagttgttttgagttgttttttattatctgtagtacttgctgggtaaatctaaagaactggatttgtgtca

SEQ ID NO: 211465 - DNA, 3907 bp, Zea Mays
gcgcaaacaagttcgcatcgccatctcgctcgcagggaggagaggggagtctctaaccctaaccctacccgcccctgtcgccatagccatggctgccggcggagagctctccccctcccccgtgccccccgcatcccccatcaagcattctcgctcacccgacgatgcccagcccgacgcatccccgaagcgtcgcaagcgccaccatcaccgccgccaccaccaccaccgtcggcaccgtcacgccgattccccggtacccgtggcagccgacgaagaggtagaggagggggagatactcgaagatgccaccgccgcctctgccatggaggtcgatgctgagtccgccgccccagaggctttccttgctccggagcactttggtaatggtgctgatacagactcaaacacagatgcaaccaagatgcaagctcctgctctgcctacccttccatcctcagaagatggaaggaggtcacttcatgatgcccctgagtctgaaagaggagatattctttcaagtgatgttgaggacaacaaaggacatgaacgaaggcaaagacaaaaccgttctaaatctccaaagtctagaagggagaaggaaaggaggcacaaagatgaccatcacacttcatcttcaaaagattatcattccagaaatcactctagaacatctccttactcaaggcatcaaagtgaagctcattcgagagatctgtacttgagatatagagagaaaggtgattacactaatggttctcgtgcaaatcttagggatggttctgatcatgagagcaatgatcggaatgggaagtctggcagacatacgactaggacccacgggagtgaaagagaaaggagcagcagccatggtattcatgatagacatggtgacaggtacagtgacagacgtgccagccaggaaaggcatagagacgataggatatatagagacaaaatcgattcattagaagctgctcctaggcacagagaaagaagcaggagtcatagtagatcggatccaagggaaaatacacgtcttcgtgatcaaagcagggagagggaaagacggagtggtagttcaaggcatagggatcatgacagcaagagggatacaagtaaagatcggcatagagaatctgacagggttaacagtgcacatgaaagggatagagggagagaggctagggacagggaatggcatagggtcaagggaagtgaaactcatagagctaaggaaggacgggacaaagttagcgataatgataggcacagggattcaacacgctcaaaatatagcgtgtctgatggttacaaagagaggacaagatctggggagaaaggtagagatgctgaccataaaaaccggaagtttgaagaaatgaaggaaaattctctcaaggaggaagatgaagaggagtaccaagagaaaatagaacagcagttagcaatgcaggaggaagacgaccctgaaaaaatcaaagaggaagcaaggaggaggaaagaagctatcatggcaaagtacaggcagcagcaatcgcagaaagaggatatggaatctaaaccaagtggcaatgatgaagaagtaagagcaatggatggaaacgaagctatacatcagaaagatgatatcgatagcagctttatgggcaatgtcgaagctgaaaataagcatgattcttcagaggtatttgatggcaagacaggctttaatgtgggaaggtctcctgctcacaattatgcttcaactagcacgggagcattcactgatgagaggacaataggtgtttcaggtcttggagagggttctcccaagagtgagagatcagcagacatgttttgtgatgacattttcggagaatcacccaccggaattagaaaattgggaaaggatgatggtttgcatattgagagaaatgctcttcatgacaactgggatgatgcagatgggtactacacttatcggttcggagaattgctggatggccgttatgaaatcatagcagcacatgggaagggtgtgttctcaacagttgtgcgggcaaaagatcttaaagcgagtaaggatgatcctgaagaagttgccatcaaaattattcgcaacaatgagacaatgtacaaggctggtaagcaagaggtttcaatattggaaaaacttgcaagtgcggaccgtgaggacaaacgccactgcgtgcggtttatttctagtttcatgtaccggaaccatctttgcttagtttttgaatctctcaatatgaatcttcgtgaggttttaaagaaatttggtcgtaatattgggcttaaactgactgcggtgagggcatattcaaagcagcttttcatcgccctgaagcacctgaagaactgcaaagttttgcactgtgatataaaaccagataatatgctggtgaatgaggctaagaatgtgctcaaggtatgtgattttggcaacgctatgcttgctggtatgaatgaagttacgccttatcttgtcagccgtttctatcgggcacctgagatcgttcttgggttagcctatgatcaccctttagacatgtggtcagttggttgctgtctatatgagctttataccgggaaagtcttatttcctggtccatcaaacaatgccatgcttcggcttcatatggaattgaagggtccattccctaagaagatgcttcgaaagggtgcctttactatgcaacacttcgatcaagatctcaattttcatgctaccgaggaggatcctgtgacaaaaacggctgtgagaaggttaattttgaacattaaaccaaaggatgttggttctttgtttccgaactttcctggcgaggatccaaaaatgctatccagttttaaggatcttcttgataaaatatttacattagatccagaaaagaggataactgtatcgcaagcacttagccatccatttatcactggcaagtgacacaagatgacgattcctcttgaccttgaacttagcatcttcactgtaaaatacattttgggttcctcttgtctaatcatcaacgtttctgtcttgtgtcctgggagctctgagaaaaagtacatggatgaagcacggaacttcggaagagatggctatctgcagaccttgttgcatgcacttatcatttggatatattctgttgcttgattctgccagggcctctgctatgtgcacattttatatgcttaagggccaacataagaaggagagatgcgtatcatttcattgagtaaagaggctacagggaaagaaatccaacatagcccgcccctcctccctctaagcacacaagacctgaaaggttctcagcctgttagcaccatggaatgctcttatttgtgattgcctgcagcaccgccatcataacacttgcaatgatgccattaaaaagacatcatactgatgtttccagatctctcaagccaccaagatagtgagttcaggcctttcttgctatatcatttggcacttgtcagcctagctcaaaccggcttgataacttattgatgataggttgaggcgcaatggaaataatccaagcctgccagattggtaaccattctttagactgccatttagtaagtcaggttgaacctattaccatctataaggacttgttcggttagctctcaatccatgtggattgagtgggattggatgggtttgaatcccaaacaagtcaaacttcttctcaattttttccaatcccatccaatccatatgtattaggaataaccgaacaagccctaagtgggcatgcaaatggcattgtgttggattggaccattgtaaacggtttctcgtgttggatgcaagcattctgtagttgttttgagttgttttttattatctgtagtacttgctgggtaaatctaaagaactggatttgtgtca

SEQ ID NO: 211466 - DNA, 3749 bp, Zea Mays
gcgcaaacaagttcgcatcgccatctcgctcgcagggaggagaggggagtctctaaccctaaccctacccgcccctgtcgccatagccatggctgccggcggagagctctccccctcccccgtgccccccgcatcccccatcaagcattctcgctcacccgacgatgcccagcccgacgcatccccgaagcgtcgcaagcgccaccatcaccgccgccaccaccaccaccgtcggcaccgtcacgccgattccccggtacccgtggcagccgacgaagaggtagaggagggggagatactcgaagatgccaccgccgcctctgccatggaggtcgatgctgagtccgccgccccagaggctttccttgctccggagcactttggtaatggtgctgatacagactcaaacacagatgcaaccaagatgcaagctcctgctctgcctacccttccatcctcagaagatggaaggaggtcacttcatgatgcccctgagtctgaaagaggagatattctttcaagtgatgttgaggacaacaaaggacatgaacgaaggcaaagacaaaaccgttctaaatctccaaagtctagaagggagaaggaaaggaggcacaaagatgaccatcacacttcatcttcaaaagattatcattccagaaatcactctagaacatctccttactcaaggcatcaaagtgaagctcattcgagagatctgtacttgagatatagagagaaaggtgattacactaatggttctcgtgcaaatcttagggatggttctgatcatgagagcaatgatcggaatgggaagtctggcagacatacgactaggacccacgggagtgaaagagaaaggagcagcagccatggtattcatgatagacatggtgacaggtacagtgacagacgtgccagccaggaaaggcatagagacgataggatatatagagacaaaatcgattcattagaagctgctcctaggcacagagaaagaagcaggagtcatagtagatcggatccaagggaaaatacacgtcttcgtgatcaaagcagggagagggaaagacggagtggtagttcaaggcatagggatcatgacagcaagagggatacaagtaaagatcggcatagagaatctgacagggttaacagtgcacatgaaagggatagagggagagaggctagggacagggaatggcatagggtcaagggaagtgaaactcatagagctaaggaaggacgggacaaagttagcgataatgataggcacagggattcaacacgctcaaaatatagcgtgtctgatggttacaaagagaggacaagatctggggagaaaggtagagatgctgaccataaaaaccggaagtttgaagaaatgaaggaaaattctctcaaggaggaagatgaagaggagtaccaagagaaaatagaacagcagttagcaatgcaggaggaagacgaccctgaaaaaatcaaagaggaagcaaggaggaggaaagaagctatcatggcaaagtacaggcagcagcaatcgcagaaagaggatatggaatctaaaccaagtggcaatgatgaagaagtaagagcaatggatggaaacgaagctatacatcagaaagatgatatcgatagcagctttatgggcaatgtcgaagctgaaaataagcatgattcttcagaggtatttgatggcaagacaggctttaatgtgggaaggtctcctgctcacaattatgcttcaactagcacgggagcattcactgatgagaggacaataggtgtttcaggtcttggagagggttctcccaagagtgagagatcagcagacatgttttgtgatgacattttcggagaatcacccaccggaattagaaaattgggaaaggatgatggtttgcatattgagagaaatgctcttcatgacaactgggatgatgcagatgggtactacacttatcggttcggagaattgctggatggccgttatgaaatcatagcagcacatgggaagggtgtgttctcaacagttgtgcgggcaaaagatcttaaagcgagtaaggatgatcctgaagaagttgccatcaaaattattcgcaacaatgagacaatgtacaaggctggtaagcaagaggtttcaatattggaaaaacttgcaagtgcggaccgtgaggacaaacgccactgcgtgcggtttatttctagtttcatcttttcatcgccctgaagcacctgaagaactgcaaagttttgcactgtgatataaaaccagataatatgctggtgaatgaggctaagaatgtgctcaaggtatgtgattttggcaacgctatgcttgctggtatgaatgaagttacgccttatcttgtcagccgtttctatcgggcacctgagatcgttcttgggttagcctatgatcaccctttagacatgtggtcagttggttgctgtctatatgagctttataccgggaaagtcttatttcctggtccatcaaacaatgccatgcttcggcttcatatggaattgaagggtccattccctaagaagatgcttcgaaagggtgcctttactatgcaacacttcgatcaagatctcaattttcatgctaccgaggaggatcctgtgacaaaaacggctgtgagaaggttaattttgaacattaaaccaaaggatgttggttctttgtttccgaactttcctggcgaggatccaaaaatgctatccagttttaaggatcttcttgataaaatatttacattagatccagaaaagaggataactgtatcgcaagcacttagccatccatttatcactggcaagtgacacaagatgacgattcctcttgaccttgaacttagcatcttcactgtaaaatacattttgggttcctcttgtctaatcatcaacgtttctgtcttgtgtcctgggagctctgagaaaaagtacatggatgaagcacggaacttcggaagagatggctatctgcagaccttgttgcatgcacttatcatttggatatattctgttgcttgattctgccagggcctctgctatgtgcacattttatatgcttaagggccaacataagaaggtcctgggatggaggtcgctggaccctctactcacttgccatggagagatgcgtatcatttcattgagtaaagaggctacagggaaagaaatccaacatagcccgcccctcctccctctaagcacacaagacctgaaaggttctcagcctgttagcaccatggaatgctcttatttgtgattgcctgcagcaccgccatcataacacttgcaatgatgccattaaaaagacatcatactgatgtttccagatctctcaagccaccaagatagttgaggcgcaatggaaataatccaagcctgccagattggtaaccattctttagactgccatttagtaagtcaggttgaacctattaccatctataaggacttgttcggttagctctcaatccatgtggattgagtgggattggatgggtttgaatcccaaacaagtcaaacttcttctcaattttttccaatcccatccaatccatatgtattaggaataaccgaacaagccctaagtgggcatgcaaatggcattgtgttggattggaccattgtaaacggtttctcgtgttggatgcaagcattctgtagttgttttgagttgttttttattatctgtagtacttgctgggtaaatctaaagaactggatttgtgtca

SEQ ID NO: 211467 - DNA, 4019 bp, Zea Mays
gcgcaaacaagttcgcatcgccatctcgctcgcagggaggagaggggagtctctaaccctaaccctacccgcccctgtcgccatagccatggctgccggcggagagctctccccctcccccgtgccccccgcatcccccatcaagcattctcgctcacccgacgatgcccagcccgacgcatccccgaagcgtcgcaagcgccaccatcaccgccgccaccaccaccaccgtcggcaccgtcacgccgattccccggtacccgtggcagccgacgaagaggtagaggagggggagatactcgaagatgccaccgccgcctctgccatggaggtcgatgctgagtccgccgccccagaggctttccttgctccggagcactttggtaatggtgctgatacagactcaaacacagatgcaaccaagatgcaagctcctgctctgcctacccttccatcctcagaagatggaaggaggtcacttcatgatgcccctgagtctgaaagaggagatattctttcaagtgatgttgaggacaacaaaggacatgaacgaaggcaaagacaaaaccgttctaaatctccaaagtctagaagggagaaggaaaggaggcacaaagatgaccatcacacttcatcttcaaaagattatcattccagaaatcactctagaacatctccttactcaaggcatcaaagtgaagctcattcgagagatctgtacttgagatatagagagaaaggtgattacactaatggttctcgtgcaaatcttagggatggttctgatcatgagagcaatgatcggaatgggaagtctggcagacatacgactaggacccacgggagtgaaagagaaaggagcagcagccatggtattcatgatagacatggtgacaggtacagtgacagacgtgccagccaggaaaggcatagagacgataggatatatagagacaaaatcgattcattagaagctgctcctaggcacagagaaagaagcaggagtcatagtagatcggatccaagggaaaatacacgtcttcgtgatcaaagcagggagagggaaagacggagtggtagttcaaggcatagggatcatgacagcaagagggatacaagtaaagatcggcatagagaatctgacagggttaacagtgcacatgaaagggatagagggagagaggctagggacagggaatggcatagggtcaagggaagtgaaactcatagagctaaggaaggacgggacaaagttagcgataatgataggcacagggattcaacacgctcaaaatatagcgtgtctgatggttacaaagagaggacaagatctggggagaaaggtagagatgctgaccataaaaaccggaagtttgaagaaatgaaggaaaattctctcaaggaggaagatgaagaggagtaccaagagaaaatagaacagcagttagcaatgcaggaggaagacgaccctgaaaaaatcaaagaggaagcaaggaggaggaaagaagctatcatggcaaagtacaggcagcagcaatcgcagaaagaggatatggaatctaaaccaagtggcaatgatgaagaagtaagagcaatggatggaaacgaagctatacatcagaaagatgatatcgatagcagctttatgggcaatgtcgaagctgaaaataagcatgattcttcagaggtatttgatggcaagacaggctttaatgtgggaaggtctcctgctcacaattatgcttcaactagcacgggagcattcactgatgagaggacaataggtgtttcaggtcttggagagggttctcccaagagtgagagatcagcagacatgttttgtgatgacattttcggagaatcacccaccggaattagaaaattgggaaaggatgatggtttgcatattgagagaaatgctcttcatgacaactgggatgatgcagatgggtactacacttatcggttcggagaattgctggatggccgttatgaaatcatagcagcacatgggaagggtgtgttctcaacagttgtgcgggcaaaagatcttaaagcgagtaaggatgatcctgaagaagttgccatcaaaattattcgcaacaatgagacaatgtacaaggctggtaagcaagaggtttcaatattggaaaaacttgcaagtgcggaccgtgaggacaaacgccactgcgtgcggtttatttctagtttcatgtaccggaaccatctttgcttagtttttgaatctctcaatatgaatcttcgtgaggttttaaagaaatttggtcgtaatattgggcttaaactgactgcggtgagggcatattcaaagcagcttttcatcgccctgaagcacctgaagaactgcaaagttttgcactgtgatataaaaccagataatatgctggtgaatgaggctaagaatgtgctcaaggtatgtgattttggcaacgctatgcttgctggtatgaatgaagttacgccttatcttgtcagccgtttctatcgggcacctgagatcgttcttgggttagcctatgatcaccctttagacatgtggtcagttggttgctgtctatatgagctttataccgggaaagtcttatttcctggtccatcaaacaatgccatgcttcggcttcatatggaattgaagggtccattccctaagaagatgcttcgaaagggtgcctttactatgcaacacttcgatcaagatctcaattttcatgctaccgaggaggatcctgtgacaaaaacggctgtgagaaggttaattttgaacattaaaccaaaggatgttggttctttgtttccgaactttcctggcgaggatccaaaaatgctatccagttttaaggatcttcttgataaaatatttacattagatccagaaaagaggataactgtatcgcaagcacttagccatccatttatcactggcaagtgacacaagatgacgattcctcttgaccttgaacttagcatcttcactgtaaaatacattttgggttcctcttgtctaatcatcaacgtttctgtcttgtgtcctgggagctctgagaaaaagtacatggatgaagcacggaacttcggaagagatggctatctgcagaccttgttgcatgcacttatcatttggatatattctgttgcttgattctgccagggcctctgctatgtgcacattttatatgcttaagggccaacataagaaggtcctgggatggaggtcgctggaccctctactcacttgccatgatttgctgcatgtagataaacactggtgggaagctgaaattttactgtgtaattagtattcaagtgcaggagagatgcgtatcatttcattgagtaaagaggctacagggaaagaaatccaacatagcccgcccctcctccctctaagcacacaagacctgaaaggttctcagcctgttagcaccatggaatgctcttatttgtgattgcctgcagcaccgccatcataacacttgcaatgatgccattaaaaagacatcatactgatgtttccagatctctcaagccaccaagatagtgagttcaggcctttcttgctatatcatttggcacttgtcagcctagctcaaaccggcttgataacttattgatgataggttgaggcgcaatggaaataatccaagcctgccagattggtaaccattctttagactgccatttagtaagtcaggttgaacctattaccatctataaggacttgttcggttagctctcaatccatgtggattgagtgggattggatgggtttgaatcccaaacaagtcaaacttcttctcaattttttccaatcccatccaatccatatgtattaggaataaccgaacaagccctaagtgggcatgcaaatggcattgtgttggattggaccattgtaaacggtttctcgtgttggatgcaagcattctgtagttgttttgagttgttttttattatctgtagtacttgctgggtaaatctaaagaactggatttgtgtca

SEQ ID NO: 211468 - DNA, 3821 bp, Zea Mays
gttcaatactatgactgatttgatattagatagctctgccaccatcgactcggtcccaagcgcaaacaagttcgcatcgccatctcgctcgcagggaggagaggggagtctctaaccctaaccctacccgcccctgtcgccatagccatggctgccggcggagagctctccccctcccccgtgccccccgcatcccccatcaagcattctcgctcacccgacgatgcccagcccgacgcatccccgaagcgtcgcaagcgccaccatcaccgccgccaccaccaccaccgtcggcaccgtcacgccgattccccggtacccgtggcagccgacgaagaggtagaggagggggagatactcgaagatgccaccgccgcctctgccatggaggtcgatgctgagtccgccgccccagaggctttccttgctccggagcactttggtaatggtgctgatacagactcaaacacagatgcaaccaagatgcaagctcctgctctgcctacccttccatcctcagaagatggaaggaggtcacttcatgatgcccctgagtctgaaagaggagatattctttcaagtgatgttgaggacaacaaaggacatgaacgaaggcaaagacaaaaccgttctaaatctccaaagtctagaagggagaaggaaaggaggcacaaagatgaccatcacacttcatcttcaaaagattatcattccagaaatcactctagaacatctccttactcaaggcatcaaagtgaagctcattcgagagatctgtacttgagatatagagagaaaggtgattacactaatggttctcgtgcaaatcttagggatggttctgatcatgagagcaatgatcggaatgggaagtctggcagacatacgactaggacccacgggagtgaaagagaaaggagcagcagccatggtattcatgatagacatggtgacaggtacagtgacagacgtgccagccaggaaaggcatagagacgataggatatatagagacaaaatcgattcattagaagctgctcctaggcacagagaaagaagcaggagtcatagtagatcggatccaagggaaaatacacgtcttcgtgatcaaagcagggagagggaaagacggagtggtagttcaaggcatagggatcatgacagcaagagggatacaagtaaagatcggcatagagaatctgacagggttaacagtgcacatgaaagggatagagggagagaggctagggacagggaatggcatagggtcaagggaagtgaaactcatagagctaaggaaggacgggacaaagttagcgataatgataggcacagggattcaacacgctcaaaatatagcgtgtctgatggttacaaagagaggacaagatctggggagaaaggtagagatgctgaccataaaaaccggaagtttgaagaaatgaaggaaaattctctcaaggaggaagatgaagaggagtaccaagagaaaatagaacagcagttagcaatgcaggaggaagacgaccctgaaaaaatcaaagaggaagcaaggaggaggaaagaagctatcatggcaaagtacaggcagcagcaatcgcagaaagaggatatggaatctaaaccaagtggcaatgatgaagaagtaagagcaatggatggaaacgaagctatacatcagaaagatgatatcgatagcagctttatgggcaatgtcgaagctgaaaataagcatgattcttcagaggtatttgatggcaagacaggctttaatgtgggaaggtctcctgctcacaattatgcttcaactagcacgggagcattcactgatgagaggacaataggtgtttcaggtcttggagagggttctcccaagagtgagagatcagcagacatgttttgtgatgacattttcggagaatcacccaccggaattagaaaattgggaaaggatgatggtttgcatattgagagaaatgctcttcatgacaactgggatgatgcagatgggtactacacttatcggttcggagaattgctggatggccgttatgaaatcatagcagcacatgggaagggtgtgttctcaacagttgtgcgggcaaaagatcttaaagcgagtaaggatgatcctgaagaagttgccatcaaaattattcgcaacaatgagacaatgtacaaggctggtaagcaagaggtttcaatattggaaaaacttgcaagtgcggaccgtgaggacaaacgccactgcgtgcggtttatttctagtttcatcttttcatcgccctgaagcacctgaagaactgcaaagttttgcactgtgatataaaaccagataatatgctggtgaatgaggctaagaatgtgctcaaggtatgtgattttggcaacgctatgcttgctggtatgaatgaagttacgccttatcttgtcagccgtttctatcgggcacctgagatcgttcttgggttagcctatgatcaccctttagacatgtggtcagttggttgctgtctatatgagctttataccgggaaagtcttatttcctggtccatcaaacaatgccatgcttcggcttcatatggaattgaagggtccattccctaagaagatgcttcgaaagggtgcctttactatgcaacacttcgatcaagatctcaattttcatgctaccgaggaggatcctgtgacaaaaacggctgtgagaaggttaattttgaacattaaaccaaaggatgttggttctttgtttccgaactttcctggcgaggatccaaaaatgctatccagttttaaggatcttcttgataaaatatttacattagatccagaaaagaggataactgtatcgcaagcacttagccatccatttatcactggcaagtgacacaagatgacgattcctcttgaccttgaacttagcatcttcactgtaaaatacattttgggttcctcttgtctaatcatcaacgtttctgtcttgtgtcctgggagctctgagaaaaagtacatggatgaagcacggaacttcggaagagatggctatctgcagaccttgttgcatgcacttatcatttggatatattctgttgcttgattctgccagggcctctgctatgtgcacattttatatgcttaagggccaacataagaaggtcctgggatggaggtcgctggaccctctactcacttgccatgtattcaagtgcaggagagatgcgtatcatttcattgagtaaagaggctacagggaaagaaatccaacatagcccgcccctcctccctctaagcacacaagacctgaaaggttctcagcctgttagcaccatggaatgctcttatttgtgattgcctgcagcaccgccatcataacacttgcaatgatgccattaaaaagacatcatactgatgtttccagatctctcaagccaccaagatagttgaggcgcaatggaaataatccaagcctgccagattggtaaccattctttagactgccatttagtaagtcaggttgaacctattaccatctataaggacttgttcggttagctctcaatccatgtggattgagtgggattggatgggtttgaatcccaaacaagtcaaacttcttctcaattttttccaatcccatccaatccatatgtattaggaataaccgaacaagccctaagtgggcatgcaaatggcattgtgttggattggaccattgtaaacggtttctcgtgttggatgcaagcattctgtagttgttttgagttgttttttattatctgtagtacttgctgggtaaatctaaagaactggatttgtgtca

SEQ ID NO: 211469 - DNA, 1947 bp, Zea Mays
cacgaggcacgagctgatttaattgatcggcgttacatcatggtaggtgacttctctgaggacaaccgatctgggatcaatcactcgttgcaccggatcagcgctatccggaaccggaaagctcaaatcataggcctcacttgccgtgttggtcgagctatatctggcagtgcagagatgatccgggaccttgtggtgagtggtggttcaatattggtgattggacctcctggagttgggaaaaccactctgatcagggaaatagctagaattttggcagatgaaggtaagaaacgtgtgatcatagtggacacatctaatgaaataggaggtgatggggatgtacctcactctggcattggacgtgctaggagaatgcaagttcccaaagttactatgcagcacaacgtaatgatcgaagcagttgaaaatcacatgccggaagtaattgttatcgatgagattggtacagaacttgaggcaatggcagctaccactattgctcagagaggtgttcaactagttggaactgctcatggtgtgacaatcgagagcataattaaaaatccttgtttgcaaatgctcgttggagggattgagagtgtgactcttggtgatgaggaagcaaaaaagcggaaggtgcagaaaaccattctcgagagaaaaggacccccaacatttttatgcgctgttgagatgatatcgaaaactgaatgtcgagttcatcacaggttagatgccacagtggatgctattcttgcagggaagcctcctaagtttgaagctcgcaagatgcataataagtctaccgagtttgaaatgccgttggtgatacctgatagagagtatgaaatagaatcactgccactctatcaggaagttatggtcacgaggtcattatcatcagatggcaacttcagcgatgattttgctgcatccaggcaaacaaaaagcaagagtatgccatcagaagataattttggtgataattttgtttatacaaggaaagcaaaagggaataaacctgtgcatggaaagtctctagtccaagtatacacataccagatttcagaagctgatattttacaagtagcaacaatgatgggatttgatgatgaactagatgtaacagatgacattggagcagctgatgtgattcttgcatcgagttctgaaatgaagcagaatccttggattcataatgttgccaaataccacaagcttcccatatttgttgtcaagactaatacgatggctcaaatagttaaggctatcagaatgattgttggaagggacaacacatcatcaagtaagcagcctgaggttatggagggagagatagagattgaggatgatgctccgaaacgtaagccatctttggaggaaattgatgccttggaggaggctcgtcttgcaatcgagtacatcgttattccaggtggggagccagttgagctcctcccaagatgttcagaaatagttgctcggcagctggagctcgtagagagctaccagctacttgctgaaacctttggaagtgactccaattctaggttacagattctccccatgaaaataaccaagaggggttctagtaaagacaatggagcatcaaagcccactaaacaaaccggatcagatttgatcgtcagtgagaatggtggtggctcaagtttttctcggctgccatttctgccaaagtgatcgtctagatcttctgatcaccactgtcgaaaatgtacatcattcctctctcttgttgttcattgtacaacattgtgcagtgttgtaaatagtgtgtcgaatgttgaagaagcgaaagagcaaaagctaactgcaattgccttccattcttttgctggaataaaatccgttcatttctggtgtcagccaggtcagctcacatgctcatgtggaaaaaaattgcacgcggccgtgccgcacgag

SEQ ID NO: 211470 - DNA, 2953 bp, Zea Mays
cattggaactctctgctccgatctgctcgcggtcgcaatacgcccatcgaatcttccttcctccgattccctctcgtctaccctctccccaccactccaggccgcgcgcaccacctgttcggccaaatatcccacgccgctacataaacccgcgcgccatttcccgcctgcctccccaagctacccagctacctacctaccttccccctgcgccgtcactagcgaaccggcaccatgctccgggcgctcaacccgtccccgtcccagctccgcgcgcgtccggcgtgccgcgccgcgccgcgccggcgcccgcgcggggcctgggcgcgcccccgtgccgcggcggtcccgcagcagccgccggtgcgccggccctccggagaccggctgcgcgcgccgtcacggggcgccgccgccgccgaccagctgccggcgcctgatgttggcgcggcggcgcccggggcgcggggcgagctggaggcgttcctggagattgtgcccgcgaggatgcggcgcgggctggcgcggcaccaggagctgcgggacctcgtcgaggtcatcatggacctcggccgccgcccgatcgcgcggttcccgtccggggactgggccatctccgaccagcccgtcaccgccgatgacctccgccaggccgtcgccaaggtaggtgacttctctgaggacaaccgatctgggatcaatcactcgttgcaccggatcagcgctatccggaaccggaaagctcaaatcataggcctcacttgccgtgttggtcgagctatatctggcagtgcagagatgatccgggaccttgtggtgagtggtggttcaatattggtgattggacctcctggagttgggaaaaccactctgatcagggaaatagctagaattttggcagatgaaggtaagaaacgtgtgatcatagtggacacatctaatgaaataggaggtgatggggatgtacctcactctggcattggacgtgctaggagaatgcaagttcccaaagttactatgcagcacaacgtaatgatcgaagcagttgaaaatcacatgccggaagtaattgttatcgatgagattggtacagaacttgaggcaatggcagctaccactattgctcagagaggtgttcaactagttggaactgctcatggtgtgacaatcgagagcataattaaaaatccttgtttgcaaatgctcgttggagggattgagagtgtgactcttggtgatgaggaagcaaaaaagcggaaggtgcagaaaaccattctcgagagaaaaggacccccaacatttttatgcgctgttgagatgatatcgaaaactgaatgtcgagttcatcacaggttagatgccacagtggatgctattcttgcagggaagcctcctaagtttgaagctcgcaagatgcataataagtctaccgagtttgaaatgccgttggtgatacctgatagagagtatgaaatagaatcactgccactctatcaggaagttatggtcacgaggtcattatcatcagatggcaacttcagcgatgattttgctgcatccaggcaaacaaaaagcaagagtatgccatcagaagataattttggtgataattttgtttatacaaggaaagcaaaagggaataaacctgtgcatggaaagtctctagtccaagtatacacataccagatttcagaagctgatattttacaagtagcaacaatgatgggatttgatgatgaactagatgtaacagatgacattggagcagctgatgtgattcttgcatcgagttctgaaatgaagcagaatccttggattcataatgttgccaaataccacaagcttcccatatttgttgtcaagactaatacgatggctcaaatagttaaggctatcagaatgattgttggaagggacaacacatcatcaagtaagcagcctgaggttatggagggagagatagagattgaggatgatgctccgaaacgtaagccatctttggaggaaattgatgccttggaggtaatcacttttaccacatacttgcctctgaaagataactgaaatgattttatgttttaattgaaattttgatttgtcatttgttagtaatttgatttcccttcttgattgaacattattttctcatttatttctccttgaaccattataaaacgctgactacacggatgatcttattcatatgagtatatgacgattccatgtcaatgatgagaacgggtttttacatgctatcatcatactatgacttcggatattctgccaaaacattaaaataatgtctatgtatatctgtttcttgttccacttcatgcaaaatggagcttctaaacaccaaactagcgttgatacataacaattatgttgcactctttacacgatgcaggaggctcgtcttgcaatcgagtacatcgttattccaggtggggagccagttgagctcctcccaagatgttcagaaatagttgctcggcagctggagctcgtagagagctaccagctacttgctgaaacctttggaagtgactccaattctaggttacagattctccccatgaaaataaccaagaggggttctagtaaagacaatggagcatcaaagcccactaaacaaaccggatcagatttgatcgtcagtgagaatggtggtggctcaagtttttctcggctgccatttctgccaaagtgatcgtctagatcttctgatcaccactgtcgaaaatgtacatcattcctctctcttgttgttcattgtacaacattgtgcagtgttgtaaatagtgtgtcgaatgttgaagaagcgaaagagcaaaagctaactgcaattgccttccattcttttgctggaataaaatccgttcatttctggtgtcagccaggtcagctcacatgctcatgtggaaaaaaattgcacgcggccgtgccgcacgag

SEQ ID NO: 211471 - DNA, 2008 bp, Zea Mays
aaccaatggaaggggagcaggtaggtgacttctctgaggacaaccgatctgggatcaatcactcgttgcaccggatcagcgctatccggaaccggaaagctcaaatcataggcctcacttgccgtgttggtcgagctatatctggcagtgcagagatgatccgggaccttgtggtgagtggtggttcaatattggtgattggacctcctggagttgggaaaaccactctgatcagggaaatagctagaattttggcagatgaaggtaagaaacgtgtgatcatagtggacacatctaatgaaataggaggtgatggggatgtacctcactctggcattggacgtgctaggagaatgcaagttcccaaagttactatgcagcacaacgtaatgatcgaagcagttgaaaatcacatgccggaagtaattgttatcgatgagattggtacagaacttgaggcaatggcagctaccactattgctcagagaggtgttcaactagttggaactgctcatggtgtgacaatcgagagcataattaaaaatccttgtttgcaaatgctcgttggagggattgagagtgtgactcttggtgatgaggaagcaaaaaagcggaaggtgcagaaaaccattctcgagagaaaaggacccccaacatttttatgcgctgttgagatgatatcgaaaactgaatgtcgagttcatcacaggttagatgccacagtggatgctattcttgcagggaagcctcctaagtttgaagctcgcaagatgcataataagtctaccgagtttgaaatgccgttggtgatacctgatagagagtatgaaatagaatcactgccactctatcaggaagttatggtcacgaggtcattatcatcagatggcaacttcagcgatgattttgctgcatccaggcaaacaaaaagcaagagtatgccatcagaagataattttggtgataattttgtttatacaaggaaagcaaaagggaataaacctgtgcatggaaagtctctagtccaagtatacacataccagatttcagaagctgatattttacaagtagcaacaatgatgggatttgatgatgaactagatgtaacagatgacattggagcagctgatgtgattcttgcatcgagttctgaaatgaagcagaatccttggattcataatgttgccaaataccacaagcttcccatatttgttgtcaaggttatcacacaatacattgattgtgtgctatctactgctgattgtgcttgcattgacatacttttttatattgtaaatggcagactaatacgatggctcaaatagttaaggctatcagaatgattgttggaagggacaacacatcatcaagtaagcagcctgaggttatggagggagagatagagattgaggatgatgctccgaaacgtaagccatctttggaggaaattgatgccttggaggaggctcgtcttgcaatcgagtacatcgttattccaggtggggagccagttgagctcctcccaagatgttcagaaatagttgctcggcagctggagctcgtagagagctaccagctacttgctgaaacctttggaagtgactccaattctaggttacagattctccccatgaaaataaccaagaggggttctagtaaagacaatggagcatcaaagcccactaaacaaaccggatcagatttgatcgtcagtgagaatggtggtggctcaagtttttctcggctgccatttctgccaaagtgatcgtctagatcttctgatcaccactgtcgaaaatgtacatcattcctctctcttgttgttcattgtacaacattgtgcagtgttgtaaatagtgtgtcgaatgttgaagaagcgaaagagcaaaagctaactgcaattgccttccattcttttgctggaataaaatccgttcatttctggtgtcagccaggtcagctcacatgctcatgtggaaaaaaattgcacgcggccgtgccgcacgag

SEQ ID NO: 211472 - DNA, 2687 bp, Zea Mays
ggggcacccaccccacccgtcggtcgatagcgcagtgcgcagcggcaacgacagaggagacagacacgagtgggtgtgcgagcattcaggcgaagccgatcaccctcgcccagcccaaagggtcggcgggcaggcgaaagcaacgccccaaccacctgatccctccaccccatcgcacgccataacaaagcagagcgccacgccaccaccaccccagctcactcgtgccgtgcactcgacccgtcccccctccctccactcgatccacccgccaagacctcccattgccgccgccgagccagccagggggggagaagagaggccagccgcgtcgcggcgggcggaggaggaggacgagcgggagagccgagccgagccggccgggcaggatgttcgggcgggacccctggggcgggccgctggagatctccaacgccgactcggcgacggacgacgaccggagccgcgacctggaccgggcggcgctgatgcggcagctggacgagacgcagcagagctggctcctggccgggcccggcgaccaggccggcaagaagaagaagcggtacgtcgacctcggctgcgtcgtcgtcgaccgtaaggtcttcatgtggaccgtcggcaccatcctcggcctcggcgtcttcatcggcttcgtcatcatgatcgtcaagctcgtcccgcacaagcgccccccgccgccgccgcccgaccagtacacgcaggcgctgcacaaggcgctcatgttcttcaacgcgcagcgatccggcccgctgccgaagcacaatggcgtgagctggaggggcaactcctgcatgaaggacggcctctccgacagcaccgtccgccggagcctggtcggaggcttctacgacgcgggggacgccatcaagttcaactaccccatggcatggtccatgaccatgctcagctggagcgtgatcgagtacagggccaagtacgaggccatcggcgagctcgaccatatcagggagctcatcaagtggggaacggactacatcctcaagaccttcaattcgtctgccgacacgatagacaggatcgtcgctcaggtgggtgtaggtgacacctctaaaggcagcagtcagcctaacgaccattactgctggatgaggccagaggacatcgactacaagaggccggtcaccgagtgccactcctgctcagatctagcgtcggaaatggctgccgccctggccgcagcttccatagtgttcaagaacagcaagacctactccgacaagctcgtcaagggcgccaaggccctgtacaagttcggcaggctgcagcgtgggcgatacagccccaacggatctgaccaggccatcttctacaactccaccagctactgggacgagttcgtgtggggcggtgcgtggatgtacttcgccacggggaacaactcgtacctcaccgtcgccacagccccgggaatggcgaagcacgctggagcatactggtttggaagtccaaactacggagtgtttacctgggatgacaaacttccaggagctcaggttcttctcagcaggttgcgactcttcctaagtccagggtacccttacgaagaaatactgaggacattccacaaccaaaccgacaacgtcatgtgctcgtatttacctgtattcaattcattcaacttcaccaaaggaggattaatacagctcaaccatggaaggcctcaaccgcttcagtacgctgtcaacgcagctttccttgcttctttatacagcgactatcttgaagcggctgacacgcctgggtggtactgtggaccgaacttctacaccatagaagtcctccgcaagtttgccaggtcacagaacccattgaagatgagctacgttgtgggtttcggaaacaagtacccgaagcgccctcaccacagaggtgcgtcgatacctcataacggcgtcaagtatggatgcaaaggaggttacaaatggagggacacgaagaaggcaaaccctaacatccttgttggagcaatggtggctggccctgacaggcgtgacggctacaaagatgtccgcacgaactacaactacacagagcctacccttgcagcaaacgctggcctggttgcagcactgatttctatatctgatatcaaaaccggacggttcggcatcgacaagaacaccatcttctctgcgatccctccgatgtttccgacaccaccgccgccaccatcagcatggaaaccatagagagacagacctctgaatatccgccccccccccccccccccccccccccaaaaaaaaaagcatcaacacagggaagtggagcaaacatatgatcagttggtacagcaaaggccaggaacaggaaagcggacagcataagcttatagagcttctatttctgtaccagtgtgacagatcagtataaaatcctctgtcatacatagaccagaagttgtgtgcatcgcgtgaaagctaatttttggggtcttgttgctgtgggcattcctgctcatgtgtgaagttattttttgtagaaattgtacctttacaaattgttataggagtgacttttcatagtagtaaagcatttgtgtgacctgtacgcctgcttcgttttggtcctgttattttgtgtttaaaaatccctacttcaggggaaacatgctcactgaactctcagtctcagacattaca

SEQ ID NO: 211473 - DNA, 3190 bp, Zea Mays
acttttgcccttcgaactaaaagcgcctgcatctcaaacccgacggcgctctcttctctatcctctgtgtcccctccaccaaaaccgacgacgacgtcgctctcctccaccggtgctcggcgctctccctccaccagcggtggtccacagacgctcggcgagctccaccggcgggcgctggcggctggtcagatccgctcggcagtcatccatctggcacatcgggtagctcgcgcctccgttggcagtcccaccgccgcccggccctcccccagcgcccccggtgatccggaccgcacccgcttactcggcctaacgaccggctcctgccccgacgcagccgaagctcccagcgtcctcctgcaggccgagctgaaggttcagcgcgccggtggagttagacgacgaaactccgtcacgtcatacctctccgcctcccgtcttccagacgtctctaatcggggtcccagcgtctcggagaagaggagcagcacggcacggcagctgtggcgaggaaggctcctgtcccatcccaacccagttagcagccgcccaaggaggaggagatccaatcggcgtgcgggcgtccgcggtccatccatcgatccaattccaatctgcaggcatctcgagtgcaccgtcggccgcaccagcaggcagcatcccgacaccgccgttccccagcagacagcagcaggtcgccgtcgttccccagcaggcagcaacaggtcgccagcgctagtcctcgacggacgacgaccagcatcagccgccgccccagtcgaccagcatccacggcggcacgagcccacgaccagcagatcaacgcggtggcagatcaacgagcccacgactagtcagaaaatttttacagcagcatatccaccggatacccgatacccgacgggtacccggtgggcacgggtatgggtccatttttttacccgattggcttggtgcgtatggatatttgtaaagggtcgagtatgatatcgggtcgggtattatacccgaacacaacccgacccgctgccatccctaaacgcagctattctgtcaattccttaaatagagcagcactgagcatatccggcggagaatttagttcagtgccggtttccatttcacttcatatctgggcttaatcttgtgtcagcttacctacacattgcaattgttgtcacatagcttatgaatgaagcacggaaatgatcgagttatattagaactatctacaccgacgtattgtgttgaatttaagatgccatcgatgccttttaaatgtgtatagtgctttcgacagccttgtgtttgcatgccgaatttcttacaagtatcatacatgtataccgaactgtgaatttaggttatactcaaactgcacacagtagcatccttctggtacagtaacaaaggatttggaacccagccctctgttctccaccaccgcttcgaagatgccgcaggtaatggtggtggcacggaacttcatggatatggtggctgctcttcctgcgggcaagcttgatatgctctatgactcagcctttatctgtgaggcagtactcaggtcacttcccccactggcaaagaagtatgcactgcagatgttgtatgtgctggcaccagtgaccgctgcagcaatggaagagtgggtgcttgatgaatatgctgccaagcataaggttgccattgataagcttctacagctcagggtctttgttgaagtgcgcgacagacgacgggacgtgagctacaagatgaatcagaagttccagggaaacatgcagaagtatttggttgatggtggaagtttaccaagggaacctttaccattaagtgtcactggtcgattgcccacaccagcagatctggaagcctatgctcttgatcaatgggagtgcttcttgttgcaattgatcaattcatctcaagtcgaaaaagggtcaagttttagctcctccatgatgaagacgtttcagcgtggtcttctgagttcaagggatggtgaagcttcaaagttgactgaaaatggcttccaatttcttctgatggaaacaaatgcacaactttggtacataatgagagaatacatttcatctgctgaggaacgtggagtggaccctacggagctgatatcatttctcttggaacttagctttcataaattgggagcggcttatagcttgaacactctgactgatgtccagaggattgccatcagggatcttgcagaattaggactagtcaaacagcagcagggtcgaaaggatagctggttcattcctacccaattggctactaatctttcagcaagcttgtcagattcgtcatctaacaaagagggatttgtggttgtggagacaaactttcgaatgtatgcatactctacttccaagttgcactgtgaaattctacgcctttttgcaagggtggagtatcaacttccaaacctcatcgtaggagctgttacaaaagaaagtatctatggtgcttttgaaaatgggataactgctgagcagataatttcatttcttaggcaaaatgctcaccctcgtgttgctgacaagatacccgctgtcccggagaatgtcacagatcagattaggttgtgggaaactgacctcaacagggttgagatgattccatcgcatttgtacgaagattttcctagcaaggaatggtttgaacaatgctgtgattatgcaagggataatgggtacttgctgtgggaggaccccaagagaatgagactaattgtacgaggggagttccaccccgaaatgagggagttccttcgcaggcaaagatgaggaacgaccttgtacttgacggaccatgctatgcttctttgtagtgcatagaaacactgtatcgggtaatagttctcctttaaatatcaggaaagggtctagaaaagggctcagtttttgaattattttggtgacctgtgagctgtggaagcatatgaataatgtggtgttcaatggagcaaggcccaacatccttgatctgcttctaaatgttactagtgactgtaccctatgctggtgtatggctggtggccaggtcctgttggaactcttaggtaggtagtatggtgggatggagttggtatgctcttaatttgttgttatttggattgattctatataggacggagtgattttaaaaatgaaaaaaactcaaa

SEQ ID NO: 211474 - DNA, 2386 bp, Zea Mays
acttttgcccttcgaactaaaagcgcctgcatctcaaacccgacggcgctctcttctctatcctctgtgtcccctccaccaaaaccgacgacgacgtcgctctcctccaccggtgctcggcgctctccctccaccagcggtggtccacagacgctcggcgagctccaccggcgggcgctggcggctggtcagatccgctcggcagtcatccatctggcacatcggccgaagctcccagcgtcctcctgcaggccgagctgaaggttcagcgcgccggtggagttagacgacgaaactccgtcacgtcatacctctccgcctcccgtcttccagacgtctctaatcggggtcccagcgtctcggagaagaggagcagcacggcacggcagctgtggcgaggaaggctcctgtcccatcccaacccagttagcagccgcccaaggaggaggagatccaatcggcgtgcgggcgtccgcggtccatccatcgatccaattccaatctgcaggtacacccttccctcccggctgtgcgaagcaactccaccctaatttattttgcagaaaaagttatcggtccgcccttggttactgaaactggtcaggtgtatgtaattttgaagtaacaaaggatttggaacccagccctctgttctccaccaccgcttcgaagatgccgcaggtaatggtggtggcacggaacttcatggatatggtggctgctcttcctgcgggcaagcttgatatgctctatgactcagcctttatctgtgaggcagtactcaggtcacttcccccactggcaaagaagtatgcactgcagatgttgtatgtgctggcaccagtgaccgctgcagcaatggaagagtgggtgcttgatgaatatgctgccaagcataaggttgccattgataagcttctacagctcagggtctttgttgaagtgcgcgacagacgacgggacgtgagctacaagatgaatcagaagttccagggaaacatgcagaagtatttggttgatggtggaagtttaccaagggaacctttaccattaagtgtcactggtcgattgcccacaccagcagatctggaagcctatgctcttgatcaatgggagtgcttcttgttgcaattgatcaattcatctcaagtcgaaaaagggtcaagttttagctcctccatgatgaagacgtttcagcgtggtcttctgagttcaagggatggtgaagcttcaaagttgactgaaaatggcttccaatttcttctgatggaaacaaatgcacaactttggtacataatgagagaatacatttcatctgctgaggaacgtggagtggaccctacggagctgatatcatttctcttggaacttagctttcataaattgggagcggcttatagcttgaacactctgactgatgtccagaggattgccatcagggatcttgcagaattaggactagtcaaacagcagcagctggttcattcctacccaattggctactaatctttcagcaagcttgtcagattcgtcatctaacaaagagggatttgtggttgtggagacaaactttcgaatgtatgcatactctacttccaagttgcactgtgaaattctacgcctttttgcaagggtggagtatcaacttccaaacctcatcgtaggagctgttacaaaagaaagtatctatggtgcttttgaaaatgggataactgctgagcagataatttcatttcttaggcaaaatgctcaccctcgtgttgctgacaagatacccgctgtcccggagaatgtcacagatcaggttgtgggaaactgacctcaacagggttgagatgattccatcgcatttgtacgaagattttcctagcaaggaatggtttgaacaatgctgtgattatgcaagggataatgggtacttgctgtgggaggaccccaagagaatgagactaattgtacgaggggagttccaccccgaaatgagggagttccttcgcaggcaaagatgaggaacgaccttgtacttgacggaccatgctatgcttctttgtagtgcatagaaacactgtatcgggtaatagttctcctttaaatatcaggaaagggtctagaaaagggctcagtttttgaattattttggtgacctgtgagctgtggaagcatatgaataatgtggtgttcaatggagcaaggcccaacatccttgatctgcttctaaatgttactagtgactgtaccctatgctggtgtatggctggtggccaggtcctgttggaactcttaggtaggtagtatggtgggatggagttggtatgctcttaatttgttgttatttggattgattctatataggacggagtgattttaaaaatgaaaaaaactcaaa

SEQ ID NO: 211475 - DNA, 3350 bp, Zea Mays
acttttgcccttcgaactaaaagcgcctgcatctcaaacccgacggcgctctcttctctatcctctgtgtcccctccaccaaaaccgacgacgacgtcgctctcctccaccggtgctcggcgctctccctccaccagcggtggtccacagacgctcggcgagctccaccggcgggcgctggcggctggtcagatccgctcggcagtcatccatctggcacatcgggtagctcgcgcctccgttggcagtcccaccgccgcccggccctcccccagcgcccccggtgatccggaccgcacccgcttactcggcctaacgaccggctcctgccccgacgcagccgaagctcccagcgtcctcctgcaggccgagctgaaggttcagcgcgccggtggagttagacgacgaaactccgtcacgtcatacctctccgcctcccgtcttccagacgtctctaatcggggtcccagcgtctcggagaagaggagcagcacggcacggcagctgtggcgaggaaggctcctgtcccatcccaacccagttagcagccgcccaaggaggaggagatccaatcggcgtgcgggcgtccgcggtccatccatcgatccaattccaatctgcaggcatctcgagtgcaccgtcggccgcaccagcaggcagcatcccgacaccgccgttccccagcagacagcagcaggtcgccgtcgttccccagcaggcagcaacaggtcgccagctcgcccccgcgtttgcttccggtcagctgatgtcgcatgcttttcggcagcgctagtcctcgacggacgacgaccagcatcagccgccgccccagtcgaccagcatccacggcggcacgagcccacgaccagcagatcaacgcggtggcagatcaacgagcccacgactagtcagaaaatttttacagcagcatatccaccggatacccgatacccgacgggtacccggtgggcacgggtatgggtccatttttttacccgattggcttggtgcgtatggatatttgtaaagggtcgagtatgatatcgggtcgggtattatacccgaacacaacccgacccgctgccatccctaaacgcagctattctgtcaattccttaaatagagcagcactgagcatatccggcggagaatttagttcagtgccggtttccatttcacttcatatctgggcttaatcttgtgtcagcttacctacacattgcaattgttgtcacatagcttatgaatgaagcacggaaatgatcgagttatattagaactatctacaccgacgtattgtgttgaatttaagatgccatcgatgccttttaaatgtgtatagtgctttcgacagccttgtgtttgcatgccgaatttcttacaagtatcatacatgtataccgaactgtgaatttaggttatactcaaactgcacacagtagcatccttctggtacaggtacacccttccctcccggctgtgcgaagcaactccaccctaatttattttgcagaaaaagttatcggtccgcccttggttactgaaactggtcaggtgtatgtaattttgaagtaacaaaggatttggaacccagccctctgttctccaccaccgcttcgaagatgccgcaggtaatggtggtggcacggaacttcatggatatggtggctgctcttcctgcgggcaagcttgatatgctctatgactcagcctttatctgtgaggcagtactcaggtcacttcccccactggcaaagaagtatgcactgcagatgttgtatgtgctggcaccagtgaccgctgcagcaatggaagagtgggtgcttgatgaatatgctgccaagcataaggttgccattgataagcttctacagctcagggtctttgttgaagtgcgcgacagacgacgggacgtgagctacaagatgaatcagaagttccagggaaacatgcagaagtatttggttgatggtggaagtttaccaagggaacctttaccattaagtgtcactggtcgattgcccacaccagcagatctggaagcctatgctcttgatcaatgggagtgcttcttgttgcaattgatcaattcatctcaagtcgaaaaagggtcaagttttagctcctccatgatgaagacgtttcagcgtggtcttctgagttcaagggatggtgaagcttcaaagttgactgaaaatggcttccaatttcttctgatggaaacaaatgcacaactttggtacataatgagagaatacatttcatctgctgaggaacgtggagtggaccctacggagctgatatcatttctcttggaacttagctttcataaattgggagcggcttatagcttgaacactctgactgatgtccagaggattgccatcagggatcttgcagaattaggactagtcaaacagcagcagggtcgaaaggatagctggttcattcctacccaattggctactaatctttcagcaagcttgtcagattcgtcatctaacaaagagggatttgtggttgtggagacaaactttcgaatgtatgcatactctacttccaagttgcactgtgaaattctacgcctttttgcaagggtggagtatcaacttccaaacctcatcgtaggagctgttacaaaagaaagtatctatggtgcttttgaaaatgggataactgctgagcagataatttcatttcttaggcaaaatgctcaccctcgtgttgctgacaagatacccgctgtcccggagaatgtcacagatcaggttgtgggaaactgacctcaacagggttgagatgattccatcgcatttgtacgaagattttcctagcaaggaatggtttgaacaatgctgtgattatgcaagggataatgggtacttgctgtgggaggaccccaagagaatgagactaattgtacgaggggagttccaccccgaaatgagggagttccttcgcaggcaaagatgaggaacgaccttgtacttgacggaccatgctatgcttctttgtagtgcatagaaacactgtatcgggtaatagttctcctttaaatatcaggaaagggtctagaaaagggctcagtttttgaattattttggtgacctgtgagctgtggaagcatatgaataatgtggtgttcaatggagcaaggcccaacatccttgatctgcttctaaatgttactagtgactgtaccctatgctggtgtatggctggtggccaggtcctgttggaactcttaggtaggtagtatggtgggatggagttggtatgctcttaatttgttgttatttggattgattctatataggacggagtgattttaaaaatgaaaaaaactcaaa

SEQ ID NO: 211476 - DNA, 2776 bp, Zea Mays
acttttgcccttcgaactaaaagcgcctgcatctcaaacccgacggcgctctcttctctatcctctgtgtcccctccaccaaaaccgacgacgacgtcgctctcctccaccggtgctcggcgctctccctccaccagcggtggtccacagacgctcggcgagctccaccggcgggcgctggcggctggtcagatccgctcggcagtcatccatctggcacatcgggtagctcgcgcctccgttggcagtcccaccgccgcccggccctcccccagcgcccccggtgatccggaccgcacccgcttactcggcctaacgaccggctcctgccccgacgcagccgaagctcccagcgtcctcctgcaggccgagctgaaggttcagcgcgccggtggagttagacgacgaaactccgtcacgtcatacctctccgcctcccgtcttccagacgtctctaatcggggtcccagcgtctcggagaagaggagcagcacggcacggcagctgtggcgaggaaggctcctgtcccatcccaacccagttagcagccgcccaaggaggaggagatccaatcggcgtgcgggcgtccgcggtccatccatcgatccaattccaatctgcaggcatctcgagtgcaccgtcggccgcaccagcaggcagcatcccgacaccgccgttccccagcagacagcagcaggtcgccgtcgttccccagcaggcagcaacaggtcgccagctcgcccccgcgtttgcttccggtcagctgatgtcgcatgcttttcggcagcgctagtcctcgacggacgacgaccagcatcagccgccgccccagtcgaccagcatccacggcggcacgagcccacgaccagcagatcaacgcggtggcagatcaacgagcccacgactagtcagaaaatttttacagcagcatatccaccggatacccgatacccgacgggtacccggtgggcacgggtgtatgtaattttgaagtaacaaaggatttggaacccagccctctgttctccaccaccgcttcgaagatgccgcaggtaatggtggtggcacggaacttcatggatatggtggctgctcttcctgcgggcaagcttgatatgctctatgactcagcctttatctgtgaggcagtactcaggtcacttcccccactggcaaagaagtatgcactgcagatgttgtatgtgctggcaccagtgaccgctgcagcaatggaagagtgggtgcttgatgaatatgctgccaagcataaggttgccattgataagcttctacagctcagggtctttgttgaagtgcgcgacagacgacgggacgtgagctacaagatgaatcagaagttccagggaaacatgcagaagtatttggttgatggtggaagtttaccaagggaacctttaccattaagtgtcactggtcgattgcccacaccagcagatctggaagcctatgctcttgatcaatgggagtgcttcttgttgcaattgatcaattcatctcaagtcgaaaaagggtcaagttttagctcctccatgatgaagacgtttcagcgtggtcttctgagttcaagggatggtgaagcttcaaagttgactgaaaatggcttccaatttcttctgatggaaacaaatgcacaactttggtacataatgagagaatacatttcatctgctgaggaacgtggagtggaccctacggagctgatatcatttctcttggaacttagctttcataaattgggagcggcttatagcttgaacactctgactgatgtccagaggattgccatcagggatcttgcagaattaggactagtcaaacagcagcagggtcgaaaggatagctggttcattcctacccaattggctactaatctttcagcaagcttgtcagattcgtcatctaacaaagagggatttgtggttgtggagacaaactttcgaatgtatgcatactctacttccaagttgcactgtgaaattctacgcctttttgcaagggtggagtatcaacttccaaacctcatcgtaggagctgttacaaaagaaagtatctatggtgcttttgaaaatgggataactgctgagcagataatttcatttcttaggcaaaatgctcaccctcgtgttgctgacaagatacccgctgtcccggagaatgtcacagatcagattaggttgtgggaaactgacctcaacagggttgagatgattccatcgcatttgtacgaagattttcctagcaaggaatggtttgaacaatgctgtgattatgcaagggataatgggtacttgctgtgggaggaccccaagagaatgagactaattgtacgaggggagttccaccccgaaatgagggagttccttcgcaggcaaagatgaggaacgaccttgtacttgacggaccatgctatgcttctttgtagtgcatagaaacactgtatcgggtaatagttctcctttaaatatcaggaaagggtctagaaaagggctcagtttttgaattattttggtgacctgtgagctgtggaagcatatgaataatgtggtgttcaatggagcaaggcccaacatccttgatctgcttctaaatgttactagtgactgtaccctatgctggtgtatggctggtggccaggtcctgttggaactcttaggtaggtagtatggtgggatggagttggtatgctcttaatttgttgttatttggattgattctatataggacggagtgattttaaaaatgaaaaaaactcaaa

SEQ ID NO: 211477 - DNA, 2345 bp, Zea Mays
acttttgcccttcgaactaaaagcgcctgcatctcaaacccgacggcgctctcttctctatcctctgtgtcccctccaccaaaaccgacgacgacgtcgctctcctccaccggtgctcggcgctctccctccaccagcggtggtccacagacgctcggcgagctccaccggcgggcgctggcggctggtcagatccgctcggcagtcatccatctggcacatcggccgaagctcccagcgtcctcctgcaggccgagctgaaggttcagcgcgccggtggagttagacgacgaaactccgtcacgtcatacctctccgcctcccgtcttccagacgtctctaatcggggtcccagcgtctcggagaagaggagcagcacggcacggcagctgtggcgaggaaggctcctgtcccatcccaacccagttagcagccgcccaaggaggaggagatccaatcggcgtgcgggcgtccgcggtccatccatcgatccaattccaatctgcagaaaaagttatcggtccgcccttggttactgaaactggtcaggtgtatgtaattttgaagtaacaaaggatttggaacccagccctctgttctccaccaccgcttcgaagatgccgcaggtaatggtggtggcacggaacttcatggatatggtggctgctcttcctgcgggcaagcttgatatgctctatgactcagcctttatctgtgaggcagtactcaggtcacttcccccactggcaaagaagtatgcactgcagatgttgtatgtgctggcaccagtgaccgctgcagcaatggaagagtgggtgcttgatgaatatgctgccaagcataaggttgccattgataagcttctacagctcagggtctttgttgaagtgcgcgacagacgacgggacgtgagctacaagatgaatcagaagttccagggaaacatgcagaagtatttggttgatggtggaagtttaccaagggaacctttaccattaagtgtcactggtcgattgcccacaccagcagatctggaagcctatgctcttgatcaatgggagtgcttcttgttgcaattgatcaattcatctcaagtcgaaaaagggtcaagttttagctcctccatgatgaagacgtttcagcgtggtcttctgagttcaagggatggtgaagcttcaaagttgactgaaaatggcttccaatttcttctgatggaaacaaatgcacaactttggtacataatgagagaatacatttcatctgctgaggaacgtggagtggaccctacggagctgatatcatttctcttggaacttagctttcataaattgggagcggcttatagcttgaacactctgactgatgtccagaggattgccatcagggatcttgcagaattaggactagtcaaacagcagcagggtcgaaaggatagctggttcattcctacccaattggctactaatctttcagcaagcttgtcagattcgtcatctaacaaagagggatttgtggttgtggagacaaactttcgaatgtatgcatactctacttccaagttgcactgtgaaattctacgcctttttgcaagggtggagtatcaacttccaaacctcatcgtaggagctgttacaaaagaaagtatctatggtgcttttgaaaatgggataactgctgagcagataatttcatttcttaggcaaaatgctcaccctcgtgttgctgacaagatacccgctgtcccggagaatgtcacagatcaggttgtgggaaactgacctcaacagggttgagatgattccatcgcatttgtacgaagattttcctagcaaggaatggtttgaacaatgctgtgattatgcaagggataatgggtacttgctgtgggaggaccccaagagaatgagactaattgtacgaggggagttccaccccgaaatgagggagttccttcgcaggcaaagatgaggaacgaccttgtacttgacggaccatgctatgcttctttgtagtgcatagaaacactgtatcgggtaatagttctcctttaaatatcaggaaagggtctagaaaagggctcagtttttgaattattttggtgacctgtgagctgtggaagcatatgaataatgtggtgttcaatggagcaaggcccaacatccttgatctgcttctaaatgttactagtgactgtaccctatgctggtgtatggctggtggccaggtcctgttggaactcttaggtaggtagtatggtgggatggagttggtatgctcttaatttgttgttatttggattgattctatataggacggagtgattttaaaaatgaaaaaaactcaaa

SEQ ID NO: 211478 - DNA, 2304 bp, Zea Mays
acttttgcccttcgaactaaaagcgcctgcatctcaaacccgacggcgctctcttctctatcctctgtgtcccctccaccaaaaccgacgacgacgtcgctctcctccaccggtgctcggcgctctccctccaccagcggtggtccacagacgctcggcgagctccaccggcgggcgctggcggctggtcagatccgctcggcagtcatccatctggcacatcggccgaagctcccagcgtcctcctgcaggccgagctgaaggttcagcgcgccggtggagttagacgacgaaactccgtcacgtcatacctctccgcctcccgtcttccagacgtctctaatcggggtcccagcgtctcggagaagaggagcagcacggcacggcagctgtggcgaggaaggctcctgtcccatcccaacccagttagcagccgcccaaggaggaggagatccaatcggcgtgcgggcgtccgcggtccatccatcgatccaattccaatctgcaggtgtatgtaattttgaagtaacaaaggatttggaacccagccctctgttctccaccaccgcttcgaagatgccgcaggtaatggtggtggcacggaacttcatggatatggtggctgctcttcctgcgggcaagcttgatatgctctatgactcagcctttatctgtgaggcagtactcaggtcacttcccccactggcaaagaagtatgcactgcagatgttgtatgtgctggcaccagtgaccgctgcagcaatggaagagtgggtgcttgatgaatatgctgccaagcataaggttgccattgataagcttctacagctcagggtctttgttgaagtgcgcgacagacgacgggacgtgagctacaagatgaatcagaagttccagggaaacatgcagaagtatttggttgatggtggaagtttaccaagggaacctttaccattaagtgtcactggtcgattgcccacaccagcagatctggaagcctatgctcttgatcaatgggagtgcttcttgttgcaattgatcaattcatctcaagtcgaaaaagggtcaagttttagctcctccatgatgaagacgtttcagcgtggtcttctgagttcaagggatggtgaagcttcaaagttgactgaaaatggcttccaatttcttctgatggaaacaaatgcacaactttggtacataatgagagaatacatttcatctgctgaggaacgtggagtggaccctacggagctgatatcatttctcttggaacttagctttcataaattgggagcggcttatagcttgaacactctgactgatgtccagaggattgccatcagggatcttgcagaattaggactagtcaaacagcagcagggtcgaaaggatagctggttcattcctacccaattggctactaatctttcagcaagcttgtcagattcgtcatctaacaaagagggatttgtggttgtggagacaaactttcgaatgtatgcatactctacttccaagttgcactgtgaaattctacgcctttttgcaagggtggagtatcaacttccaaacctcatcgtaggagctgttacaaaagaaagtatctatggtgcttttgaaaatgggataactgctgagcagataatttcatttcttaggcaaaatgctcaccctcgtgttgctgacaagatacccgctgtcccggagaatgtcacagatcaggttgtgggaaactgacctcaacagggttgagatgattccatcgcatttgtacgaagattttcctagcaaggaatggtttgaacaatgctgtgattatgcaagggataatgggtacttgctgtgggaggaccccaagagaatgagactaattgtacgaggggagttccaccccgaaatgagggagttccttcgcaggcaaagatgaggaacgaccttgtacttgacggaccatgctatgcttctttgtagtgcatagaaacactgtatcgggtaatagttctcctttaaatatcaggaaagggtctagaaaagggctcagtttttgaattattttggtgacctgtgagctgtggaagcatatgaataatgtggtgttcaatggagcaaggcccaacatccttgatctgcttctaaatgttactagtgactgtaccctatgctggtgtatggctggtggccaggtcctgttggaactcttaggtaggtagtatggtgggatggagttggtatgctcttaatttgttgttatttggattgattctatataggacggagtgattttaaaaatgaaaaaaactcaaa

SEQ ID NO: 211479 - DNA, 2327 bp, Zea Mays
acttttgcccttcgaactaaaagcgcctgcatctcaaacccgacggcgctctcttctctatcctctgtgtcccctccaccaaaaccgacgacgacgtcgctctcctccaccggtgctcggcgctctccctccaccagcggtggtccacagacgctcggcgagctccaccggcgggcgctggcggctggtcagatccgctcggcagtcatccatctggcacatcggccgaagctcccagcgtcctcctgcaggccgagctgaaggttcagcgcgccggtggagttagacgacgaaactccgtcacgtcatacctctccgcctcccgtcttccagacgtctctaatcggggtcccagcgtctcggagaagaggagcagcacggcacggcagctgtggcgaggaaggctcctgtcccatcccaacccagttagcagccgcccaaggaggaggagatccaatcggcgtgcgggcgtccgcggtccatccatcgatccaattccaatctgcaggttatactcaaactgcacacagtagcatccttctggtacagtaacaaaggatttggaacccagccctctgttctccaccaccgcttcgaagatgccgcaggtaatggtggtggcacggaacttcatggatatggtggctgctcttcctgcgggcaagcttgatatgctctatgactcagcctttatctgtgaggcagtactcaggtcacttcccccactggcaaagaagtatgcactgcagatgttgtatgtgctggcaccagtgaccgctgcagcaatggaagagtgggtgcttgatgaatatgctgccaagcataaggttgccattgataagcttctacagctcagggtctttgttgaagtgcgcgacagacgacgggacgtgagctacaagatgaatcagaagttccagggaaacatgcagaagtatttggttgatggtggaagtttaccaagggaacctttaccattaagtgtcactggtcgattgcccacaccagcagatctggaagcctatgctcttgatcaatgggagtgcttcttgttgcaattgatcaattcatctcaagtcgaaaaagggtcaagttttagctcctccatgatgaagacgtttcagcgtggtcttctgagttcaagggatggtgaagcttcaaagttgactgaaaatggcttccaatttcttctgatggaaacaaatgcacaactttggtacataatgagagaatacatttcatctgctgaggaacgtggagtggaccctacggagctgatatcatttctcttggaacttagctttcataaattgggagcggcttatagcttgaacactctgactgatgtccagaggattgccatcagggatcttgcagaattaggactagtcaaacagcagcagggtcgaaaggatagctggttcattcctacccaattggctactaatctttcagcaagcttgtcagattcgtcatctaacaaagagggatttgtggttgtggagacaaactttcgaatgtatgcatactctacttccaagttgcactgtgaaattctacgcctttttgcaagggtggagtatcaacttccaaacctcatcgtaggagctgttacaaaagaaagtatctatggtgcttttgaaaatgggataactgctgagcagataatttcatttcttaggcaaaatgctcaccctcgtgttgctgacaagatacccgctgtcccggagaatgtcacagatcaggttgtgggaaactgacctcaacagggttgagatgattccatcgcatttgtacgaagattttcctagcaaggaatggtttgaacaatgctgtgattatgcaagggataatgggtacttgctgtgggaggaccccaagagaatgagactaattgtacgaggggagttccaccccgaaatgagggagttccttcgcaggcaaagatgaggaacgaccttgtacttgacggaccatgctatgcttctttgtagtgcatagaaacactgtatcgggtaatagttctcctttaaatatcaggaaagggtctagaaaagggctcagtttttgaattattttggtgacctgtgagctgtggaagcatatgaataatgtggtgttcaatggagcaaggcccaacatccttgatctgcttctaaatgttactagtgactgtaccctatgctggtgtatggctggtggccaggtcctgttggaactcttaggtaggtagtatggtgggatggagttggtatgctcttaatttgttgttatttggattgattctatataggacggagtgattttaaaaatgaaaaaaactcaaa

SEQ ID NO: 211480 - DNA, 1844 bp, Zea Mays
acttttgcccttcgaactaaaagcgcctgcatctcaaacccgacggcgctctcttctctatcctctgtgtcccctccaccaaaaccgacgacgacgtcgctctcctccaccggtgctcggcgctctccctccaccagcggtggtccacagacgctcggcgagctccaccggcgggcgctggcggctggtcagatccgctcggcagtcatccatctggcacatcggccgaagctcccagcgtcctcctgcaggccgagctgaaggttcagcgcgccggtggagttagacgacgaaactccgtcacgtcatacctctccgcctcccgtcttccagacgtctctaatcggggtcccagcgtctcggagaagaggagcagcacggcacggcagctgtggcgaggaaggctcctgtcccatcccaacccagttagcagccgcccaaggaggaggagatccaatcggcgtgcgggcgtccgcggtccatccatcgatccaattccaatctgcagtggaagtttaccaagggaacctttaccattaagtgtcactggtcgattgcccacaccagcagatctggaagcctatgctcttgatcaatgggagtgcttcttgttgcaattgatcaattcatctcaagtcgaaaaagggtcaagttttagctcctccatgatgaagacgtttcagcgtggtcttctgagttcaagggatggtgaagcttcaaagttgactgaaaatggcttccaatttcttctgatggaaacaaatgcacaactttggtacataatgagagaatacatttcatctgctgaggaacgtggagtggaccctacggagctgatatcatttctcttggaacttagctttcataaattgggagcgggatcttgcagaattaggactagtcaaacagcagcagggtcgaaaggatagctggttcattcctacccaattggctactaatctttcagcaagcttgtcagattcgtcatctaacaaagagggatttgtggttgtggagacaaactttcgaatgtatgcatactctacttccaagttgcactgtgaaattctacgcctttttgcaagggtggagtatcaacttccaaacctcatcgtaggagctgttacaaaagaaagtatctatggtgcttttgaaaatgggataactgctgagcagataatttcatttcttaggcaaaatgctcaccctcgtgttgctgacaagatacccgctgtcccggagaatgtcacagatcagattaggttgtgggaaactgacctcaacagggttgagatgattccatcgcatttgtacgaagattttcctagcaaggaatggtttgaacaatgctgtgattatgcaagggataatgggtacttgctgtgggaggaccccaagagaatgagactaattgtacgaggggagttccaccccgaaatgagggagttccttcgcaggcaaagatgaggaacgaccttgtacttgacggaccatgctatgcttctttgtagtgcatagaaacactgtatcgggtaatagttctcctttaaatatcaggaaagggtctagaaaagggctcagtttttgaattattttggtgacctgtgagctgtggaagcatatgaataatgtggtgttcaatggagcaaggcccaacatccttgatctgcttctaaatgttactagtgactgtaccctatgctggtgtatggctggtggccaggtcctgttggaactcttaggtaggtagtatggtgggatggagttggtatgctcttaatttgttgttatttggattgattctatataggacggagtgattttaaaaatgaaaaaaactcaaa

SEQ ID NO: 211481 - DNA, 2571 bp, Zea Mays
cgcccagccgcccagggcctaggccaccgtcagcgccgcccgcctccatctccgccccgagcggctgcgccccgcccgccgcccgcccgcagtccaccaggcgtcgagccccgccccggctcgcgcgcgtcgagcctctgtccggccccggctgcaacccactcactcagccagacctggcttctctgcagactgcaggttctcagtttctcttataacagtaaccgcagtaaccggacacttttgcccttcgaactaaaagcgcctgcatctcaaacccgacggcgctctcttctctatcctctgtgtcccctccaccaaaaccgacgacgacgtcgctctcctccaccggtgctcggcgctctccctccaccagcggtggtccacagacgctcggcgagctccaccggcgggcgctggcggctggtcagatccgctcggcagtcatccatctggcacatcggccgaagctcccagcgtcctcctgcaggccgagctgaaggttcagcgcgccggtggagttagacgacgaaactccgtcacgtcatacctctccgcctcccgtcttccagacgtctctaatcggggtcccagcgtctcggagaagaggagcagcacggcacggcagctgtggcgaggaaggctcctgtcccatcccaacccagttagcagccgcccaaggaggaggagatccaatcggcgtgcgggcgtccgcggtccatccatcgatccaattccaatctgcaggttatactcaaactgcacacagtagcatccttctggtacagtaacaaaggatttggaacccagccctctgttctccaccaccgcttcgaagatgccgcaggtaatggtggtggcacggaacttcatggatatggtggctgctcttcctgcgggcaagcttgatatgctctatgactcagcctttatctgtgaggcagtactcaggtcacttcccccactggcaaagaagtatgcactgcagatgttgtatgtgctggcaccagtgaccgctgcagcaatggaagagtgggtgcttgatgaatatgctgccaagcataaggttgccattgataagcttctacagctcagggtctttgttgaagtgcgcgacagacgacgggacgtgagctacaagatgaatcagaagttccagggaaacatgcagaagtatttggttgatggtggaagtttaccaagggaacctttaccattaagtgtcactggtcgattgcccacaccagcagatctggaagcctatgctcttgatcaatgggagtgcttcttgttgcaattgatcaattcatctcaagtcgaaaaagggtcaagttttagctcctccatgatgaagacgtttcagcgtggtcttctgagttcaagggatggtgaagcttcaaagttgactgaaaatggcttccaatttcttctgatggaaacaaatgcacaactttggtacataatgagagaatacatttcatctgctgaggaacgtggagtggaccctacggagctgatatcatttctcttggaacttagctttcataaattgggagcggcttatagcttgaacactctgactgatgtccagaggattgccatcagggatcttgcagaattaggactagtcaaacagcagcagggtcgaaaggatagctggttcattcctacccaattggctactaatctttcagcaagcttgtcagattcgtcatctaacaaagagggatttgtggttgtggagacaaactttcgaatgtatgcatactctacttccaagttgcactgtgaaattctacgcctttttgcaagggtggagtatcaacttccaaacctcatcgtaggagctgttacaaaagaaagtatctatggtgcttttgaaaatgggataactgctgagcagataatttcatttcttaggcaaaatgctcaccctcgtgttgctgacaagatacccgctgtcccggagaatgtcacagatcagattaggttgtgggaaactgacctcaacagggttgagatgattccatcgcatttgtacgaagattttcctagcaaggaatggtttgaacaatgctgtgattatgcaagggataatgggtacttgctgtgggaggaccccaagagaatgagactaattgtacgaggggagttccaccccgaaatgagggagttccttcgcaggcaaagatgaggaacgaccttgtacttgacggaccatgctatgcttctttgtagtgcatagaaacactgtatcgggtaatagttctcctttaaatatcaggaaagggtctagaaaagggctcagtttttgaattattttggtgacctgtgagctgtggaagcatatgaataatgtggtgttcaatggagcaaggcccaacatccttgatctgcttctaaatgttactagtgactgtaccctatgctggtgtatggctggtggccaggtcctgttggaactcttaggtaggtagtatggtgggatggagttggtatgctcttaatttgttgttatttggattgattctatataggacggagtgattttaaaaatgaaaaaaactcaaa

SEQ ID NO: 211482 - DNA, 2063 bp, Zea Mays
cgcccagccgcccagggcctaggccaccgtcagcgccgcccgcctccatctccgccccgagcggctgcgccccgcccgccgcccgcccgcagtccaccaggcgtcgagccccgccccggctcgcgcgcgtcgagcctctgtccggccccggctgcaacccactcactcagccagacctggcttctctgcagactgcaggttctcagtttctcttataacaggttatactcaaactgcacacagtagcatccttctggtacaggtgtatgtaattttgaagtaacaaaggatttggaacccagccctctgttctccaccaccgcttcgaagatgccgcaggtaatggtggtggcacggaacttcatggatatggtggctgctcttcctgcgggcaagcttgatatgctctatgactcagcctttatctgtgaggcagtactcaggtcacttcccccactggcaaagaagtatgcactgcagatgttgtatgtgctggcaccagtgaccgctgcagcaatggaagagtgggtgcttgatgaatatgctgccaagcataaggttgccattgataagcttctacagctcagggtctttgttgaagtgcgcgacagacgacgggacgtgagctacaagatgaatcagaagttccagggaaacatgcagaagtatttggttgatggtggaagtttaccaagggaacctttaccattaagtgtcactggtcgattgcccacaccagcagatctggaagcctatgctcttgatcaatgggagtgcttcttgttgcaattgatcaattcatctcaagtcgaaaaagggtcaagttttagctcctccatgatgaagacgtttcagcgtggtcttctgagttcaagggatggtgaagcttcaaagttgactgaaaatggcttccaatttcttctgatggaaacaaatgcacaactttggtacataatgagagaatacatttcatctgctgaggaacgtggagtggaccctacggagctgatatcatttctcttggaacttagctttcataaattgggagcggcttatagcttgaacactctgactgatgtccagaggattgccatcagggatcttgcagaattaggactagtcaaacagcagcagggtcgaaaggatagctggttcattcctacccaattggctactaatctttcagcaagcttgtcagattcgtcatctaacaaagagggatttgtggttgtggagacaaactttcgaatgtatgcatactctacttccaagttgcactgtgaaattctacgcctttttgcaagggtggagtatcaacttccaaacctcatcgtaggagctgttacaaaagaaagtatctatggtgcttttgaaaatgggataactgctgagcagataatttcatttcttaggcaaaatgctcaccctcgtgttgctgacaagatacccgctgtcccggagaatgtcacagatcagattaggttgtgggaaactgacctcaacagggttgagatgattccatcgcatttgtacgaagattttcctagcaaggaatggtttgaacaatgctgtgattatgcaagggataatgggtacttgctgtgggaggaccccaagagaatgagactaattgtacgaggggagttccaccccgaaatgagggagttccttcgcaggcaaagatgaggaacgaccttgtacttgacggaccatgctatgcttctttgtagtgcatagaaacactgtatcgggtaatagttctcctttaaatatcaggaaagggtctagaaaagggctcagtttttgaattattttggtgacctgtgagctgtggaagcatatgaataatgtggtgttcaatggagcaaggcccaacatccttgatctgcttctaaatgttactagtgactgtaccctatgctggtgtatggctggtggccaggtcctgttggaactcttaggtaggtagtatggtgggatggagttggtatgctcttaatttgttgttatttggattgattctatataggacggagtgattttaaaaatgaaaaaaactcaaa

SEQ ID NO: 211483 - DNA, 2439 bp, Zea Mays
gtccttctccttctctcacacactccactccacgtccccctccttcaaatcctaccaacacccaagcacaaggagagagaagccgccgccgccgccatggacaatattgaggtgaggaggaggaagaagaaagggagaagcagcggacgccgccaggggggacgggtacaggcggtcctgcgcgccggcctcgtcgccatggccttcgccctcctctgcctctgctcctccacgccctccgccattgccctcaccccagacggcgaggcgttgctggagctcaagctggccttcaacgccaccgtgcagcggctcaccagctggcgtcccagcgaccccaacccctgcggctgggagggcatctcctgctccgtccctgacctcagggtccaatccataaacctcccattcatgcagctcgggggcatcatttcgcccagcatcgggaggctcgacaagctgcagagactagctctgcaccagaacagcttgcacggcccaatccctgcagagatcaagaactgcaccgagctcagggcaatttacctgagagccaactacctgcaaggaggcatcccttcagagattggcgagctcgtgcacctcaccatcttcaatctgctgaggggcacaataccggcctcgatcggaagcctcactcacctgcgctttctgaacctgtctactaacttcttctccggagagatcccaaatgctggtgtcctcggaaccttcaaaagcagctcgttcgttggaaatctggagctctgtggcctgtccatccagaaagcttgccgtggaaccctcggctttcctgctgtgttgccacattccgatccgctctcttcggctggtgtttctccaatcaataacaacaagacgtcacactttctcaatggcgtcgtgatcggctcgatgtcaaccttggctcttgccttggtagccgtacttgggttcctatggatctgcttgctgtccaggaagaagagcattggtggaaactatgtaaagatggacaaacagactgttcctgatggtgcaaagcttgtgacataccagtggaaccttccatattcatcaagcgagattattagaaggttggagctgcttgatgaagaggacgtggtcggttgtgggggctttggcacggtgtacaggatggtgatggatgatggcacgtcgtttgccgtcaagaggattgacctcagccgcgaaagtcgcgacaggaccttcgagaaggagcttgagattctgggcagcatcaggcacataaaccttgtcaatctgcgaggctactgccggctccccacagcgaagctactcgtatatgatttcgttgagctgggcagcttggaatgctaccttcatggagatgaacaagaggagcagccattgaactggaacgcgcggatgaaaatcgcgcttggctcggctcgaggcctggcatatctgcaccacgattgctcgcccgggatcgtgcatagggacatcaaagccagtaacatcctgctggatagaagcttggagcctcgtgtctccgattttggcctcgcgaggctgcttgtagacagtgctgcccacgttaccaccgtcgtcgcgggcacctttggatacctagcaccagagtacttgcaaaacgggcatgctactgagaaatcagacgtgtatagctttggagtgcttatgctggagctagtgaccggaaagaggccgaccgattcttgcttcatcaagaagggactgaacattgttggctgggtaagcagtgttcgtttttcttttttccctttaccttttttaccccctttacctcgtcatgttggctgggttttctgcagctgaacaccctaactggggagcaccggctggaggatatcatcgatgagcgatgcggcgatgtggaggtggaagccgtggaagccatccttgacatcgcagccatgtgcaccgacgcagacccggggcagcggccatcgatgagcgctgtcctcaagatgctggaggaggagatcttgtccccctgcatgagcgagctgtgctacgagcagcacctggagctctgagctgaggaggaagatgttgctggctgcgtgcgtgaagcgtcatggatgagactgaagttttgtactgtagatacaacgatgatggatgagtgtaggtgatgttttgtgtgctcttagggccaatgaagaacagtaagcagcagttcgtgagtgaagaaggatcgtccattgggcgtactgccctgatacgataccggttggctgcacatgagcggccggccttgtgcctcgcttgcgaattgcaaccaaaaggctgacgagaaaactccatgtgctaatgttttcaacatccacggaagggcgtatcactgaatattgacgatgtagaaattgttggactaatgtggggttagactaaattaatattcaataatag

SEQ ID NO: 211484 - DNA, 2336 bp, Zea Mays
gctcagtcctctgtccttctccttctctcacacactccactccacgtccccctccttcaaatcctaccaacacccaagcacaaggagagagaagccgccgccgccgccatggacaatattgaggtgaggaggaggaagaagaaagggagaagcagcggacgccgccaggggggacgggtacaggcggtcctgcgcgccggcctcgtcgccatggccttcgccctcctctgcctctgctcctccacgccctccgccattgccctcaccccagacgcggctcaccagctggcgtcccagcgaccccaacccctgcggctgggagggcatctcctgctccgtccctgacctcagggtccaatccataaacctcccattcatgcagctcgggggcatcatttcgcccagcatcgggaggctcgacaagctgcagagactagctctgcaccagaacagcttgcacggcccaatccctgcagagatcaagaactgcaccgagctcagggcaatttacctgagagccaactacctgcaaggaggcatcccttcagagattggcgagctcgtgcacctcaccatcttggacctgtcaagcaatctgctgaggggcacaataccggcctcgatcggaagcctcactcacctgcgctttctgaacctgtctactaacttcttctccggagagatcccaaatgctggtgtcctcggaaccttcaaaagcagctcgttcgttggaaatctggagctctgtggcctgtccatccagaaagcttgccgtggaaccctcggctttcctgctgtgttgccacattccgatccgctctcttcggctggtgtttctccaatcaataacaacaagacgtcacactttctcaatggcgtcgtgatcggctcgatgtcaaccttggctcttgccttggtagccgtacttgggttcctatggatctgcttgctgtccaggaagaagagcattggtggaaactatgtaaagatggacaaacagactgttcctgatggtgcaaagcttgtgacataccagtggaaccttccatattcatcaagcgagattattagaaggttggagctgcttgatgaagaggacgtggtcggttgtgggggctttggcacggtgtacaggatggtgatggatgatggcacgtcgtttgccgtcaagaggattgacctcagccgcgaaagtcgcgacaggaccttcgagaaggagcttgagattctgggcagcatcaggcacataaaccttgtcaatctgcgaggctactgccggctccccacagcgaagctactcgtatatgatttcgttgagctgggcagcttggaatgctaccttcatggagatgaacaagaggagcagccattgaactggaacgcgcggatgaaaatcgcgcttggctcggctcgaggcctggcatatctgcaccacgattgctcgcccgggatcgtgcatagggacatcaaagccagtaacatcctgctggatagaagcttggagcctcgtgtctccgattttggcctcgcgaggctgcttgtagacagtgctgcccacgttaccaccgtcgtcgcgggcacctttggatacctagcaccagagtacttgcaaaacgggcatgctactgagaaatcagacgtgtatagctttggagtgcttatgctggagctagtgaccggaaagaggccgaccgattcttgcttcatcaagaagggactgaacattgttggctggctgaacaccctaactggggagcaccggctggaggatatcatcgatgagcgatgcggcgatgtggaggtggaagccgtggaagccatccttgacatcgcagccatgtgcaccgacgcagacccggggcagcggccatcgatgagcgctgtcctcaagatgctggaggaggagatcttgtccccctgcatgagcgagctgtgctacgagcagcacctggagctctgagctgaggaggaagatgttgctggctgcgtgcgtgaagcgtcatggatgagactgaagttttgtactgtagatacaacgatgatggatgagtgtaggtgatgttttgtgtgctcttagggccaatgaagaacagtaagcagcagttcgtgagtgaagaaggatcgtccattgggcgtactgccctgatacgataccggttggctgcacatgagcggccggccttgtgcctcgcttgcgaattgcaaccaaaaggctgacgagaaaactccatgtgctaatgttttcaacatccacggaagggcgtatcactgaatattgacgatgtagaaattgttggactaatgtggggttagactaaattaatattcaataatag

SEQ ID NO: 211485 - DNA, 2955 bp, Zea Mays
cgcagcaggcagcacacaacccaacactactctccctcccagtctcgccaacgccaccacccccaccattccaaacccccgtctcccaccggctgccgtttccctcccccctccctccctgcctccctcggcggctcctcgcggacggagagaaccccgctcccttgcctagggttcccggaaccctagccccgatccgtacgcgcgagggtccccggcgacgaggaggctgctgtgaggggagggggcagaaggcgcgggaggcggaggcctgtgctgtatgtcagatcgtgggagccggcgaggcggaggcggaggaggagactacggacacggtcagctcgcgaacccgctccaatggccgcagctaaggaaaaggcgtcggtatgctgccgcgatgcgcccgcgcgtgtcgctggcgccccagtcgtccccatgcgcgcgatcgccgcgtccccggtcggcaaggtcgtcgccctcgccgcgggaggcggtgagcgcgtttctgcgtcggctgctggctcaagcggcgccgtgatcgaggagatcgccgcggtccagcccaccaccgcgaaggcatcctccaaagaaaaaaatgcagggataccaataatgacaagagcccagaggtgtcaccctttggacccattatctgctgctgaaattgcagttgctgtagcaactgtaagagttgctggaagatctcctgaggaaagagacagcatgcgctttgttgaagctgtgctgttggagccagaaaagaatgttgtggcactggccgacgcctacttctttccacctttccaaccatcactgctccctagaagcaaaggttctgctgttattccaagcaggctacctcctaggagggccagacttgttgtctataacaaacaatcaaatgagacaagtatttggatagtggaactatctgaagtgcatgccgctactaggggtggacatcacagagggaaggtgatatcatctgaagttattccggatgttcaacctgccatggatgctatggagtatgctgaatgtgaggctactgtcaaaagttatcctccatttattgaagctatgaagagaagaggtgtggatgacatggatcttgttatggtggatgcttggtgtgctggctactacagcgaagctgatgctcctagtcgcagacttggcaagcctttgatattttgcagaactgagagtgatagccccatggagaatggttatgctcgtcctgtagaaggaatccatgttgttgttgatatgcagaataatgctgtgatagagtttgaagataggaagttggttcctctaccccctccagatcatttgagaaactatactcctggggagacaagaggaggtgttgatcgaagtgatgtaaaaccacttatcatcaatcagcctgagggtccaagttttcgaattaatggctattttgtggaatggcagaagtggaacttccgtattggcttcacccccaaagagggtttggttatctattctgttgcttatgttgatggtagccgtggacgtagacctatagcacataggctgagctttgttgagatggttgttccttatggagatccaagtgaaccacattatcgcaagaatgcatttgatgctggagaagatggacttggaaaaaatgctcattctcttaagaagggatgcgattgcttgggctacataaaatattttgatgcacatttcacaaacttcactggtggtgtggagacaattgagaactgtgtttgtttgcatgaggaggatcatgggatcctttggaaacatcaagactggagaactggtttagcagaagtaaggcggtcaaggaggctcactgtttcatttatctgtacagttgcaaactatgagtatggtttttactggcacttctatcaggatgggaaaatagaggcagaagtaaagcttactggaattctcagtttaggggccttgatgcctggggaatcgaggaaatatggcacaactattgcccctggtctgtatgcaccagttcatcagcatttctttgttgcccgtatggacatggctgttgattgcaaacctaatgaagctcataaccaggtggttgaggttaatgttaaagtggaaagtgcaggcacacataatgtgcataataatgctttctatgctgaagagaagttgctcaaatctgagttgcaagcaatgcgtgattgcgacccttcatctgcccgccactggattgtacgcaacacacgaactgtgaatcggacggggcagccaactggctacaggctcgtacctggttcgaactgcctgcctttggctctgcctgaggcgaaatttctgaggagggctgggttcttgaagcacaacctctgggtcactcaatacaagcgtggcgagatgttccctggaggggagtttcccaaccagaatcctcgcatccatgagggtctgccaacatgggtcaagaatgataggcctctggaggaaaccgacattgttctctggtacgtgttcgggctcacccatatccccaggctagaagattggccagtcatgccggtggagcacataggcttcatgctcatgccacatggattcttcaactgctcgcctgcggtcgacgtgcctcccagctcgtccgatgcggatgtcaaggaagccgagtcgcccaaggccatccagaatagcctcatatcgaagctgtgagctttgctgttctgccgaggaaaaaggatccgcgcgcggctgctctccctactatttttttatcgtattccgcgagtaaaaaggaaaactgctcgatgtccttttgtttgttgcttggtaataccgttctgtttgctataattatcgatcagcgggatgtgaagtactgtttacattgctcgcgttctaataaagtactgtttggacttgcttaaaaaaaaaaaaaaaaaaaaacaacaacaa

SEQ ID NO: 211486 - DNA, 2896 bp, Zea Mays
agcacacaacccaacactactctccctcccagtctcgccaacgccaccacccccaccattccaaacccccgtctcccaccggctgccgtttccctcccccctccctccctgcctccctcggcggctcctcgcggacggagagaaccccgctcccttgcctagggttcccggaaccctagccccgatccgtacgcgcgagggtccccggcgacgaggaggctgctgtgaggggagggggcagaaggcgcgggaggcggaggcctgtgctgtatgtcagatcgtgggagccggcgaggcggaggcggaggaggagactacggacacggtcagctcgcgaacccgctccaatggccgcagctaaggaaaaggcgtcggtatgctgccgcgatgcgcccgcgcgtgtcgctggcgccccagtcgtccccatgcgcgcgatcgccgcgtccccggtcggcaaggtcgtcgccctcgccgcgggaggcggtgagcgcgtttctgcgtcggctgctggctcaagcggcgccgtgatcgaggagatcgccgcggtccagcccaccaccgcgaaggcatcctccaaagggataccaataatgacaagagcccagaggtgtcaccctttggacccattatctgctgctgaaattgcagttgctgtagcaactgtaagagttgctggaagatctcctgaggaaagagacagcatgcgctttgttgaagctgtgctgttggagccagaaaagaatgttgtggcactggccgacgcctacttctttccacctttccaaccatcactgctccctagaagcaaaggttctgctgttattccaagcaggctacctcctaggagggccagacttgttgtctataacaaacaatcaaatgagacaagtatttggatagtggaactatctgaagtgcatgccgctactaggggtggacatcacagagggaaggtgatatcatctgaagttattccggatgttcaacctgccatggatgctatggagtatgctgaatgtgaggctactgtcaaaagttatcctccatttattgaagctatgaagagaagaggtgtgctggctactacagcgaagctgatgctcctagtcgcagacttggcaagcctttgatattttgcagaactgagagtgatagccccatggagaatggttatgctcgtcctgtagaaggaatccatgttgttgttgatatgcagaataatgctgtgatagagtttgaagataggaagttggttcctctaccccctccagatcatttgagaaactatactcctggggagacaagaggaggtgttgatcgaagtgatgtaaaaccacttatcatcaatcagcctgagggtccaagttttcgaattaatggctattttgtggaatggcagaagtggaacttccgtattggcttcacccccaaagagggtttggttatctattctgttgcttatgttgatggtagccgtggacgtagacctatagcacataggctgagctttgttgagatggttgttccttatggagatccaagtgaaccacattatcgcaagaatgcatttgatgctggagaagatggacttggaaaaaatgctcattctcttaagaagggatgcgattgcttgggctacataaaatattttgatgcacatttcacaaacttcactggtggtgtggagacaattgagaactgtgtttgtttgcatgaggaggatcatgggatcctttggaaacatcaagactggagaactggtttagcagaagtaaggcggtcaaggaggctcactgtttcatttatctgtacagttgcaaactatgagtatggtttttactggcacttctatcaggatgggaaaatagaggcagaagtaaagcttactggaattctcagtttaggggccttgatgcctggggaatcgaggaaatatggcacaactattgcccctggtctgtatgcaccagttcatcagcatttctttgttgcccgtatggacatggctgttgattgcaaacctaatgaagctcataaccaggtggttgaggttaatgttaaagtggaaagtgcaggcacacataatgtgcataataatgctttctatgctgaagagaagttgctcaaatctgagttgcaagcaatgcgtgattgcgacccttcatctgcccgccactggattgtacgcaacacacgaactgtgaatcggacggggcagccaactggctacaggctcgtacctggttcgaactgcctgcctttggctctgcctgaggcgaaatttctgaggagggctgggttcttgaagcacaacctctgggtcactcaatacaagcgtggcgagatgttccctggaggggagtttcccaaccagaatcctcgcatccatgagggtctgccaacatgggtcaagaatgataggcctctggaggaaaccgacattgttctctggtacgtgttcgggctcacccatatccccaggctagaagattggccagtcatgccggtggagcacataggcttcatgctcatgccacatggattcttcaactgctcgcctgcggtcgacgtgcctcccagctcgtccgatgcggatgtcaaggaagccgagtcgcccaaggccatccagaatagcctcatatcgaagctgtgagctttgctgttctgccgaggaaaaaggatccgcgcgcggctgctctccctactatttttttatcgtattccgcgagtaaaaaggaaaactgctcgatgtccttttgtttgttgcttggtaataccgttctgtttgctataattatcgatcagcgggatgtgaagtactgtttacattgctcgcgttctaataaagtactgtttggacttgcttaaaaaaaaaaaaaaaaaaaaacaacaacaa

SEQ ID NO: 211487 - DNA, 2752 bp, Zea Mays
cccccctccctccctgcctccctcggcggctcctcgcggacggagagaaccccgctcccttgcctagggttcccggaaccctagccccgatccgtacgcgcgagggtccccggcgacgaggaggctgctgtgaggggagggggcagaaggcgcgggaggcggaggcctgtgctgtatgtcagatcgtgggagccggcgaggcggaggcggaggaggagactacggacacggtcagctcgcgaacccgctccaatggccgcagctaaggaaaaggcgtcggtatgctgccgcgatgcgcccgcgcgtgtcgctggcgccccagtcgtccccatgcgcgcgatcgccgcgtccccggtcggcaaggtcgtcgccctcgccgcgggaggcggtgagcgcgtttctgcgtcggctgctggctcaagcggcgccgtgatcgaggagatcgccgcggtccagcccaccaccgcgaaggcatcctccaaagggataccaataatgacaagagcccagaggtgtcaccctttggacccattatctgctgctgaaattgcagttgctgtagcaactgtaagagttgctggaagatctcctgaggaaagagacagcatgcgctttgttgaagctgtgctgttggagccagaaaagaatgttgtggcactggccgacgcctacttctttccacctttccaaccatcactgctccctagaagcaaaggttctgctgttattccaagcaggctacctcctaggagggccagacttgttgtctataacaaacaatcaaatgagacaagtatttggatagtggaactatctgaagtgcatgccgctactaggggtggacatcacagagggaaggtgatatcatctgaagttattccggatgttcaacctgccatggatgctatggagtatgctgaatgtgaggctactgtcaaaagttatcctccatttattgaagctatgaagagaagaggtgtggatgacatggatcttgttatggtggatgcttggtgtgctggctactacagcgaagctgatgctcctagtcgcagacttggcaagcctttgatattttgcagaactgagagtgatagccccatggagaatggttatgctcgtcctgtagaaggaatccatgttgttgttgatatgcagaataatgctgtgatagagtttgaagataggaagttggttcctctaccccctccagatcatttgagaaactatactcctggggagacaagaggaggtgttgatcgaagtgatgtaaaaccacttatcatcaatcagcctgagggtccaagttttcgaattaatggctattttgtggaatggcagaagtggaacttccgtattggcttcacccccaaagagggtttggttatctattctgttgcttatgttgatggtagccgtggacgtagacctatagcacataggctgagctttgttgagatggttgttccttatggagatccaagtgaaccacattatcgcaagaatgcatttgatgctggagaagatggacttggaaaaaatgctcattctcttaagaagggatgcgattgcttgggctacataaaatattttgatgcacatttcacaaacttcactggtggtgtggagacaattgagaactgtgtttgtttgcatgaggaggatcatgggatcctttggaaacatcaagactggagaactggtttagcagaagtaaggcggtcaaggaggctcactgtttcatttatctgtacagttgcaaactatgagtatggtttttactggcacttctatcaggatgggaaaatagaggcagaagtaaagcttactggaattctcagtttaggggccttgatgcctggggaatcgaggaaatatggcacaactattgcccctggtggttgaggttaatgttaaagtggaaagtgcaggcacacataatgtgcataataatgctttctatgctgaagagaagttgctcaaatctgagttgcaagcaatgcgtgattgcgacccttcatctgcccgccactggattgtacgcaacacacgaactgtgaatcggacggggcagccaactggctacaggctcgtacctggttcgaactgcctgcctttggctctgcctgaggcgaaatttctgaggagggctgggttcttgaagcacaacctctgggtcactcaatacaagcgtggcgagatgttccctggaggggagtttcccaaccagaatcctcgcatccatgagggtctgccaacatgggtcaagaatgataggcctctggaggaaaccgacattgttctctggtacgtgttcgggctcacccatatccccaggctagaagattggccagtcatgccggtggagcacataggcttcatgctcatgccacatggattcttcaactgctcgcctgcggtcgacgtgcctcccagctcgtccgatgcggatgtcaaggaagccgagtcgcccaaggccatccagaatagcctcatatcgaagctgtgagctttgctgttctgccgaggaaaaaggatccgcgcgcggctgctctccctactatttttttatcgtattccgcgagtaaaaaggaaaactgctcgatgtccttttgtttgttgcttggtaataccgttctgtttgctataattatcgatcagcgggatgtgaagtactgtttacattgctcgcgttctaataaagtactgtttggacttgcttaaaaaaaaaaaaaaaaaaaaacaacaacaa

SEQ ID NO: 211488 - DNA, 2627 bp, Zea Mays
agaaaagcagggggggcagcaacggaaacaaaactaaaataatcgtactgtagaagccgagcgcaggagatccaacaacgaaactccccttcgttccttcctcgtgttcttctccctcctgccgccgcggcccgctccgctcccgagccccgttgcacctccacccgccgcttccgtcccgtctcctgccaccttcctctcaccgcaatcgagtcgctgcgcctcctcccgcccgccacctcccgcagccgcagcaggacgagctcgtcgccgccgtgtactagaagaacgggaggtcgctgtcggtctcccgcacaatcctgattcctggacctgcgccgcgtggtttcgcctcaggttggagtgtctcgatttgtcaggatagcttgtataactgaagctttcctttgtatgatgatgggggcatgccatggatcacaagtgagggggctagggtttagtatgtggtagtagctcctgcttcagcaaaagaagcaaggatcactacttttgctgtttgttccgtggaggatctgaatcctatcggcattgattcgggtggcgtcagctgttctgggtggggtagtatgatgaaacagatatttggacggcgcaaggcgtccaaaactgcaggcaaggagtgtggcgggaggacgttcaaccagctgctgtcaggttctggatttgctgacctgagtggccagctgccaattctgtctagtactggggacatctatgggaatggaaaccgtacggggttccaagactcgaggataaatgatactttgttctcttccaacttccgactgttgccgagctttaaggatgtgccaaatacagagaaacagaatctgctcatcaaaaagttgaacatgtgctgcactctgtttgactttgaggatgcggcaaagaacataaaggagaaggagataaagacgctaatgttgttggagatagatgaatatgttaggactgctaacgcgaagttccctgagatcattgtggaggcaatcacaaaaatgatttcagtgaacttgttcaggacactaatttccccacccagggagaagaaggtgcttcaagcttttgatctagaagaggatgaaccattgatggaccctgcgtggccacacttgtaccatgtgtatgagttgctcttgacatttgttcagtctccagaaaatgatgctaaactggctaagaagtatattgaccattcctttattctaaggctgcttgagctctttgactctgaggatgctagggagagggatcgccttaagacggtacttcaccgtatctatgggaagttcatggtgtaccggccatttatccggaaagctataaataacatattctaccagttcatatatgaaactgaaaagcacaatggaattgcagagctcttggagatttttggaagtattatcaacgggtttgctttgccactcaaggaagagcacaaactgttccttggaaggaccttaattccacttcacaagccaaggtgtacttcaatgtaccatcggcagttgtcttactgcattacacagtttgttgaaaaagattgcaaacttgcggatactgttattaggggcctcataaaatattggcctatcaccaacagcacaaaggaggtgctgttcttgggtgagctggaagaggtactagatgcaacacagcctgctgaatttcaaaaatgtatggttcctctttcccaccagatcgctcactgcttgaacagctctcacttccaggttgctgagagagtattatttttctggaacaatattcacttcgagaatttcgttaagcaaaacagtaaggtgatcctgcctatcatcctccctgcattggagaaaaatataaatgggcactggaatcaagtcgtgcaaagcctcagtctgaatgtccgaaagttactctccgatcgtgaccctcaaatgtttactgaatgcttgcgaaaatacgaggaagacaagggcagggagaaggaatttaaactgaagcaagagttggcatggaaacgtctggatgagattgcatcagcaaaagtcacaagtggtgaggctgtccttgtgtctccaaccttgcctcgtcaaccttcattcttgtagcaacctgcactgaatgagtgagtcgttagacattgtacaggattgggttgtagataaaagggggtatatgaagccttcaaggctggtgagcgaaattgaagaaagagatctgagaagccaattgtgcatcatttctgtaaatcccatgccatggcttcttttggcattctggtggttcagtctgcttctgtagtccgttgtttgggacaatgtattttttttcttgtaatggaaaatgttgagatgtcctgcaggcggcttaaatgataaaagttattaattttcatcacagagtgccatggcacgacagatggatacaggggcaccacaccacgtaagactttgttcgtttacaccaatcccgctctggattagtatggattggaattaaatccatgcctcaatccatgccccaaaataatccatgactacttaattttttttattcggttaaacccatcatggaatataacccaaatgtttgggaattttttaaactatggaagacat

SEQ ID NO: 211489 - DNA, 3406 bp, Zea Mays
cctggcggcacgcccttccctcctccgttcctcagccgcaaggcgccaagcgggcggccctgcgtgcgcgggcgcgggcgcggaccctccgaggcagccagacgcggcggccaccgcggatcaagagcgcgagtgccgttcaccagcgaggtggcgcggagagccgagagcaccagcacagatataacaaggcagcagccgccgccgccgccgcccgccgtaaccaggtgccaccggcgtgggcgtgacccaccacgaggcggtgctggcaacacccgaccgtagcgcggcatctccgtcctcgtcgtcaatccctgcgggtgtgcaacagtagcgatgactaggtgggatgaaattttgactcttccagttcagaacccaccatcattggagttctcagcagcggatatctcgtggtcaatggtggagggctggagggattctatggataggcttgcgctgattccatattctagggtgaatgactttgtcagaggagagtcgaacaacaaagattgtccatcaagatttcatgttgaagcacggagaaggcgtcctccgacaatgaactgcaagcccaaagttgatgggatacttgagtatattctgtattggtgttcttttggtccagatgattataggaagggtggtaatgtacggcctagcaggcccatcgcggaaaagagaaaaacacctgctggccgccctaatacaaagaggggatgtgtgtgccattttattgtgaagcgcttgattgttgaaccatctgtggctcttgtgatatataaccacaataagcatgtagataagaaaggcatgccatgccatggttctatggacaagatggctgtagggacaaaggcaatgtttgcaccatacatatctgatgagttgcgtcttcaagttatgtctttgctctatgttggcattccagtggagaccataatgcagaggcatactgaaatggttgaaaagcaaggaggtccatcaaacagggacgatcttcttactcatagatatgttaggagactggaaaggaaaatacgtcgttctgtttatgagcttgatgatgatgacgctattagtattggcttatgggttgaaaataaccaggattgtgtgttcttctatgaagatttttcggatacagacacctttgtcttgggcatccagacagattggcagctacagcaaatgattcagtttggcagccatagtttaatggcttctgattcaaagtttggaacaaacaagctaaagtatcctgtacatagcatccttgttttcgatcagcacaaaaatgcaattcctgttgcgtggattataacccccaattttgcacatggtgaaatatataaatgggtgggtgctctttatgatcgagcgcatacaaaagatcctacttggcaattgggtggcttcattattgatggtcccttgactgacgttcgcacaataagagaagtattccattgccctgtgctgatcagtttatggcgtatccggcatgcttggcataaaaatttggttaacaaatgttcagacattgagaagcgatcgacaatggccaaacgtcttggagatgcaatttctattatatgcagaggaactggtgatgttgaattatttgaagcctttctgcaagattttgttgagtgtgctgggtttcttgactacttcaaagctgtatggcttccaagacttggggcatggataactgtcttaaaggccacggcattggctagtgcacaggtagcttcagcaatagagagttaccatcacctgctaaaacttcggctgctgaatgaggcagatgaaagtgtctactggcgtgctgattggttggtcgataagttgggtacaaaggtccattcttactactggctggatgaattctcaggaaagaacagtttttcgcgttactggaggagtgagtggagtagtggcccaaacccatggtgccagggaatgcagattccagattccgatgtcgtcattgaaggcaattatgccagtgtggtcagccagaagaacaaggagaagtcccatgtcgtactgaatccaggttctgagtttgcgttgtgcgattgtagctggtcaatgaaggggaacctttgcaaacatgtaataaagtcggcaaaggtctgccgtgacaggggattggcactgccatcgttggccatgttccactattaccaggcattggcaaatcttgttcattgtccacccagtgatactttgattagtgaccatgcaatggctctggcagtttctgttaaaacacagctagatgcagtgttgtgcgctgttaatggaagttcttcaattaggccaggtttccaggatccacagtcaacgagtaagacaagagaagctgaaattgaggaagccaactctgagaatggtgtgtgcacaagtcaaccccagcctggtgctggtgatgatgaggatcaggccattcggactggcaagagaagaaagttaggggacgcttctggtgacactgaagatggttccatatatcaggacagtctggctcgcaagaaatgcaagtcaggggaagcttccggtgacgatgaagaggcctccacagaagagggcagtcgggcttgtgaaagtaggaagccaggagaagcttctactaacaatgaagaggtttccataggccagggcagtagagatcatgagaaaagaaagtcgggagaacctcctggcaatgaaggaacttcagcaacgcaagctacggaaccttctgagactgaaaccagccaagcaaccaatggactggttaggtccctcctcccctcttcggaatgcacctagaacgccttgcgggtcttgtaaattcctagttggattagtcaactgatgaattaaacagcagctgagcttaaaaaaaactagtagctgcgtctgttaagtgtgaacggaagcataaatcagttcatttatcattatgaatgggggggggggggggggtcgtgtgcattatgcaggacaacaattgcaagtcccagtttaactgtttggcacgatgttcaaaatctaatgatcccatgttcttttttttggtaaatgaagcaataccatatcatatggttacctaaacctaccgaattaaggtactgttttgctgtatatagcattcacacttctctagaatagcttgttatgcataagtgattactacttattattacttcctcccgtccctgtgttctggattgaactagagatacaaagttaatctcagttcctatgctttttttatcctaattttgtatctctgatgttcggatgaatttgtttgtgatgttcaaatacagtaacttaaatggcttggcacggctttgatcagcacatctgtagaaaaaaactgtaataaagtaataacagtgtggaaatg

SEQ ID NO: 211490 - DNA, 1129 bp, Zea Mays
gcacaaagcccaaaaccctattacttcccgagcagcggcgaccaaaacatccagccgccgcgcgcagtctcctcccagacccatctgcgcgccgtcgtctcctccccagtcggccggccgcgcgcagtctcctccccagcccatccgcgcgccgtcgtctcctccccagtcgcccggccgcgcgcagtctcctccccagcccatccgcgcgccgtcgtctcctccccagccggccggccgcgcgtcgtcccgtccccagccacgcgcgcgcactccgccgtcccgtctggtactttgcggccaagttcttcgggcccaagcgcccacccgcggaccccgggatgctcatgtatgttcaacctcttccagaagggcgagccaatggatagcgctttgagtgtgttaattggatatcaggaggctaagctgattaattttgctaatgaggatgcacttatttggcacgaggcaaacataccatatgcagtctggggacctaccagtactagaacacggtcattaacatactatccgtcagaggctctcaagcataatggctctttgtatgctcatgtttacttcgcccgttcgggttatcctgtggaccctacagatccaaaatatgagcagaaatcttcgtttgggaggacccatcggctgaaaattacactgctgttaaccaacatgcctatgcattcaccaatattctattttcatcagggaccacagggatctaaatgcttacatctggggatagatgacaagagggaagttgtcggcactactgtcgttgttcgggagcttttttacaatcaaccagtacggaggaaacaaatgcaatctagtgagaaaagagaactacatcatgtgaagaagtgtgtccttcaaattgcgcttattcatccacagatttcactcagactgcttgataatgacagcgaagatgagctgctatacacagaattttcttcatcccctttgcctcttatatcaaaaacttttggggatgatatctccagatgtctccatgagataactgcctctgaccagggctggactctttcaggtcatatatctgggcctgcagatgtgttttgtacgaaggatgcccaatacttgtgtatcctcc

SEQ ID NO: 211491 - DNA, 2337 bp, Zea Mays
atatggccattaaatctttttcctcgacatgggcagccgagtgagagctttggagtacgggggagctagcgaatcgcatgcggtcgaaacagttcggtctctccaattaactagggagtgcggaagtgagtacgctcaagctggaggaggacaagaaccagttgtccaagggcttggacccttggagcaaccctaccgccgccaccagcaccctgcactacctgctccaggagaaggagagagcgcaggcgcatgagcagctccagatctaccaccagcaaggattcagctacctccagcaccgccggaggcagcagcagcagcagcagcagccgagggctgcaggagctggcagtgatggcgtcagcagcggcgagtcgacgcccgtggacgccctggcgaccgcattcgggagcggccgcatcgtgcggtctgccgccgggcgcaaggaccgccacagcaaggtgtgcaccgcgcgcgggctgcgcgaccgccgtgtccgcctcgccgcgcacacggccatccggttctacgacgtgcaggaccggctaggctacgaccgccccagcaaagccgtcgactggctcatccgtaacgctaaggccgccatcgacgagctttcggccgaccgggaagaggggcagcctgccgcggaggcagcggatgccactactaccgagccggccgagcaggtgacctcgacgtcctacgggttcgccatcggtggtgtggccggctccttcatgccacattcggtcggtgccgatgacgtctccggctccggctccggctccggctccggcaacgtcaagtctttgttcccctcgtcgtcgacaacgagcactacccccacccaggacgagtacaggggctccccgccggaccttctgtcgcgcacgaccagcagcaaccagcctcaggagctttgcctcactctccagtctaccaataaccaccaccaccagcagcagcagcagcagcagatcttcagccatgtgtccccgaaccaccacggtagtatgatctccgttgcaggcgtccaaggctggccggaggcgcacggccagagaatgccgccgtggcatgctccagagaacagcggcgcgggagacgacgggcgcggggccgccggaaatggcgacagttacatgttcggcgtgcccggcccacggcaagggttagaccacctgcagggccagctgatcttctcccaaggggaaccccttcagtccagtggcggcggctggccgtcgtcgtctgcccgcgcttggctcgaccccctcgtcgcgatccaccagcaccagccgtcgacgatgtccgggcaggtcggcttcggtcatctggttggcggcgccggaagcgggtttatggggttcctcgcgccgccggcccagcggctgcagctgcagagcgaggacgagcaaggaagcgaagcaatgagggagtgatgagcgtgattagctactactgctgaggtacggtgtgcgagcttaccacgcactgctctccattgatctgctcagttatatgtcattgtcatttcatgtaggagtttgtttaggtgatggaatttcgcatcattaattattagctgctgcaatattcaatcatgcctctgtataagtcgtccttggaacctgacagcgttactgttacattagtggctactactacgtacttttgtttttttatttcattctttttttttccatttcatggttgtcaacatggataagatgtgtggtgatgatgagatagacgggacgagatgtgatctcgatggggtttcccctctttggaccattatttaatgtttctcttatcacaccctagatcatatcctgctgattccataaagcaggcaaagcagcagccgatgcaatctatcagaggggggcaagaagaagaaagaaagcagcggcaaaaggatggagcaaactaaagacgaaataacaaagaacacgaaccgggccggcaggggcagcagggattcaaaatcagttcagtgtccctgtagcagttaggagagtgcaagcgctgtgctgtttgcttctgagttctgactctccatgacgataatgataggggccgcagggcaggcagcagaggaagaagtggcccggggcagacggccgcggtgggggatctgtgtgaactgcgaaagtaatttttagcaggccgaccaaatcattacccgagacaaatgaccgtctccattattggtcacaggagcatcagaacaatgttcgtcttcgaaaattatttacgcagacgagcgttctaaggtgttcattttcaaaaaccatcaatcaacaaagacggtccttcatcaacgaa

SEQ ID NO: 211492 - DNA, 1711 bp, Zea Mays
tacaagtagcttttaccgctagcaagtttttaccggcacggcacaagggatggggaacgggcggcccaccggggccgagtcgtcagatcagcaggccgtcgcgtcacgtcagtacaggaggcgtcagatcctcgtgttgggcgaggggcaccggacacgtctcgcttgccctttctgctagtacgtgcagtgcagtagtcgcttgccctttccttgactcttgtggcttgtgtcaggtgtcctcggcgctaagggacgaggatgcaggaggcggcagcaggcgcctatccctcctacatggagccggagccggagccggagcagacgggtgcatcggcgactgtgggtgtgatgggctgccgctcgcccacgtgcccgccttggctccaagcggccattgcagacatcgatcagcgggtgcgcgcgctggcggtggacgatgccgcgccgcccacggagcactccttcgcggagcgcgccgaggagtactaccagaagcggccgcagctgctggccctcctcgccgacctccaccgccgctacctctgcctggccgaccgctactgccaccaccagcacaagcgagagcagccctcgctgccggcgtctgcctcctccgactgcggctcgtccgacgtcgacgaccgctgctccgacgccggcagctcgctctccttccaggcccagcacgcgccgccgcgggccggactccccgccgacgaagaggaggagctgctggtggcggagctggtggccgcgtgggtggagcgcgacgtgctggcggacgaggcggcgcggcgcgcggcggagtcggcgcgcaggatccagctgcaggggagcctggtggaggtgctggagtcggagcgcctggtgctgctgggcgagaacgcgcgcctggggttccgcgcgacggcggccgaggacgaggccgcggcggcggcggccgacctgggctacgcgcgccgccgcgccgccgagatggcccgcctcgtgctcaggctccgcgaggaccaccgcgcctgcgtgctggggcgcagggccgaggcgctgcaggcgcgggtgtacgcgctggagctccgcaaccgcgagtgctgcgaggccacggcggcgtgggaggccgaggtccagcggctcagcgcagagaaccgacgcctcgcggaccaagccatgatggcgaggaggaagcgcaagggcggtggtggtgggtggtgggcgagggtcaggatggcagcggccgggtggacgccgtgtgcgcccgcggtcacggtcgccgagcagaccaaggggaaggaggacggcaagtaccaccactacggcggcggatgcttctgtgtctagactaggagatgagacggcggcggcgatctagccctcctttttgttagtagtaattactattataattcaggacttggcaggtgaatgtgaatgctgctgggtcggatgcataattctggagaagacgatgattgtgctccgcaggcactagtaaaacaacatgcaattcgtatgatctgttcaatacattataccatggtgttcccgtattctgtagtacaagaaattccaagatctcaatatattgctcttgggaatttagcacacggttcaaaacttgtgaatttggccgcgtgaggatgtgatgaatggcacttgcttcaggttgtaatcaattttccctattcagtcaatctttgctctggaggtttta

SEQ ID NO: 211493 - DNA, 2360 bp, Zea Mays
ggttgattcctgatctgcaaatcccactgccgccacacgccacctgccaccgccactggtttttggctgttcccgggcaaactcgccaccaattgccacgctgggtgatgctagcttagcagcttttttgtatcttcccagttgtttgaactatatggccgctcctctcctccatgttccatgccgcctcggctgcaaggatcataaacaaacttattcactttttatccgataataaatacgaccgacggctgcatgcgtgagaagagatcaagccaccgctagtcgtcgcggtactcaagtgagatcgagccgggggattcgggatcaggccggtacggggggcgaccgaggaccgccgatggccgcggctccagacatggacgaacaagatgcggcaatcgagggagggcagctcgtcgtgcctcttctcggaagccgaagtgcaagcaccgccacgggctcgccgtcgcaggacgcgtcctcgctccgccgcctctacgccggccacgccctcgccagatggggcgccaggatgtgggagttctcagttgggctgtacatgatccgcatctggccaggctcgctgctcttcactgcgatttacggcgtcgtcgagtcgtcctccgtcgcggtgtttggtcccacagttggcacactggtcgataacctcacgtaccttcaggttcttggcctatggcttctagtccaaagcctgtccttcattgtcgccggagcctcagtaaccgccctgcttgtttacgacgacctgaaagccacaagcttccctgttttcatggcgctggtcatcatgaccaacgtggcaggtgcgctagcagcgctctcaacgcttgccggaaccatactgatcgagagagaatgggtggtggtgatctccagcaggcacccacctgcagtgctgacggggatcaactcggtggtccggcggatcgacctgagctgcaagctgctggcccctgtcttctccggcctcgtcatcagcttcgtgtcggcgcaggcctccgcggcggctctggcgttgtggaacgtcgcctcggtggggctggagtactggctcttcgtttctgtgtacaatggcgtgccagcgctcgctgagagcagccggctgagaacagctggtgcaaatgcaagtgaggccatggtgctgccatcgtcgtcgtcgtcggagaacgtggtgccggccgataaggagctggattggagggttaggatgacggagcagctatccatcataccatgctgggagtcatgggtggtgtacctgaggcaggacgtggcgctcccaggcgtcgccctcgccttcctctactttagcgttctgagcttcggcacgctgatgacggcgaccctggactgggaaggcatacctgcgtacgtcatcagtttggcaaggggcttcagcgccatcgttggcatcggcgcaacgctgctgtaccctgtggtgcactcatgggtgtccacactacggacaggactgtggtccatttggatgcaatggtgctgcctgctggtgtgcgtcgcttccatctgggcggcgagcgacgtggcgtcggcgtggatgctgatggccggcgtcgccgcgtcgcgcctagggctctggatgttcgacctcgccgtgatgcagctgatgcaggatggcgtgcccgaccacgagcgctgcgtcgtgggcggggtgcagaattcgctgcagtccgtgttcgatctgctcacctatatcatgggcatcatcatctccgaccccagggatttcagcgagctggtcgtgttgtccttcttcctggtgacctgcgctgcagccatgtacacgctgcacgtctaccgcgtgcgcaagcacctcttccacttcgacaagatcctagccaagatcagctgatatttctttgctcttggcgactggaaattgctgatttgacactgggtttgaaacaaccagcacggagtatactggttgctcttgtaaacagttgtgttttttccatcttctggtgtttagaaaattgtgtaatctaggaacatttttaccaagtatccacaagtatccactgtaggtgaactggaatttcctaaaccaacaggagttgagactgaagggttctaacccaaggtggtgtggttggatcagggcttttgtgaaaatgtggactttaaagttataatgagaaaatgagttaaaacaacaagatgatcctttatcactgatgttgttcaacgatttcgtggatatgtaagctatcatcttatatatctagagctaaggaggaagaacaaatagaacaagccattccaaacctaagtggaaaatagcatcgattttgcaatatgcaggatgacaagttttc

SEQ ID NO: 211494 - DNA, 1188 bp, Zea Mays
ctcggccttcttatataataactttttgagtaccaatgatgtaaagggacacaagctctagcaatgtttctgcttctcatgtaggccgtgtaagacgtcgcaaacatccaactgaggctaccatagatgggaatagagttaatggacaaccattgcttgtcagtgatcaggacaaatataaatcagtgcttacccatacgtattctacagtatggatgattggaggctttgcctttattatttatatgggtcatctatatatctgggctatggtggttgtgattcaaatatacatggcaagagaacttttcaacttactcagaaaatccagtgaagagaaacaactgccagggttcagggtcctgaattgatctagatgccaaccattaggcatgattcgattctagaagatcctgatggtgacacctcacaaccacaacacatctcggactactaccatgtcagtctcaagaatgtgatgataacatgaccattcaaattggtgaagtacttcagatgcaaattgaggttcaaagatagttaaatgaactacttgagaaatggtcatttgttaaatctgagcagaaaagatcggaaatccaagggcttatggaattggtattgcaaagatcttcatgtgattcggatccttataaggaaagataatttatatacatgagggagccacctattgattcttttgatgtctctacatgtgttgctgcggaggaagccgacagcgcagctatggtcgttgagaagaaggttgtcgcgtctgtgtagcttgtcgccgttgctgcgcacaaggcgggctgcgccatggatgctatctgtttgtattacttttggttggttgcattaagtgttgtactgtgtgtttggtaatgcagttacttttgtattcagtgaactgtttggtaatgcggttccttctgtatttagtgaattgtgtggtactgcgtacacactgtagttccttttgtattaagtgtagtagtgatgaggtaatgcattgcacttgtactactgagctaaatctatgtacttgtgcctgttgtggctaaaaagcatatgttaagaaaatactgctttctgtgaatgaggtactagcaatctgtgtacattatggctctaaatggctaagtctgtgtacttgtgtttatatgaaatctgaaatatctgttgagg

SEQ ID NO: 211495 - DNA, 1569 bp, Zea Mays
gtgacaatagccttaggaacccaaatgcaagttttatctcccttgcattttgcccctaatttcctagcaattactttcttatcctttctacaaattgcaaaggaagcattgcaagcatgataaattgtagaaggttcattacttgctttcctaggtatatgaacaacatttctcctaggcatatgatgaataacatttttcctaggcatatcatgcacaatagaagaactagaagcatgcatagcatatgaatcataagagtaattcctataagcatttctagagaattttctatcactataaatgaaagcatgattcttttgaacactattagccataggggccttccctttctccttggcggagatgggagccttatgacttgttaagttcttgacttccctcttaaagccaagcccatccttaattgaggggtgtctaccaacagtgtaggcatcccttgcaaattttagtttatcaaattcatttttgctagtcttaagttgggcattaagactagccacttcaccatttagttttgcaatagaagtaaggtgctcaacacatgcatcaacattaaagtccttacacctattgcatatcactacatgttctacacaagaattagatctatatttgctacttctagcttagcatttaaatcatcattaacactttttaaactagaaatagtctcatggcaagtagataattcacaagaaagcatttcattccttttaacttctaaagcaagagatttttggacatctacaaaattatcatgctcttcatacaaaagatcctcttgcttttctaacaatctattcttgtcattcaaagcatcaattaattcattgattttatcaattttagttctatctaaacctttgaataaacttgcatagtctatttcatcatcgctagattcatcatcacttgaagaagcatatgtagtattattcctagtgcataccttcttttcctttgccatgaggcaggtgtgatgctcattggggaagagggatgatttgttgaaggcagaggcagcaagtccttcgtcgtcggatgaagagcaatccgagtcccactctttgccaaggtgtgcctcgccccttcgctttctttaactttttgagtaccaatgatgtaaagggacacaagctctagcaatgtttctgcttctcatgtaggccgtgtaagacgtcgcaaacatccaactgaggctaccatagatgggaatagagttaatggacaaccattgcttgtcagtgatcaggacaaatataaatcagtgcttacccatacgtattctacagtatggatgattggaggctttgcctttattatttatatgggtcatctatatatctgggctatggtggttgtgattcaaatatacatggcaagagaacttttcaacttactcagaaaatccagtgaagagaaacaactgccagggttcagggtcctgaattggcactttttttcacggcaatgctgtacacttatgggcgctttcttagtcgtcaactggtgaatatagtgacttcagatcacttgctttataag

SEQ ID NO: 211496 - DNA, 1489 bp, Zea Mays
ctcaccaactccacgttacacaacccagccaaaaagcaagatttgtcataatcctttgagcctaaatcatttatttatttttggtttctctgaagattcggttcttcccagagttactagagactagacgctctgaaggtcccgtggccgtggatgcgaatcgatggccggggttgaggaagaaggcgaggtggcggccctgcgggaggccctgaggcagcaggtgcaggccgtggaggagctgcgggcggagctggaggaggagcggcaggcggcggcgtcaggagccgatgaggcactggctatgatcctgcgtctgcaggcggagaaggcggcggagcgtatggaggcggagcagttccaccgggtggccaaggagcggatccagtatgatgaggacacgctggctttcctcagggccgtcgtcttccaccaggagatggagatcagctcgctcaaccgcaggctgctcgccgtccacgccaccggggacgatcccctttcgccggcagtcgatctcccctggctgaggaagctggccaagagcggcgtggcgtccaggaggaacgcgtccctcccggcggcacacctggaggagctctgctcggagctcgacgtcgtcgtcgacacggacgccgacaagaagagggtgggcgaccggaggccagcaaggacggtctcggacatcggcgaggtgatcagcagggagaaggagtgggcgacgagacccaatcagacggcgccaacgcccaggctgtaccggtcggcctcacactcccacggcctcccccggcgcgcgacgtgctgctccgcgcagtgtggcgtgcgctccgcaggccgggcctcgccagagatcatcgccgaggaagacgagaaatcgtgcaagagcaacgccgcactggaagccgacatcgagcagatcaaggccaccgtgctgtctctccacaccgacctcacaaagctaagagaatccaccttgtccatggcagacgcacattcccagatactagccgagatccacgcaaagctcgacggcgtcacgccgcggcgacagacgaacttcgaaccaaggtctgagctgctgctgaagaaggccaccagaggaggcagcagcaacagttcttcgtcttccaaggagcagagctaccaataccagtggcaggctgacgtgctgatgaaccatttcattgaggtgcctcttgattttgggcttggccgtcgcgattagaaaagttttgattaactcctaacgtgtaagcaatgccatggtcagttctgtcagtgcaaaatttgtttttgctgtttttattagctctttatttaatcaggcattgtaataataatatatagcatctcttctgagatgaacgaaaggtgaaacaataatttgcggcctttttttacctcatcgttattattatgttacttaagaaacattcggtagcatgccaaatcaatgcacgactgcttgtttgaaacctgtttttcc

SEQ ID NO: 211497 - DNA, 3253 bp, Zea Mays
gtctgctcgctgcctcgtttccgccgccgacccattcccgatgtgacgccacccgacttcgcccctttctgacgcctccgtcctttgtcctgtttgacgtccatccgctcgacaagctagatctcgctcgtcgcaacgatatgacttgtcccctgcagtcggcgaacttggcgaactagaaaatcatggctctcatgtgatctttttggcccccctgaattttcgtcctgcgtccgccactgtttaagcccccacagccccacccaataatccgccacgacaataaacaaccagcaccagcagtccagcggcaacaataatcaaatcaaagatcaggaggggggagaaacggcttttctctagcaggccctccggttgtttttattatattgggtgctgttgtttgttgcaggtggtgggtggtgcagggattctttatttctggaggcaggaaggaggaagaagaaagaagaaacatcagaaccgacccgactatcagagatagagagagagaggagctctctcctcttcttttgcttttggtattgttatcttgggatctgattttgtccccatactaggagggagtgagggaaggagggaggaggctgggcttgtttctcctctcttctctcatctcagttcctcctcgcaaggctggccgtcggctcggctctgttgacagcaatccctgcactgcagtcttgccatgctccccacgaggagcgcaccatcagagtgattctgcagaaggattcattctactggcgagccgagctggtgaaggagctataataagcctagcgctcacttcagtcatcagccaagtgattgaaaaaggcaagtcgtctgaattattggttccaagggctctgtagttgcttctccacactttcctatgcttttgcattaatcttgacaactgagtactcaaagctgggatatggctacttattattcgagccctgacagtgaaagagattcacaaacaatgtactcaacagagtcaggcaatgcatcatatcccgtgccatcagccctagggaactttctttatctgaacagtgcatcttctggaccttatacagaatttaatggaattgtccagtctcaacagaatttcatggaacttactggtcatccttcagcaatttcacatgattcatcatccaacgaagctactaacattggcacttcactgacagaacagcgctcttttggtcctttgaaagatatgagaaatgagatgttgatgcatttgatggatggagcacacagcagtggcagtgacctcatccacaatgatgaccatagcactgcacagctcgagtttggcatgttaaacaaccacaattcaacaagtcttccatcagcatcaggccaagggctgtctctgagcctcaatacacatatcttggcaccttcctatccatactggtctgcaaagcaggacttattaacaccaaattcttaccagggtgatgacaacagaatgaagaatatgcagtctgaggcttcacaggcaatccgaaactctaagtatctgaaggcagcacaggagttgcttgatgagattgtcagtgtttggaagagtgttaaacagaaaacagataaaggcccttctgaagcaggaaagtcagatggaaaagagactgatggggggactaaaagtgagggagtatcttttgatccacaagagtctggtgccaatacagcagctgagctttcaactgctgagaaacaagagctccagaataagatggtgaaacttatggcaatgttggatgaggtggatcggaagtacaaacactattatcatcggatgcaacttgtaatgtcatcgtttgatatggttgctggttctggagctgccaagccttatactgcagttgccctccagacaatctcacggcatttccgatgtctaaaggatgctatcaatgatcaaattagtgttatcaggaagaaacttggagaggatgacgatgcatctggcaaagagggcaaactaattcgccttcgttatatcgatcagcaaataaggcaacagcgagctttccaacagtatggtatgctacagcaaaatgcttggaggccacagagggggctacctgaaaattcagtctcgattctccgggcttggctttttgaacacttccttcacccgtatccaaaagactctgaaaagctaatgttatcgagacaaactgggttaacaagaagtcagatttcaaattggttcatcaatgcccgtgtccggctgtggaagccaatgatcgaagacatgtacaaagaagagataggtgaggcagagctagactccaactcttcctctgacaatgtgcagccgaacaaggacaagccgccatcttccgaagaaaaggaccataagacctcaacaagccaggtttgccaaaccagccagcttggcgaatccaaagccaacattggtggagtggtgagcttttgtggagcgccagccggcggcttccacaacgatgccaaccccgatgacagcttcatgagcctgatgctgaaggcccagagaccgggcgaaaccgatggcagcggtctcctccatgatgccgtcgctcatcactccgatgagagcgcgcggttcatggcgtaccacctgacagagtttgggaggtatgggaacaacaacgtctcactgactctggggttgcagcacgccgagaacacccagccgggcttccccggcgtcagagaccaagacatctacaactccacagctcctctcaacgtcacctccacatcttcagagtatgattcggcgagccaaatagatcaacaacggcagctgtttgaggtgtcacctctgatgcatgatttcgtggcctgaatttcagctgacgcactggaaaacgtggggaagtgacttgtcatttgtagtgccaggacgaacaatatgcctggactgaattttcaggcgtggaaatgtagctgtagttgtaattggggtacagaatggacgaggtatatagcataaatgttatgtaaatttagtgggggcaggggtgatagtggtaaagaaatcctgtaaagatggaatacattttatacgtgtaaaatacgagtatttaagggccacgctgtaaaaatagatttacctgtaactgtaacgagtgtttgtaatgagtgtaaagaactgccacatgccatattttcgatgggtgagaagatatagaaatcttattttctttgttaattgttaggtagcatggctagggtg

SEQ ID NO: 211498 - DNA, 2786 bp, Zea Mays
gaaacatcagaaccgacccgactatcagagatagagagagagaggagctctctcctcttcttttgcttttggtattgttatcttgggatctgattttgtccccatactaggagggagtgagggaaggagggaggaggctgggcttgtttctcctctcttctctcatctcagttcctcctcgcaaggctggccgtcggctcggctctgttgacagcaatccctgcactgcagtcttgccatgctccccacgaggagcgcaccatcagacagagtgattctgcagaaggattcattctactggcgagccgagctggtgaaggagctataataagcctagcgctcacttcagtcatcagccaagtgattgaaaaaggcaagtcgtctgaattattggttccaagggctctgtagttgcttctccacactttcctatgcttttgcattaatcttgacaactgagtactcaaagctgggatatggctacttattattcgagccctgacagtgaaagagattcacaaacaatgtactcaacagagtcaggcaatgcatcatatcccgtgccatcagccctagggaactttctttatctgaacagtgcatcttctggaccttatacagaatttaatggaattgtccagtctcaacagaatttcatggaacttactggtcatccttcagcaatttcacatgattcatcatccaacgaagctactaacattggcacttcactgacagaacagcgctcttttggtcctttgaaagatatgagaaatgagatgttgatgcatttgatggatggagcacacagcagtggcagtgacctcatccacaatgatgaccatagcactgcacagctcgagtttggcatgttaaacaaccacaattcaacaagtcttccatcagcatcaggccaagggctgtctctgagcctcaatacacatatcttggcaccttcctatccatactggtctgcaaagcaggacttattaacaccaaattcttaccagggtgatgacaacagaatgaagaatatgcagtctgaggcttcacaggcaatccgaaactctaagtatctgaaggcagcacaggagttgcttgatgagattgtcagtgtttggaagagtgttaaacagaaaacagataaaggcccttctgaagcaggaaagtcagatggaaaagagactgatggggggactaaaagtgagggagtatcttttgatccacaagagtctggtgccaatacagcagctgagctttcaactgctgagaaacaagagctccagaataagatggtgaaacttatggcaatgttggatgaggtggatcggaagtacaaacactattatcatcggatgcaacttgtaatgtcatcgtttgatatggttgctggttctggagctgccaagccttatactgcagttgccctccagacaatctcacggcatttccgatgtctaaaggatgctatcaatgatcaaattagtgttatcaggaagaaacttggagaggatgacgatgcatctggcaaagagggcaaactaattcgccttcgttatatcgatcagcaaataaggcaacagcgagctttccaacagtatggtatgctacagcaaaatgcttggaggccacagagggggctacctgaaaattcagtctcgattctccgggcttggctttttgaacacttccttcacccgtatccaaaagactctgaaaagctaatgttatcgagacaaactgggttaacaagaagtcagatttcaaattggttcatcaatgcccgtgtccggctgtggaagccaatgatcgaagacatgtacaaagaagagataggtgaggcagagctagactccaactcttcctctgacaatgtgcagccgaacaaggacaagccgccatcttccgaagaaaaggaccataagacctcaacaagccaggtttgccaaaccagccagcttggcgaatccaaagccaacattggtggagtggtgagcttttgtggagcgccagccggcggcttccacaacgatgccaaccccgatgacagcttcatgagcctgatgctgaaggcccagagaccgggcgaaaccgatggcagcggtctcctccatgatgccgtcgctcatcactccgatgagagcgcgcggttcatggcgtaccacctgacagagtttgggaggtatgggaacaacaacgtctcactgactctggggttgcagcacgccgagaacacccagccgggcttccccggcgtcagagaccaagacatctacaactccacagctcctctcaacgtcacctccacatcttcagagtatgattcggcgagccaaatagatcaacaacggcagctgtttgaggtgtcacctctgatgcatgatttcgtggcctgaatttcagctgacgcactggaaaacgtggggaagtgacttgtcatttgtagtgccaggacgaacaatatgcctggactgaattttcaggcgtggaaatgtagctgtagttgtaattggggtacagaatggacgaggtatatagcataaatgttatgtaaatttagtgggggcaggggtgatagtggtaaagaaatcctgtaaagatggaatacattttatacgtgtaaaatacgagtatttaagggccacgctgtaaaaatagatttacctgtaactgtaacgagtgtttgtaatgagtgtaaagaactgccacatgccatattttcgatgggtgagaagatatagaaatcttattttctttgttaattgttaggtagcatggctagggtg

SEQ ID NO: 211499 - DNA, 2704 bp, Zea Mays
ctggaggtggcccttttgttgtattactcactttattagctctttttttttcatccgagttgaagtgctctcttatttttattgtctgtgaaaacaaagttttgcctaggacatttctcctggctccacctctttcatatcattaaaaaaagtgaaaattacagctgcaaacgaccagtgaagcatccccgtctcttctagaaggattcattctactggcgagccgagctggtgaaggagctataataagcctagcgctcacttcagtcatcagccaagtgattgaaaaaggcaagtcgtctgaattattggttccaagggctctgtagttgcttctccacactttcctatgcttttgcattaatcttgacaactgagtactcaaagctgggatatggctacttattattcgagccctgacagtgaaagagattcacaaacaatgtactcaacagagtcaggcaatgcatcatatcccgtgccatcagccctagggaactttctttatctgaacagtgcatcttctggaccttatacagaatttaatggaattgtccagtctcaacagaatttcatggaacttactggtcatccttcagcaatttcacatgattcatcatccaacgaagctactaacattggcacttcactgacagaacagcgctcttttggtcctttgaaagatatgagaaatgagatgttgatgcatttgatggatggagcacacagcagtggcagtgacctcatccacaatgatgaccatagcactgcacagctcgagtttggcatgttaaacaaccacaattcaacaagtcttccatcagcatcaggccaagggctgtctctgagcctcaatacacatatcttggcaccttcctatccatactggtctgcaaagcaggacttattaacaccaaattcttaccagggtgatgacaacagaatgaagaatatgcagtctgaggcttcacaggcaatccgaaactctaagtatctgaaggcagcacaggagttgcttgatgagattgtcagtgtttggaagagtgttaaacagaaaacagataaaggcccttctgaagcaggaaagtcagatggaaaagagactgatggggggactaaaagtgagggagtatcttttgatccacaagagtctggtgccaatacagcagctgagctttcaactgctgagaaacaagagctccagaataagatggtgaaacttatggcaatgttggatgaggtggatcggaagtacaaacactattatcatcggatgcaacttgtaatgtcatcgtttgatatggttgctggttctggagctgccaagccttatactgcagttgccctccagacaatctcacggcatttccgatgtctaaaggatgctatcaatgatcaaattagtgttatcaggaagaaacttggagaggatgacgatgcatctggcaaagagggcaaactaattcgccttcgttatatcgatcagcaaataaggcaacagcgagctttccaacagtatggtatgctacagcaaaatgcttggaggccacagagggggctacctgaaaattcagtctcgattctccgggcttggctttttgaacacttccttcacccgtatccaaaagactctgaaaagctaatgttatcgagacaaactgggttaacaagaagtcagatttcaaattggttcatcaatgcccgtgtccggctgtggaagccaatgatcgaagacatgtacaaagaagagataggtgaggcagagctagactccaactcttcctctgacaatgtgcagccgaacaaggacaagccgccatcttccgaagaaaaggaccataagacctcaacaagccaggtttgccaaaccagccagcttggcgaatccaaagccaacattggtggagtggtgagcttttgtggagcgccagccggcggcttccacaacgatgccaaccccgatgacagcttcatgagcctgatgctgaaggcccagagaccgggcgaaaccgatggcagcggtctcctccatgatgccgtcgctcatcactccgatgagagcgcgcggttcatggcgtaccacctgacagagtttgggaggtatgggaacaacaacgtctcactgactctggggttgcagcacgccgagaacacccagccgggcttccccggcgtcagagaccaagacatctacaactccacagctcctctcaacgtcacctccacatcttcagagtatgattcggcgagccaaatagatcaacaacggcagctgtttgaggtgtcacctctgatgcatgatttcgtggcctgaatttcagctgacgcactggaaaacgtggggaagtgacttgtcatttgtagtgccaggacgaacaatatgcctggactgaattttcaggcgtggaaatgtagctgtagttgtaattggggtacagaatggacgaggtatatagcataaatgttatgtaaatttagtgggggcaggggtgatagtggtaaagaaatcctgtaaagatggaatacattttatacgtgtaaaatacgagtatttaagggccacgctgtaaaaatagatttacctgtaactgtaacgagtgtttgtaatgagtgtaaagaactgccacatgccatattttcgatgggtgagaagatatagaaatcttattttctttgttaattgttaggtagcatggctagggtg

SEQ ID NO: 211500 - DNA, 2479 bp, Zea Mays
ccgccttgaatggctgcatcattttggtgatcagaaggaattctcaaccacattctcatcctcttggcaagtcgtctgaattattggttccaagggctctgtagttgcttctccacactttcctatgcttttgcattaatcttgacaactgagtactcaaagctgggatatggctacttattattcgagccctgacagtgaaagagattcacaaacaatgtactcaacagagtcaggcaatgcatcatatcccgtgccatcagccctagggaactttctttatctgaacagtgcatcttctggaccttatacagaatttaatggaattgtccagtctcaacagaatttcatggaacttactggtcatccttcagcaatttcacatgattcatcatccaacgaagctactaacattggcacttcactgacagaacagcgctcttttggtcctttgaaagatatgagaaatgagatgttgatgcatttgatggatggagcacacagcagtggcagtgacctcatccacaatgatgaccatagcactgcacagctcgagtttggcatgttaaacaaccacaattcaacaagtcttccatcagcatcaggccaagggctgtctctgagcctcaatacacatatcttggcaccttcctatccatactggtctgcaaagcaggacttattaacaccaaattcttaccagggtgatgacaacagaatgaagaatatgcagtctgaggcttcacaggcaatccgaaactctaagtatctgaaggcagcacaggagttgcttgatgagattgtcagtgtttggaagagtgttaaacagaaaacagataaaggcccttctgaagcaggaaagtcagatggaaaagagactgatggggggactaaaagtgagggagtatcttttgatccacaagagtctggtgccaatacagcagctgagctttcaactgctgagaaacaagagctccagaataagatggtgaaacttatggcaatgttggatgaggtggatcggaagtacaaacactattatcatcggatgcaacttgtaatgtcatcgtttgatatggttgctggttctggagctgccaagccttatactgcagttgccctccagacaatctcacggcatttccgatgtctaaaggatgctatcaatgatcaaattagtgttatcaggaagaaacttggagaggatgacgatgcatctggcaaagagggcaaactaattcgccttcgttatatcgatcagcaaataaggcaacagcgagctttccaacagtatggtatgctacagcaaaatgcttggaggccacagagggggctacctgaaaattcagtctcgattctccgggcttggctttttgaacacttccttcacccgtatccaaaagactctgaaaagctaatgttatcgagacaaactgggttaacaagaagtcagatttcaaattggttcatcaatgcccgtgtccggctgtggaagccaatgatcgaagacatgtacaaagaagagataggtgaggcagagctagactccaactcttcctctgacaatgtgcagccgaacaaggacaagccgccatcttccgaagaaaaggaccataagacctcaacaagccaggtttgccaaaccagccagcttggcgaatccaaagccaacattggtggagtggtgagcttttgtggagcgccagccggcggcttccacaacgatgccaaccccgatgacagcttcatgagcctgatgctgaaggcccagagaccgggcgaaaccgatggcagcggtctcctccatgatgccgtcgctcatcactccgatgagagcgcgcggttcatggcgtaccacctgacagagtttgggaggtatgggaacaacaacgtctcactgactctggggttgcagcacgccgagaacacccagccgggcttccccggcgtcagagaccaagacatctacaactccacagctcctctcaacgtcacctccacatcttcagagtatgattcggcgagccaaatagatcaacaacggcagctgtttgaggtgtcacctctgatgcatgatttcgtggcctgaatttcagctgacgcactggaaaacgtggggaagtgacttgtcatttgtagtgccaggacgaacaatatgcctggactgaattttcaggcgtggaaatgtagctgtagttgtaattggggtacagaatggacgaggtatatagcataaatgttatgtaaatttagtgggggcaggggtgatagtggtaaagaaatcctgtaaagatggaatacattttatacgtgtaaaatacgagtatttaagggccacgctgtaaaaatagatttacctgtaactgtaacgagtgtttgtaatgagtgtaaagaactgccacatgccatattttcgatgggtgagaagatatagaaatcttattttctttgttaattgttaggtagcatggctagggtg

SEQ ID NO: 211501 - DNA, 1484 bp, Zea Mays
gtcaaacattgttcgtttaggtggatcggaagtacaaacactattatcatcggatgcaacttgtaatgtcatcgtttgatatggttgctggttctggagctgccaagccttatactgcagttgccctccagacaatctcacggcatttccgatgtctaaaggatgctatcaatgatcaaattagtgttatcaggaagaaacttggagaggatgacgatgcatctggcaaagagggcaaactaattcgccttcgttatatcgatcagcaaataaggcaacagcgagctttccaacagtatggtatgctacagcaaaatgcttggaggccacagagggggctacctgaaaattcagtctcgattctccgggcttggctttttgaacacttccttcacccgtatccaaaagactctgaaaagctaatgttatcgagacaaactgggttaacaagaagtcagatttcaaattggttcatcaatgcccgtgtccggctgtggaagccaatgatcgaagacatgtacaaagaagagataggtgaggcagagctagactccaactcttcctctgacaatgtgcagccgaacaaggacaagccgccatcttccgaagaaaaggaccataagacctcaacaagccaggtttgccaaaccagccagcttggcgaatccaaagccaacattggtggagtggtgagcttttgtggagcgccagccggcggcttccacaacgatgccaaccccgatgacagcttcatgagcctgatgctgaaggcccagagaccgggcgaaaccgatggcagcggtctcctccatgatgccgtcgctcatcactccgatgagagcgcgcggttcatggcgtaccacctgacagagtttgggaggtatgggaacaacaacgtctcactgactctggggttgcagcacgccgagaacacccagccgggcttccccggcgtcagagaccaagacatctacaactccacagctcctctcaacgtcacctccacatcttcagagtatgattcggcgagccaaatagatcaacaacggcagctgtttgaggtgtcacctctgatgcatgatttcgtggcctgaatttcagctgacgcactggaaaacgtggggaagtgacttgtcatttgtagtgccaggacgaacaatatgcctggactgaattttcaggcgtggaaatgtagctgtagttgtaattggggtacagaatggacgaggtatatagcataaatgttatgtaaatttagtgggggcaggggtgatagtggtaaagaaatcctgtaaagatggaatacattttatacgtgtaaaatacgagtatttaagggccacgctgtaaaaatagatttacctgtaactgtaacgagtgtttgtaatgagtgtaaagaactgccacatgccatattttcgatgggtgagaagatatagaaatcttattttctttgttaattgttaggtagcatggctagggtg

SEQ ID NO: 211502 - DNA, 2743 bp, Zea Mays
ttttttaaaaaacgagcccgaccttgctccaactccctcgattccctctccctattcgcgttccccacttccgttcgccgccgacaccgcgtgcgctctctccccccctccgtctctgtctgcgacgactgggtgggctaccgctgccgccctacccatgtgctgaggcttctgcctacctcttcgccggcgaagagcgcccagcaggtttcatgactggaaatcagagcaatctgtttctgttatttcagatagggtagtatcagaaaaagggcataacatctttggcttgttaaaggacagaacagcaggagccttttcattcctggggaactcttcacattctgaagccctaaacaaattaggcctaggggagaagtcaaaaacaaaagttcttgatcctcaagggccatttttgcagagatggaacaagatatttgtgatatcatgtctttttgcagtttttgtggacccattgttcttgtatgtcccagtaattgatggtggcaacaactgcctgtacttggacaagaagttagagaccacagcaagtatcctgcgctttttcacagatatcttctatttactccatatactgtttcagttcagaacaggctttattgctccctcttctagagtgttcggtcggggtgccttggttaaggacacatttgcaatagcaaagcgatatctatcaacattgttcctggtggatttcttagcggttctgcccctccctcaggtgtttgtgttggtggtgctgcctaagctccaaggtcctgaaattatgaaggcaaaaattgtactgttggttattattatttgtcaatatgtgcctcgactgctccgaataataccactttaccttcaaatcacaagatctgctggcatacttacagagacagcatgggctggtgctgctttcaaccttataatttatatgcttgccagtcatggctttggagctctttggtacattctttccatccagcgagaagacacctgttggagacaagcatgtatcaatcagactggctgtgatcctacatctttgtactgcgggtatcattcacttgcaaataattctttcttacaaaatgcgtgcccaacaaatagcactgccaatccagaccctatatttggaatctttctaccagctctccaaaatgtttcacaatcgacgagtttctttgaaaaactattctattgcttttggtgggggctacaaaatctaagttcccttggccagaacatgaaaacaagcactaatacattggagaatctgtttgctgtttttgtctcgacatcgggtttggttctatttgcactacttattggtaatgtgcagacctatttacagtcagcttctgtgcgtatcgaagaaatgagagtgaaaaggcgtgatacagagcagtggatggcacataggctactccctgagaatctaaaggatcggattatgcgccacgaacaatataggtggcaagaaacaagaggggttgacgaagagggccttcttaaaaatcttccaaaggatcttagaagagagataaagagacatctttgtttgtcacttctcatgaaggttccaatgtttgaaaacatggatgaacagctgttggatgccatgtgtgatcgtctaaagcctatgctgtacacagaaggaagctgcatcattcgcgaaggtgatccagtgaatgaaatgctcttcatcatgagaggaacactagagagtaccacaacaaatggtgggcaaactggtttcttcaactctaatgttctaaaaggtggagacttctgtggtgaagagctcctcacgtgggcccttgaccccacttcagcttcaaatcttcctggctcaactaggacagtgaagacgttgtctgaagtcgaagcttttgctctgagggctgacgacttgaagtttgttgccacacaatttaggaggctccacagcaaacaacttcagcataccttccggttttactcacagcaatggaggacctgggctgcttgcttcatacaggcagcttggcacagatactgtaggaagaagctggaagaggctttatatgagaaggagaagaggttacaagcagcaattgtaagtgatggcactacttcgctcagtctcggtgcagcgctctatgcttcacgttttgctggcaacatgatgcggatcttacggagaaatgccaccagaaaggcccgtttgcaggaaagagtacctgcaagactgttgcaaaagccagcagaacccaacttcttcgctgaagatagctgaacttgtaccctgtagcaagcagggattcatggtccaaccggtgaagtttgtgcagaagttaagattggatgctgtagatagacagatcaggtgctctaaagccgtctggtttaaatcacctaattcgcgaaaaggcctggtccgagttagattctccgttgaaataaatttgaagctgacgttaaaaaaaaaatccgcttttgctccacgttaaattctggcttccatagtggtcggactagggtgctgagataagggtattgagattttttagatctgtgtgaaaagattttctgtaacgtaatatctgaaggctgtcttatcctctgtaggttattttaaaaaaaacacgtatatttcgattgtatacaggtttcatgtattataaacactctaatttaccttgtgcatttgaaaaaagagagaagatgctgtgaatataatcgattaattgtttgt

SEQ ID NO: 211503 - DNA, 2838 bp, Zea Mays
ttttttaaaaaacgagcccgaccttgctccaactccctcgattccctctccctattcgcgttccccacttccgttcgccgccgacaccgcgtgcgctctctccccccctccgtctctgtctgcgacgactgggtgggctaccgctgccgccctacccatgtgctgaggcttctgcctacctcttcgccggcgaagagcgcccagcagttgaatatttgatcagctattgacttcgctgctggcctgttttctcctttggagaccaaagaagccatggcgggccgggaggagagatatgtgaggtttcatgactggaaatcagagcaatctgtttctgttatttcagatagggtagtatcagaaaaagggcataacatctttggcttgttaaaggacagaacagcaggagccttttcattcctggggaactcttcacattctgaagccctaaacaaattaggcctaggggagaagtcaaaaacaaaagttcttgatcctcaagggccatttttgcagagatggaacaagatatttgtgatatcatgtctttttgcagtttttgtggacccattgttcttgtatgtcccagtaattgatggtggcaacaactgcctgtacttggacaagaagttagagaccacagcaagtatcctgcgctttttcacagatatcttctatttactccatatactgtttcagttcagaacaggctttattgctccctcttctagagtgttcggtcggggtgccttggttaaggacacatttgcaatagcaaagcgatatctatcaacattgttcctggtggatttcttagcggttctgcccctccctcaggtgtttgtgttggtggtgctgcctaagctccaaggtcctgaaattatgaaggcaaaaattgtactgttggttattattatttgtcaatatgtgcctcgactgctccgaataataccactttaccttcaaatcacaagatctgctggcatacttacagagacagcatgggctggtgctgctttcaaccttataatttatatgcttgccagtcatggctttggagctctttggtacattctttccatccagcgagaagacacctgttggagacaagcatgtatcaatcagactggctgtgatcctacatctttgtactgcgggtatcattcacttgcaaataattctttcttacaaaatgcgtgcccaacaaatagcactgccaatccagaccctatatttggaatctttctaccagctctccaaaatgtttcacaatcgacgagtttctttgaaaaactattctattgcttttggtgggggctacaaaatctaagttcccttggccagaacatgaaaacaagcactaatacattggagaatctgtttgctgtttttgtctcgacatcgggtttggttctatttgcactacttattggtaatgtgcagacctatttacagtcagcttctgtgcgtatcgaagaaatgagagtgaaaaggcgtgatacagagcagtggatggcacataggctactccctgagaatctaaaggatcggattatgcgccacgaacaatataggtggcaagaaacaagaggggttgacgaagagggccttcttaaaaatcttccaaaggatcttagaagagagataaagagacatctttgtttgtcacttctcatgaaggttccaatgtttgaaaacatggatgaacagctgttggatgccatgtgtgatcgtctaaagcctatgctgtacacagaaggaagctgcatcattcgcgaaggtgatccagtgaatgaaatgctcttcatcatgagaggaacactagagagtaccacaacaaatggtgggcaaactggtttcttcaactctaatgttctaaaaggtggagacttctgtggtgaagagctcctcacgtgggcccttgaccccacttcagcttcaaatcttcctggctcaactaggacagtgaagacgttgtctgaagtcgaagcttttgctctgagggctgacgacttgaagtttgttgccacacaatttaggaggctccacagcaaacaacttcagcataccttccggttttactcacagcaatggaggacctgggctgcttgcttcatacaggcagcttggcacagatactgtaggaagaagctggaagaggctttatatgagaaggagaagaggttacaagcagcaattgtaagtgatggcactacttcgctcagtctcggtgcagcgctctatgcttcacgttttgctggcaacatgatgcggatcttacggagaaatgccaccagaaaggcccgtttgcaggaaagagtacctgcaagactgttgcaaaagccagcagaacccaacttcttcgctgaagatagctgaacttgtaccctgtagcaagcagggattcatggtccaaccggtgaagtttgtgcagaagttaagattggatgctgtagatagacagatcaggtgctctaaagccgtctggtttaaatcacctaattcgcgaaaaggcctggtccgagttagattctccgttgaaataaatttgaagctgacgttaaaaaaaaaatccgcttttgctccacgttaaattctggcttccatagtggtcggactagggtgctgagataagggtattgagattttttagatctgtgtgaaaagattttctgtaacgtaatatctgaaggctgtcttatcctctgtaggttattttaaaaaaaacacgtatatttcgattgtatacaggtttcatgtattataaacactctaatttaccttgtgcatttgaaaaaagagagaagatgctgtgaatataatcgattaattgtttgt

SEQ ID NO: 211504 - DNA, 2872 bp, Zea Mays
ttttttaaaaaacgagcccgaccttgctccaactccctcgattccctctccctattcgcgttccccacttccgttcgccgccgacaccgcgtgcgctctctccccccctccgtctctgtctgcgacgactgggtgggctaccgctgccgccctacccatgtgctgaggcttctgcctacctcttcgccggcgaagagcgcccagcagttgaagatttgatcagctatcgccttcgatgcagttgaatatttgatcagctattgacttcgctgctggcctgttttctcctttggagaccaaagaagccatggcgggccgggaggagagatatgtgaggtttcatgactggaaatcagagcaatctgtttctgttatttcagatagggtagtatcagaaaaagggcataacatctttggcttgttaaaggacagaacagcaggagccttttcattcctggggaactcttcacattctgaagccctaaacaaattaggcctaggggagaagtcaaaaacaaaagttcttgatcctcaagggccatttttgcagagatggaacaagatatttgtgatatcatgtctttttgcagtttttgtggacccattgttcttgtatgtcccagtaattgatggtggcaacaactgcctgtacttggacaagaagttagagaccacagcaagtatcctgcgctttttcacagatatcttctatttactccatatactgtttcagttcagaacaggctttattgctccctcttctagagtgttcggtcggggtgccttggttaaggacacatttgcaatagcaaagcgatatctatcaacattgttcctggtggatttcttagcggttctgcccctccctcaggtgtttgtgttggtggtgctgcctaagctccaaggtcctgaaattatgaaggcaaaaattgtactgttggttattattatttgtcaatatgtgcctcgactgctccgaataataccactttaccttcaaatcacaagatctgctggcatacttacagagacagcatgggctggtgctgctttcaaccttataatttatatgcttgccagtcatggctttggagctctttggtacattctttccatccagcgagaagacacctgttggagacaagcatgtatcaatcagactggctgtgatcctacatctttgtactgcgggtatcattcacttgcaaataattctttcttacaaaatgcgtgcccaacaaatagcactgccaatccagaccctatatttggaatctttctaccagctctccaaaatgtttcacaatcgacgagtttctttgaaaaactattctattgcttttggtgggggctacaaaatctaagttcccttggccagaacatgaaaacaagcactaatacattggagaatctgtttgctgtttttgtctcgacatcgggtttggttctatttgcactacttattggtaatgtgcagacctatttacagtcagcttctgtgcgtatcgaagaaatgagagtgaaaaggcgtgatacagagcagtggatggcacataggctactccctgagaatctaaaggatcggattatgcgccacgaacaatataggtggcaagaaacaagaggggttgacgaagagggccttcttaaaaatcttccaaaggatcttagaagagagataaagagacatctttgtttgtcacttctcatgaaggttccaatgtttgaaaacatggatgaacagctgttggatgccatgtgtgatcgtctaaagcctatgctgtacacagaaggaagctgcatcattcgcgaaggtgatccagtgaatgaaatgctcttcatcatgagaggaacactagagagtaccacaacaaatggtgggcaaactggtttcttcaactctaatgttctaaaaggtggagacttctgtggtgaagagctcctcacgtgggcccttgaccccacttcagcttcaaatcttcctggctcaactaggacagtgaagacgttgtctgaagtcgaagcttttgctctgagggctgacgacttgaagtttgttgccacacaatttaggaggctccacagcaaacaacttcagcataccttccggttttactcacagcaatggaggacctgggctgcttgcttcatacaggcagcttggcacagatactgtaggaagaagctggaagaggctttatatgagaaggagaagaggttacaagcagcaattgtaagtgatggcactacttcgctcagtctcggtgcagcgctctatgcttcacgttttgctggcaacatgatgcggatcttacggagaaatgccaccagaaaggcccgtttgcaggaaagagtacctgcaagactgttgcaaaagccagcagaacccaacttcttcgctgaagatagctgaacttgtaccctgtagcaagcagggattcatggtccaaccggtgaagtttgtgcagaagttaagattggatgctgtagatagacagatcaggtgctctaaagccgtctggtttaaatcacctaattcgcgaaaaggcctggtccgagttagattctccgttgaaataaatttgaagctgacgttaaaaaaaaaatccgcttttgctccacgttaaattctggcttccatagtggtcggactagggtgctgagataagggtattgagattttttagatctgtgtgaaaagattttctgtaacgtaatatctgaaggctgtcttatcctctgtaggttattttaaaaaaaacacgtatatttcgattgtatacaggtttcatgtattataaacactctaatttaccttgtgcatttgaaaaaagagagaagatgctgtgaatataatcgattaattgtttgt

SEQ ID NO: 211505 - DNA, 2699 bp, Zea Mays
ttttttaaaaaacgagcccgaccttgctccaactccctcgattccctctccctattcgcgttccccacttccgttcgccgccgacaccgcgtgcgctctctccccccctccgtctctgtctgcgacgactgggtgggctaccgctgccgccctacccatgtgctgaggcttctgcctacctcttcgccggcgaagagcgcccagcagatccgtcctcgcttccacgctgcagttgaagatttgatcagctatcgccttcgatgcagttgaatatttgatcagctattgacttcgctgctggcctgttttctcctttggagaccaaagaagccatggcgggccgggaggagagatatgtgaggtttcatgactggaaatcagagcaatctgtttctgttatttcagatagggtagtatcagaaaaagggcataacatctttggcttgttaaaggacagaacagcaggagccttttcattcctggggaactcttcacattctgaagccctaaacaaattaggcctaggggagaagtcaaaaacaaaagttcttgatcctcaagggccatttttgcagagatggaacaagatatttgtgatatcatgtctttttgcagtttttgtggacccattgttcttgtatgtcccagtaattgatggtggcaacaactgcctgtacttggacaagaagttagagaccacagcaagtatcctgcgctttttcacagatatcttctatttactccatatactgtttcagttcagaacaggctttattgctccctcttctagagtgttcggtcggggtgccttggttaaggacacatttgcaatagcaaagcgatatctatcaacattgttcctggtggatttcttagcggttctgcccctccctcaggtgtttgtgttggtggtgctgcctaagctccaagatctgctggcatacttacagagacagcatgggctggtgctgctttcaaccttataatttatatgcttgccagtcatggctttggagctctttggtacattctttccatccagcgagaagacacctgttggagacaagcatgtatcaatcagactggctgtgatcctacatctttgtactgcggctctccaaaatgtttcacaatcgacgagtttctttgaaaaactattctattgcttttggtgggggctacaaaatctaagttcccttggccagaacatgaaaacaagcactaatacattggagaatctgtttgctgtttttgtctcgacatcgggtttggttctatttgcactacttattggtaatgtgcagacctatttacagtcagcttctgtgcgtatcgaagaaatgagagtgaaaaggcgtgatacagagcagtggatggcacataggctactccctgagaatctaaaggatcggattatgcgccacgaacaatataggtggcaagaaacaagaggggttgacgaagagggccttcttaaaaatcttccaaaggatcttagaagagagataaagagacatctttgtttgtcacttctcatgaaggttccaatgtttgaaaacatggatgaacagctgttggatgccatgtgtgatcgtctaaagcctatgctgtacacagaaggaagctgcatcattcgcgaaggtgatccagtgaatgaaatgctcttcatcatgagaggaacactagagagtaccacaacaaatggtgggcaaactggtttcttcaactctaatgttctaaaaggtggagacttctgtggtgaagagctcctcacgtgggcccttgaccccacttcagcttcaaatcttcctggctcaactaggacagtgaagacgttgtctgaagtcgaagcttttgctctgagggctgacgacttgaagtttgttgccacacaatttaggaggctccacagcaaacaacttcagcataccttccggttttactcacagcaatggaggacctgggctgcttgcttcatacaggcagcttggcacagatactgtaggaagaagctggaagaggctttatatgagaaggagaagaggttacaagcagcaattgtaagtgatggcactacttcgctcagtctcggtgcagcgctctatgcttcacgttttgctggcaacatgatgcggatcttacggagaaatgccaccagaaaggcccgtttgcaggaaagagtacctgcaagactgttgcaaaagccagcagaacccaacttcttcgctgaagatagctgaacttgtaccctgtagcaagcagggattcatggtccaaccggtgaagtttgtgcagaagttaagattggatgctgtagatagacagatcaggtgctctaaagccgtctggtttaaatcacctaattcgcgaaaaggcctggtccgagttagattctccgttgaaataaatttgaagctgacgttaaaaaaaaaatccgcttttgctccacgttaaattctggcttccatagtggtcggactagggtgctgagataagggtattgagattttttagatctgtgtgaaaagattttctgtaacgtaatatctgaaggctgtcttatcctctgtaggttattttaaaaaaaacacgtatatttcgattgtatacaggtttcatgtattataaacactctaatttaccttgtgcatttgaaaaaagagagaagatgctgtgaatataatcgattaattgtttgt

SEQ ID NO: 211506 - DNA, 2651 bp, Zea Mays
ctccatattcgcaaagcaacgttgcttcagtctcagatcagctagtaatttcgagcaacagatccagcaaggactagcagaaagcagcctgtaaattctagccaccgggaaactgggcaaacgctgccaatcattgaagccatcactggatatgtgtgtccatctccatcatcacaaacaagagccacgcagtcggcacacacacagagacaagtcactgtctcgaagtgtcggtttcgaactcgaacagggcaggtgctcgccgtccctcttttactagccttcggaaagcgcggcctgtgtctccggcctttgccacttccacagggagtccggggccatgcagagctccgtaaagctcgcggtgcttgctcttctgctagcggcagcagctcaccacggtctgctgccgctgccgacggcgcgatgctactggctcaacccggagatctacgacgccggcgggctgagccgccgcgcgttcccggacggcttcgtcttcgggacggccgcgtcggcgtaccaggtcgaggggatggccaagcacggcgggcggggccccagcatctgggacgccttcatagaggttcccgggaccatccctaacaatgccaccgctgacgtgacggtcgacgagtatcatcggtacaaggaagatgtgaacataatgaagaacatgggctttgatgcgtaccgattttcgatctcttggtcgaggattttcccagatggaactggcaaggtaaaccaggaaggagtggattactacaacaggctcatagattacatgctccagcaaggtatcgcgccgtatgcaaatctctaccattatgacctcccattggcactccatgaacagtacctgggctggcttagcccaaagattgtggaggcgtttgcagactacgccgagttctgcttccacgcgttcggagacagggtgaagaactggtttaccttcaacgagccgagctgctgtcaggcgataccgcgacaagtatcagcttcaccagaaggggaagattggaattctcctggatttcgtgtggtacgaacctttcagcgacagcaatgcggaccaggctgcagcacagcgagccagggacttccacctaggctggttccttgaccccattgtacatggacggtacccgtactcgatgcaagagattgccaaagacaggctaccgttgttcagcgatgaagaagccaggatggtgaaaggctctatagactatgttggcatcaaccactacacttctttctacatgaaggaccctgggacatggaacctgacaccagtcagctaccaggatgattggcatgttggttttgtctacgaacgaaatggagttcctattggcgctcacgcaaactcctactggctgtacattgtgccgtggggcatcaacaaggctgtcagctatgtcaaggaaacttacaaaaatcctacaatgatccttgctgaaaacggaatggaccaacctggtgatgtcagtattactcagggtgtgcatgacacagtaagaatccgttattacagagactacataactgagctcaagaaggcaatagatgatggtgccagagtcattgggtactttgcgtggtcgctgcttgacaacttcgagtggaggcttgggtacacttcgcggtttggcttggtgtacgtggactacaagactctgaagaggtaccccaaggattcagctttctggttcaagcatatgctgtccaagaaaaggagctagagaattgcagacaagaggaccactggcttcacgtgtcatacaaaagttcactctgcaaatcctcttagtatgtcagatttagcttaaggaaccgtgcagacaattgagtctcaaggctcgacatctctagcttcgttaattgttgcaaggcaataaattggtatcttcgaaaaccttgagtctccataatagaacaagtagaagcacaatgacgggatcacagacaaatgacacacaagttcaccaacataaacggcataaaaaaaacaaaaggggcgaattaaaacttcgttacattcaacaagctgaaaattgaactcattttattcgataatccatttagccaaaccatatatatttgaccacacggtatatagctcaaatcaacaacgaaatcatggtagcttcatcgctatactttatatactgaacttatacttgagattctatctcgccgtttttctgttcaagagcttatcttcaccgtgctaacatgacaacttaacttctatcctatacttatctgtggtagggggaaaccaggtcattaagacaacagcatgtagaaattattatagatacacttcagaagataacttggcctgtccaattgccttacagtaaacatctccatcgctatttctataaacaaagcttagttaacttcatctgatctgtctgcgacctgaaaatttattcagaaatttaactatataatgcatttcaggaaaactaagatatggttaaattgcttagtcgtgcttgtggcaagttcctaaatcctaatttgcagttctaggaattcttacattttgcgctgatttgaagttcttagctgcgcagtacatgttccggaattaaaaatgcaattccaactaccatcctaattcaagtagtccg

SEQ ID NO: 211507 - DNA, 1516 bp, Zea Mays
gaagcattgctgtcaatttgactctaggtgcaaatatcaggctgcggccggcactggctttgtcctctaccttagtttctgacatcatcacatcgcaccgagggcgaggaggcaaaggaataacctgtgaagctgctgccatccactcatctttctgccttgattgcagtcattcctcccccaagtccatagagtgatagagaatggaggataatctaccagttaatgtccgggaatatcaagaacttgctaagaaagcactaccaaagatgcactatgattatatcaacggaggagcagaagatgaatatacactgagggagaatattgcagcatatggaagaattctgttacggccacgagtccttatagatgtgagcaaagatagacatgtcaacaagcttattaggatataatatgccatcgccaataattgtcgcacctacaggggcacacaaattagccaatcccgaaggggaggtggccacagcaagagctgccgcagcatgtaacaccataatgatgctttccttctcatcaagctgcaggatcgaggaggttgcctccagttgcgacgctattcgcttttatcagttatatgtgtacaagagaagggatgtttcggcaacattggtacggcgggctgaaagtttaggattcagggcaattgttttgacagttgacacgcctgtgcttggcaggcgtgaagctgatatcagaaataagtacagcgcttgtatcgttaatgaaatctcctaaaattgagggaaattatgttcatttacaaaattcataattccagtttcctaacccgttgctactgaaggttaaaattttaagctactatcttataccatattgtagatcgttgatacatttatgcggagcattgcagtagcttcaacatcagaatgttgcaaaaaaacaatcccattttcttttatcttgagatgttctgtaactgagctgattgttcatgcaggatgattgctccacctctgtcaaaccttgaaggtttaatgtcattagacgactttgacgatgctgaaggcggctccaagctggaacgattctcacgggagacgctggatccatcattgtcatggaaggacgtggagtggctcaagtccatcaccagcctgccgattctgctcaagggcatcgtcaccgcggaagacggtgtgcaagagaagagctgtttcagcaacattggtatggcgggttgaggccatcttcagctgatccttcgtcccatccactatctcatcctctgttttaaaatttcaatctgtaaacaatgttatctacaatttcatgtttcctattttactgtgtccactgaagatagtatgagagtttagggttcaattcagctgctttgacagttgacaggcctgtgcttggcaggcgcgaagctgatatcagaaacaagtacagtgcttgctatctttgttgaaacctcctaaagttcagtgaaattatgtcctttacaaaaccacctgaaggttaaattttt

SEQ ID NO: 211508 - DNA, 2437 bp, Zea Mays
gcaaaagcctatttgcatcttcttgatttccgccgaaccctaggtagatgattatgttagatgctgctacaaatcttgaatgctgcccaactgcaagcaataaaagaatggaggataatctaccagttaatgtccgggaatatcaagaacttgctaagaaagcactaccaaagatgcactatgattatatcaacggaggagcagaagatgaatatacactgagggagaatattgcagcatatggaagaattctgttacggccacgagtccttatagatgtgagcaaagatagacatgtcaacaagcttattaggatataatatgccatcgccaataattgtcgcacctacaggggcacacaaattagccaatcccgaaggggaggtggccacagcaagagctgccgcagcatgtaacaccataatggtaactttctgatttttatgtgtgtgttgagggggtgtcttctggtgagtggtgatgtactcaactttaggccctctgtagattgttacacgtgttcatatatgtcatgcagatgctttccttctcatcaagctgcaggatcgaggaggttgcctccagttgcgacgctattcgcttttatcagttatatgtatgatgccttgccattgattttttttagtaaattccactttctggtgttacctgatttctggaagttttcatcgtgtaccttaggtgtacaagagaagggatgtttcggcaacattggtacggcgggctgaaagtttaggattcagggcaattgttttgacagttgacacgcctgtgcttggcaggcgtgaagctgatatcagaaataagtacagcgcttgtatcgttaatgaaatctcctaaaattgagggaaattatgttcatttacaaaattcataattccagtttcctaacccgttgctactgaaggttaaaattttaagctactatcttataccatattgtagatcgttgatacatttatgcggagcattgcagtagcttcaacatcagaatgttgcaaaaaaacaatcccattttcttttatcttgagatgttctgtaactgagctgattgttcatgcaggatgattgctccacctctgtcaaaccttgaaggtttaatgtcattagacgactttgacgatgctgaaggcggctccaagctggaacgattctcacgggagacgctggatccatcattgtcatggaaggacgtggagtggctcaagtccatcaccagcctgccgattctgctcaagggcatcgtcaccgcggaagacgcgaggaaggccgtggaggcgggggcggccggcttgatcgtgtccaaccacggcgcccggcagctggactatgcgccggccaccatctcggcgctcgaagaggtggttaaggcggtggcgggggctgtgccggtgctggtggacggcggcgtccggcgcggcaccgacgtgttgaaggcgctggcgctcggcgccaaggcagtcatggtgggcaggccggtgttctttgggctggcggcgcgcggggaagccggcgcgaggcacgtgatcgagatgttgaacaaggagctggagttggccatggcgctctgcggctgccgtagcgtcgcggaggtcaccagggcgcacgtccagaccgagggcgaccggatcagggccctgctgtgacttataaataagcgaccatatccgaggccgaccaccgtgctgtctgggttgcgatatgatttatatgatacgtgagggcatgtgatcgattgttgcctccacacagataagcttactattgccagagcctgggctggactatgctttcagtgattatctaaatcaaatagactgaatgctaaagggaacatccaatggtgtccatctatatagcatttgttggagtcacatgtagccatttgactgcccatcattaaggcctgaagtcaagagctcaatcaccctgaatccccttcaacgaagaagcccgtaacgtacaagatcgtccggcactccgagagaagctggacgccgtccgcatgtcgtttggtgccgcccccgtcgcccgcacctacaccaccgtaaaggccgcttcagctggacttgtgctcgccggcccgcgcgccgcttcagctgaatggtgcttgcgctgcttcggttaaggtttgagctattggctggtgacaagatatatggtcaaatgtgaccccacatttgttttctacgcacagagaaggtgtttgcattgcattttccttgctaagtgagatttaacggtgttcatgcgtggcaaagcgacaataataatgaacccaaattacaaaccgacgacaatgaaggaagtctatataatcttccattccacaaaacagaagagtatagaaatcaatggcgctcaaggaattttcaccgcttctttagatctgtacaagttcagctagagagagaga

SEQ ID NO: 211509 - DNA, 977 bp, Zea Mays
tcgcaacaaaccggttcggttaaccctttctccaccgcccgcagtcagactcagagcagaggcgaccggatcatgcgcgtccacatctgtcggtgctgggcgctccccgccgaggacggacacggacggtaggtgggactggaactggaactggaagcaaggcgaggcgaggcgaggcgaggcgtgcgagcaagattttaaaggattttctgctttggatcaaggagaacttgggtgcatggggtcctttggtgctggccctagcttacattcctctgacagtcttagctgttccagcatcaattcttacacttggagggggctatttatttggactgccagtagggttcgttgctgattccattggagcaacaattggtgcaactgctgcatttctgcttggcaggacgattgggaggccttatgttctttcgaaatgcaaagattaccctaagtttcaagcagtagctattgccatccaaagatctggcttcaagatcgtgttgctactaaggcttgtacctttacttccgttcaacatgttgaactacctgttatctgtcactcctgttggtgttggagaatacatgctggcttcttggtttggaatgatgccaatcactcttgctttggtgtacgttggaacaacactgaaagatctatcagatgtgacacatgggtggagtgagatctcgactactcgatggattctgataatatctggctttgtattatctggtatgtgccattatctcccctttagaattctgatagtttctgccttttttggtgcttagttacagatataatgcacccaaaatctccatgctttaaaaataccaagccagctgacttaagtcatatgtttcttacatctttttaatacgtcaggatctttttttcctcgaatgtgcaggagagctgcacgtcattatattaaggagagaaaaggtccaaaatggaccagagtacaaaag

SEQ ID NO: 211510 - DNA, 812 bp, Zea Mays
aaccgaaagtggcatccgaaagatcaatttattttgcactccgctgttatatcgacgtgcaccaccgtcttgccgtcgctcatttcctcctcgctcggctgcttgcctagggtttcacctgctaccgccccacctccagccgtcgcttcagatcccgccgctgccggcgctcgatcctacttcgttgctcctagctgatcccgctgagctcggatttgggcccttcctccccgccggaacagcgtccggacgcgcgggggcagatctgggttttggtggcccgcttggtgtatgagaaggcctccagagcttggaagtaatggaggtggagccggcgaggagggacgcggcagcgctggacccggagctgctgcagctggcggagctcgcgccgggcgcgcttcgtgagaactccatagctgatgcgctgtattcgcagtggctcgtgctacccgagacgaccaagctggagatatgtgccatatcagtgacctgattagtgtcgcctaagctgtgtttcacgtcaacaatgatataggaactagcctggtgcatgcgaatcttgtcttagtctgaattcttatttttattgctgtcagaactgtccttgcataaatcagggcatgtgccaaactctaaactgaggcctttctatatagaacaataaacctatgatttcagatgacatgtgattatattttataataaacctatcttatgtttccattttagattgaattagatcgtttattctttattatttatcaattgatgcacaaatacacaaaagatggaaatacgaagaataagag

SEQ ID NO: 211511 - DNA, 1942 bp, Zea Mays
gtcatcatgtatttaggtgtattcgtggttagaggcacctggtttgttttttgctgaagctggtggtacatgtgaatagcagggcctgtcttctgcctctgcttttgcttcgaagcaatggcgaatgcaagcaagcacttgcaaccttcaagtcaagcaggcaatgacaagaagtatcagggcacgctggttgcttcaccagcaaaggccatttcacctaagtgtgtgaaccgcattgtgccatcgaagcaactgatcttgggtgggggttcaataggccatgtggcatcatttctgatcaaggtcgttgctcttgaggcagtgagaagagtttctaaaacaagatgccctttcatatggaattctgttcaagcattgcagatccttgtgtatcctccatttagctggatccaaagatgggcaccgctcggatttctcgtgcagggaattcagaaactatccatgccactgttgtttctgtcagtcacaacaacagtaagtgagctgtcttccaagcatgatgatgaaccagataacaatacagaacattctgagacaccttccgaaacaaatgaattggcgtcaacttctggcacaagcgatgctgctgatggcacaaaggaaatcgtgcaagagaactggcttgtgttacttttcagggagcttgagaagcaaggcatcactttgcctgagaggtttactgaagatgagttacgcagattttatgttgctgcaaatggcgactttcaaagtttactctcttcggttaagaagacaattcattggagggaaacatttcacatacttacattgcaagaacttgatagatggtctcacttagtcttttggcatgggtttgacacgatgcttcggccttgtttagtagttcgtcttggacttgcatgctctagcatacctcctcatgatagaccccgtttcgggcaagcagtagtttctcaaattgaccatggcgttgtaaatttgatcaatgaagaagattcaaggattaccgttttactggattgccatgggatttcgccattcagatttccaatgcaaatgatgaggtcgttcatcactgtggttcaagaaaactacccgaatcgtcttggggtattgtttgtcatccgtcttcctccagttgtcagagttattgcacagacatttcttcaagtcttgaaaccagctacaaagcagaagttgcgttttgagggagattcgtacaagaaggcattggcggagttcctgcaggctgtgccagcgtttctgggcggtaaatgcagctgcccgcgatgtgagagtcctcgtgatgattcagtgatacaggcaggggaagggagcaagaagcagccccgcttggtcagcgttgatgacgggttacctgtcacagacttggacttcgacttggatgaagagatcccatcaccttatagctgcgagaacgccatcagggctgcgataatcggcctgctgatggtgtgcatcttcgtcgcgtttctggctgggatgatcgaccctgcatccgttccagccagtgcctgagagcttgtggaatagagcatgcacgtacatgtgttgctaattaggatgcagggtgctgtatttcttggcaggcttcttgtatgttgtcgtcagaccgccatagagcgctttctcccagtgtgagcgagcgcatgaataatatatatcctctgtgtcaaatgttggttagcagttcaattcgggcctactagatttcactattttcttttttatcttgatcgggcctactgaatttttgctcctctttctcatcatgatcactttgaacttgaacaaatagagcttatatgagctacgctctggccacggcctgggtggaccgcgtcatagatccgcccctgcctgccagttctgcttcacagtgaatccattaacagtgcgtttggatgttggaatttag

SEQ ID NO: 211512 - DNA, 2300 bp, Zea Mays
tctgggctaggcccacgccgcagcgcccgcggacgaaccaccacgcccacgcgtagcacgagaagggacacgatcgcacacttttcctctgagccgcgacctgtctctgtctctgtctctgtctctgttcttctgccccgactccgcccacgcatctctttctcctcttcccccgcgcggcggccgcgggagtgttcgtgttcctcacttctcccgcttgcgtccccgacactccctcagatccgcggccgtttcccgatccgaggggcattccagccctaaatagcggccggtgagcaggtctccttccgccggcgcggaccacctggagggagtttatcctggagccgtcttcctcctcgcctccttttgcggcgcggcgcggaggccggagtcgcttggaggcccagctgtgtttgggttgatttcttcgtttgtcgggcctgtcttctgcctctgcttttgcttcgaagcaatggcgaatgcaagcaagcacttgcaaccttcaagtcaagcaggcaatgacaagaagtatcagggcacgctggttgcttcaccagcaaaggccatttcacctaagtgtgtgaaccgcattgtgccatcgaagcaactgatcttgggtgggggttcaataggccatgtggcatcatttctgatcaaggtcgttgctcttgaggcagtgagaagagtttctaaaacaagatgccctttcatatggaattctgttcaagcattgcagatccttgtgtatcctccatttagctggatccaaagatgggcaccgctcggatttctcgtgcagggaattcagaaactatccatgccactgttgtttctgtcagtcacaacaacagtaagtgagctgtcttccaagcatgatgatgaaccagataacaatacagaacattctgagacaccttccgaaacaaatgaattggcgtcaacttctggcacaagcgatgctgctgatggcacaaaggaaatcgtgcaagagaactggcttgtgttacttttcagggagcttgagaagcaaggcatcactttgcctgagaggtttactgaagatgagttacgcagattttatgttgctgcaaatggcgactttcaaagtttactctcttcggttaagaagacaattcattggagggaaacatttcacatacttacattgcaagaacttgatagatggtctcacttagtcttttggcatgggtttgacacgatgcttcggccttgtttagtagttcgtcttggacttgcatgctctagcatacctcctcatgatagaccccgtttcgggcaagcagtagtttctcaaattgaccatggcgttgtaaatttgatcaatgaagaagattcaaggattaccgttttactggattgccatgggatttcgccattcagatttccaatgcaaatgatgaggtcgttcatcactgtggttcaagaaaactacccgaatcgtcttggggtattgtttgtcatccgtcttcctccagttgtcagagttattgcacagacatttcttcaagtcttgaaaccagctacaaagcagaagttgcgttttgagggagattcgtacaagaaggcattggcggagttcctgcaggctgtgccagcgtttctgggcggtaaatgcagctgcccgcgatgtgagagtcctcgtgatgattcagtgatacaggcaggggaagggagcaagaagcagccccgcttggtcagcgttgatgacgggttacctgtcacagacttggacttcgacttggatgaagagatcccatcaccttatagctgcgagaacgccatcagggctgcgataatcggcctgctgatggtgtgcatcttcgtcgcgtttctggctgggatgatcgaccctgcatccgttccagccagtgcctgagagcttgtggaatagagcatgcacgtacatgtgttgctaattaggatgcagggtgctgtatttcttggcaggcttcttgtatgttgtcgtcagaccgccatagagcgctttctcccagtgtgagcgagcgcatgaataatatatatcctctgtgtcaaatgttggttagcagttcaattcgggcctactagatttcactattttcttttttatcttgatcgggcctactgaatttttgctcctctttctcatcatgatcactttgaacttgaacaaatagagcttatatgagctacgctctggccacggcctgggtggaccgcgtcatagatccgcccctgcctgccagttctgcttcacagtgaatccattaacagtgcgtttggatgttggaatttag

SEQ ID NO: 211513 - DNA, 1270 bp, Zea Mays
ttttcctctgagccgcgacctgtctctgtctctgtctctgtctctgttcttctgccccgactccgcccacgcatctctttctcctcttcccccgcgcggcggccgcgggagtgttcgtgttcctcacttctcccgcttgcgtccccgacactccctcagatccgcggccgtttcccgatccgaggggcattccagccctaaatagcggccggtgagcaggtctccttccgccggcgcggaccacctggagggagtttatcctggagccgtcttcctcctcgcctccttttgcggcgcggcgcggaggccggagtcgcttggaggcccagctgtgtttgggttgatttcttcgtttgtcgggcctgtcttctgcctctgcttttgcttcgaagcaatggcgaatgcaagcaagcacttgcaaccttcaagtcaagcaggcaatgacaagaagtatcagggcacgctggttgcttcaccagcaaaggccatttcacctaagtgtgtgaaccgcattgtgccatcgaagcaactgatcttgggtgggggttcaataggccatgtggcatcatttctgatcaaggtcgttgctcttgaggcagtgagaagagtttctaaaacaagatgccctttcatatggaattctgttcaagcattgcagatccttgtgtatcctccatttagctggatccaaagatgggcaccgctcggatttctcgtgcagggaattcagaaactatccatgccactgttgtttctgtcagtcacaacaacagtaagtgagctgtcttccaagcatgatgatgaaccagataacaatacagaacattctgagacaccttccgaaacaaatgaattggcgtcaacttctggcacaagcgatgctgctgatggcacaaaggaaatcgtgcaagagaactggcttgtgttacttttcagggagcttgagaagcaaggcatcactttgcctgagaggtttactgaagatgagttacgcagattttatgttgctgcaaatggcgactttcaaagtttactctcttcggttaagaagacaattcattggagggaaacatttcacatacttacattgcaagaacttgatagatggtctcacttagtcttttggcatgggtttgacacgatgcttcggccttgtttagtagttcgtcttggacttgcatgctctagcatacctcctcatgatagaccccgtttcgggcaagcagtagaagggcagacctggtgcagtgatgagagttgtcccactgag

SEQ ID NO: 211514 - DNA, 3166 bp, Zea Mays
gtcttcaagcagcgcacggaccgaggcgaagggcaggcccggctccgtcccgttccatgaaggcctaacccgagcgggcaggcttttaagtagggcgcgagtgagagcgagcggccaatcggccgggagcgaagccagcgctagctgccgcctccctccccggtcctcgggtccgccgcgcgcgcgccggccgccaccaccgcacgacgccgaccaccacaattagctagcagcggcgtcgactaataaacgacaatggcgtccatctccctcgaggacgtccgcaacgagaccgtcgacctcgagaccgtcccggtgcaggaggtgttccagcacctgaaatgcagcaaggaggggctctccagcgccgagggagacaatcggctcaagatcttcgggcccaacaagctggaggagaagtcggagagcaagctgctcaagttcctgggcttcatgtggaacccgctctcctgggtcatggaggccgccgccatcatggccatcgtgctcgccaacggcgggggcaagccgcccgactggcaggacttcgtcggcatcgtcgtcctcctcttcatcaactccaccatcagcttcatcgaggagaacaacgccggcaacgcggcggccgcgctcatggcgggcctcgcgcccaaaaccaaggtgctcagggacggcaagtggaaggaagaggaggcgtccatcctcgtgcccggggacatcatcagcatcaagctgggtgacatcattcccgccgacgccaggctgctggagggcgacccgctcaaggttgaccaggcggcgctcacgggcgagtcgctgcccgtgaacaagcacccgggccagggggtcttctcgggctccacagtcaagcagggcgagatcgaggccgtcgtcatcgccaccggcgtgcacaccttcttcggcaaggcggcgcacctggtggacagcaccaacaacgtgggccacttccagctcgtgctcacggccatcggcaacttctgcatcatctccattgccgtcgggatggtcatcgagatcatcgtcatgtacccgattcagcaccgcgcgtaccgcgatggcatcgacaacctcctcgtcctgctcatcggcggcatccccatcgccatgcccaccgtgctctccgtcaccatggccatcggctcccaccgcctgtcccagcagggcgccatcaccaagcgcatgaccgccatcgaggagatggccggcatggacgtgctctgcagcgacaagaccggcaccctcaccctcaacaagctcaccgtcgacaagaccctcatcgaggtgtgcggcaagggcgtcgacaaggacatggtgctcctctacgccgccagggcctcccgcgtcgagaaccaggacgccatcgacacctgcatcgtcggcatgctcgccgaccccaaggaggcccgcgccggcatcaaggaggtccacttcctccccttcaacccggttgagaagcgcacggccatcacctacatcgacggcaacggcgactggcacagggtcagcaagggcgcccccgagcagatcatcgagctgtgccggatgagcaaggatgccgagaagaagatccacgccctcatcgacggctacgccgaccgcggcctccgctccctgggcgtgtcgtaccagctggtccccgagaagagcaaggagagcaccggcgagatgggcggcctgaacatcgacgagctgatcgagaaggccgacgggttcgcgggggtgttcccggagcacaagtacgagatcgtgaagcggctgcaggaccggaagcacatctgcggcatgaccggggacggcgtgaacgacgcgccggcgctgaagaaggcggacatcggcatcgcggtggacgacgcgacggacgcggcccggagcgcgtcggacatcgtgctgacggagcccgggctgagcgtgatcgtgagcgccgtgctcaccagccgcgccatcttccagcgcatgaagaactacaccatctacgccgtgtccatcaccatccgcatcgtgctgggcttcctgctcgtcgcgctggtctggaagttcgacttcgcgcccttcatggtgctcatcattgccatcctcaacgacggcaccatcatgaccatctccaaggaccgcgtgaagccgtcgccgacgcccgactcgtggaagctcaaggagatcttcgccacgggcatcgtgctagggacctacatggcgctcgccacggcgctcttcttctacctggcgcacgacaccgacttcttcaccaacgccttcggcgtgcggtccatcaaggagaacgacaaggagctgatggcggcgctgtacctgcaagtgagcatcatcagccaggcgctcatcttcgtgacccggtcccggagctggtccttcgtggagcggcccggcgcgctgctggtgatcgccttcctggcggcgcagctggtggcgacgtgcatcgccgtgtacgccaactgggagttctgcaagatgcagggcatcggctggggctggggcggcgccatctgggcgttcagcgtcgtcacctacttcccgctggacgtgctcaagttcgccatccgctacgcgctctccggcaaggcctggaacaacatcaacaacaagacggccttcaccaaccgcaccgactacggcaagggcgagcgagaggcgcagtgggccacggcacagaggacgctgcacggcctcaaccaggccaccgccacctccgacctcttcggcgacaaccagggctaccgcgagctgtcggagctcgccgagcaggcggccaagcgcgccgaggtggccaggctcagggagctgcacacgctcaagggacacgtcgagtccgtcgtcaagctcaagggcctcgacattgacaccattcagcagagctacaccgtgtaaactcgactcagtttttttatttgcttttttttgcagacaaatacaaaccacacacatatatatatttgtaaagattcgttcgtattttcattttcaccgggaagatttgtaactgtcctcctccctccttgtaagttgctcctgtaaactcttcctgaattcatggcgtgtcgttgtagcaatcaccacttcctccctgtgaatgcccacagcgtgtcttggtgaaagcataattgattgaccagttacacggcacactacaggt

SEQ ID NO: 211515 - DNA, 1608 bp, Zea Mays
gttaaacaaagcttatgatttataggtctgatttggaatcagtcttggcgtctgttcatgaaactgtatttgcaataaagaaggaagctgtcgaagtttccaacaatagaccattcgaagaattcctcaactctgcagtgttttcaaaggatgttgaaggggtctcagggaagtctatgtcattatcagactttaggaactggtgcactctcttgccatcattgaggaaattccttggaaatttgttgatgcctcctgattcaggtagaccaggatttgaagtaccactgcttcattatcctgaaaacatctgtactgatacgctgcttctaaataaagagtatgcctggcatattggaggaggtttctcccaacatgaggtgcaagagtggaagcttttatatcatagttctcttcatggacaaagcttcaacactttcttgggcaaagtaacgaatggggatgctcagactgttctgattgttaaagatacagaaggatcaatttatggtggatatgcttcacagccttgggaaaggcacagtgatttttatggtgacatgaagacattccttttcaaatgctatcctcaagcatccattttccgccctactggagcaaacaagaatttgcaatggtgtgctgtaaacttcagctctgagaacataccaaatggtattggatttggagggcagccacatcatttcggactctttttatcagcaaattttgaccaagggcactcatttacgtgtagcacatttaccagccctcccctttccaagacaaataggttcaggccagaagttattgaatgttggggtatacaaatgagaggagcacaagatgaaaaactggagttagtcaaggggacagtcctcgagagattcaaggaggaccggaacatgctgaagatggttggtttggcaaatgcaagtgattaagtgatagaggatcacaatgatgtacatgatggagagtctgtacatcacatgttcataaaaataatcaaatctgagaccatgtttctatattctactgttcatattttgtcactcaaaatattcatctggtccacactttgtaacaattgaccagtcgtgaaggacagccgagccaatgttgcgtttgatctcaagaatgacgtcatccaagataagatggtctcatatgagttcatcccattaactttaatgggatgactttatcctttctgttgtactaatgtgcttgtaagatgagaaagtatctagatctttagtggttttggtgattaatgccaacacaagattattgtaactaacatgtgtgtttacaaagataaattaatgttaggtcacaatgatgaaaatgatttgggcagtcttttgtcttgatgcctctgattatgatttcctaaaattttcaaatgatgaaagataaagttaaagatggactaattctaagtatcgtttagagttgagaaacacttagaataatttagaactttgtttttatttaaccgcactataaatgaggtatgaattaacagtctgatctagataagtcaaataagtttagtatgatacacactaattatctttagctttaagtggcttaggagaggcc

SEQ ID NO: 211516 - DNA, 2558 bp, Zea Mays
ctcagctgttgcttgtcagttgcccgtgacaggtactagccagcgggcggccgagatcgcgcgggcggctggcccgagcgcgcccaaccgtccctttggctctgtctcctccggccccaccctcttctcttctgtccgctccgccgagcgtgccggcatgcccccaaccccacccactgagcaaagcggaaaaaagcgaggaaaaatatcctgctcggctgctccaacgaagcaccggaggccgcaacagagaagagcggacgccaccgccgccaatcaatagattaggcgcggataatggtgctggccggaccgcgacgggcggaggagggcgccgcggcccccgcgcgccgccgctgacagagtatacctgcttaaccagccgtctgcaggcacggcgcacgcgcggtggtacctcgcgaggggctcgggttgactgggcgctactcgcggccgcggggatggaggaggaggcgtctgcagatccaccgaccgcttcgtccttcgcctgcgtctctggttccgggcgctgctgaatccgacgcttcggttcgcgtccccagtccccttggcggaggcgtggatcgtgtgtttggggggtctgggtatggtgggcggaggcgagggggatcgcgtgggcggcggcgtaggggttgggggaggccagcagttcgtggaccggagcaaggtgaggattcttctctgcgacggcgacgccagcagctcccgggaggtgctgcggctcctctgcaactgctcgtaccatgtaacttgcgccaagtctccgcggcaggtgatcaatattctcaactacgagggcggcgagatcgacatcatcctggctgaggttgatctgccggtctccaagtgcttcaagatgctcaagtacattgccaggaacaaggacctgcgccacatccccatcatcatgatgtccaacagagacgaggtgtctgttgttgtcaagtgcttgaggcttggtgcggccgagtacctggtgaagccgctgcgcacgaatgagctgctgaacctttggacccatgtgtggcggcggagacggatggagttgctgtacctgcatgaattattctttaaatcgagtgctggtgttggcagcttggtttgcccgagaaaaacttcttcaatgacaacttcgagttggtgctctcagaacctagtgatgcaaataccaatagcgccaccctcctctcagatgagacagacgacaggcctaaagaaaacacaaatcaagaaacgggcacctcaaatcagcttgaatacgagtctaatccttccgttgctgagcgcgaccagagagacaagatcggtgctccaggctctgccctagatgccagtcaatcatcgactccgggaagaatgttttcacgtcctataaaaactaacctgaaggttgctgagtcgtctgcatttctagcatatgttaagtcaagcaccccagccaccagctcatttgatagcggactacaaagaggtgacagccggttagattctttggataaccatggtaattgctctagtgcaacagatagaagtgacaccggtgctgatgtaaatattcggaataaagaagcttttgagatgcctgtgcagtatcctatggtatgcttttcttcctctagcatgcatatggagcgaagcaatgaaggccataatgacacttcaggaactccacctgcataccatttcccattttattatccagggatggtagaacacaacatggcactttcatcagtgcaaaattttcaagcaaacataaacagtgctcaagcacatacaccaccagcgatgcttcatcagtacaatgttttctcccaatgccatagtttacccatgatatcaccatttcagtttaatacttctggcatgagtatgcactcaagtcatttaccgacgcaaaatgtgtggtcatcggcatcgagcacaccaacgcctgacgaaacatgcaatcgctccgagagaagggctgcagcacttgctaaattcaggcagaaaaggaaagagcgctgttttgacaagaaggtgaggtatgtgaacaggaagaaacttgctgagacgaggctaagggtgcgaggtcaatttgttaggcatgcaagcaatatggatatcataagcaccggagatgatatatctgaagacgaagatgacgatccaacctccagggaggtagatatgatttcttctccagagtagtggagaggtcctcttgtgtgaaaaattagagtgcagatggttactgctcactttgttacaactcagtaggactagacaatacattattctactggcaacaaggcaatacaccctttttgctcacacagtataaacttttgtccccaaatatctggctgttactccggttgctttaatcgagaaatcatctttttgataaggctgttactccggttactttgatcgagaaataatctttttgataagtgtagttatagttttgctaagtttttgatgcaaagaccagtcaaatcagtttgatcttattgcagggtaatatttgcaattttgaggttaacagtgtt

SEQ ID NO: 211517 - DNA, 2505 bp, Zea Mays
ctcagctgttgcttgtcagttgcccgtgacaggtactagccagcgggcggccgagatcgcgcgggcggctggcccgagcgcgcccaaccgtccctttggctctgtctcctccggccccaccctcttctcttctgtccgctccgccgagcgtgccggcatgcccccaaccccacccactgagcaaagcggaaaaaagcgaggaaaaatatcctgctcggctgctccaacgaagcaccggaggccgcaacagagaagagcggacgccaccgccgccaatcaatagattaggcgcggataatggtgctggccggaccgcgacgggcggaggagggcgccgcggcccccgcgcgccgccgctgacagagtatacctgcttaaccagccgtctgcaggcacggcgcacgcgcggtggtacctcgcgaggggctcgggttgactgggcgctactcgcggccgcggggatggaggaggaggcgtctgcagatccaccgaccgcttcgtccttcgcctgcgtctctggttccgggcgctgctgaatccgacgcttcggttcgcgtccccagtccccttggcggaggcgtggatcgtgtgtttggggggtctgggtatggtgggcggaggcgagggggatcgcgtgggcggcggcgtaggggttgggggaggccagcagttcgtggaccggagcaaggtgaggattcttctctgcgacggcgacgccagcagctcccgggaggtgctgcggctcctctgcaactgctcgtaccatgtaacttgcgccaagtctccgcggcaggtgatcaatattctcaactacgagggcggcgagatcgacatcatcctggctgaggttgatctgccggtctccaagtgcttcaagatgctcaagtacattgccaggaacaaggacctgcgccacatccccatcatcatgatgtccaacagagacgaggtgtctgttgttgtcaagtgcttgaggcttggtgcggccgagtacctggtgaagccgctgcgcacgaatgagctgctgaacctttggacccatgtgtggcggcggagacggatgcttggtttgcccgagaaaaacttcttcaatgacaacttcgagttggtgctctcagaacctagtgatgcaaataccaatagcgccaccctcctctcagatgagacagacgacaggcctaaagaaaacacaaatcaagaaacgggcacctcaaatcagcttgaatacgagtctaatccttccgttgctgagcgcgaccagagagacaagatcggtgctccaggctctgccctagatgccagtcaatcatcgactccgggaagaatgttttcacgtcctataaaaactaacctgaaggttgctgagtcgtctgcatttctagcatatgttaagtcaagcaccccagccaccagctcatttgatagcggactacaaagaggtgacagccggttagattctttggataaccatggtaattgctctagtgcaacagatagaagtgacaccggtgctgatgtaaatattcggaataaagaagcttttgagatgcctgtgcagtatcctatggtatgcttttcttcctctagcatgcatatggagcgaagcaatgaaggccataatgacacttcaggaactccacctgcataccatttcccattttattatccagggatggtagaacacaacatggcactttcatcagtgcaaaattttcaagcaaacataaacagtgctcaagcacatacaccaccagcgatgcttcatcagtacaatgttttctcccaatgccatagtttacccatgatatcaccatttcagtttaatacttctggcatgagtatgcactcaagtcatttaccgacgcaaaatgtgtggtcatcggcatcgagcacaccaacgcctgacgaaacatgcaatcgctccgagagaagggctgcagcacttgctaaattcaggcagaaaaggaaagagcgctgttttgacaagaaggtgaggtatgtgaacaggaagaaacttgctgagacgaggctaagggtgcgaggtcaatttgttaggcatgcaagcaatatggatatcataagcaccggagatgatatatctgaagacgaagatgacgatccaacctccagggaggtagatatgatttcttctccagagtagtggagaggtcctcttgtgtgaaaaattagagtgcagatggttactgctcactttgttacaactcagtaggactagacaatacattattctactggcaacaaggcaatacaccctttttgctcacacagtataaacttttgtccccaaatatctggctgttactccggttgctttaatcgagaaatcatctttttgataaggctgttactccggttactttgatcgagaaataatctttttgataagtgtagttatagttttgctaagtttttgatgcaaagaccagtcaaatcagtttgatcttattgcagggtaatatttgcaattttgaggttaacagtgtt

SEQ ID NO: 211518 - DNA, 1309 bp, Zea Mays
cgacgggcggcgttggcgttgcggcagtgggatatatactcatgtgccagcgcgtatggtcgcgcgtcggcggcaggctccagcggtgcgcggcgcccccagaaaagtacaaagcctggagcaacttgcgaggggatcgagattcgttcaaacgatgcacaagcacaaggttacgaagttctaactactgcaaggctttcttcctttgttttatgcgcatgattttgcagcagttccaacacatataggtgataggtccttgtctgtttcggagctgctgatccgtatagccgttgcccactccaaatgcttctggttggcccggaactgccgcattctgtgaacctgccctcctccgtatatcatactactgttgtctggaatattatggtggtctgtcgccaggttaactagaagaaggaagtagaattccaggtccactcggtggatgctaactgtctccctgtgatagcacatgcaaatatcttattctgctacagaagtacgtacgttggctagttgcaacctctgcagaaggacttagtatttctggaaggtcagcgatgccccttgtgcttattctgactgattgagcgggttttttggcatcagccactcattaaagaactgctagcttcctcgtgacatgagctgcagaagagcaggcggtgtcctgtagggactcgtcgtcgtcgccgccgcacatgagctgagacgtgataaaggaggaggcgtcggcgtcgccaaaggaatcgaaggaagaagagaagctgccgccgccgccagagaccgccgcttgcggatcatccgtcgttgcgatgtcgtcttgcggcatggaggccaggaagttcgcgatgtgcacggcccagctgctctcgccgccggctgatgacatggtggacgtggccgccggggtgatgacgcacgaggaggaggctgatttgttatccattgttctgaccggtagtgcccggccggaagaaacagtaggagttgcagcggcagctcttgctatcgatctgttgtgctggtgctgctttgttttccggatgggaatatgggatgggagtgaagaacgttcgctagagtctgtggatatatatacaggtcctattactcctatagtggatgaaccgactagtcggtagcagcggcagcagcacatgagtatgtatatttaaactgtttgcgagtagaatacagttgagaaatccctccctgagaatcttcttgtgagttgcgtgtgttattgactggctctatgctattcgtatatagtatagcgcacgcatatgtacatgtacagtgg

SEQ ID NO: 211519 - DNA, 3326 bp, Zea Mays
ccgcccgcccgcacgcagacccagctcgatgccctaaccgtgcccaccggagtctcgttcccctccgaccgaggacccaagccccaaggttctccatctccagctatggagcaccatataattcagcaagtcggagagcatgagggggaggaggaggaggatggcatgggaacagaagcggcattcgagggggtgcacaatcacgacactttcagtttgcagagtgcctgtactgccacagccgcatgagctgcaaggactccaatggaacgagccatctctggcggcaccagaagatctgccctggcaagagggacgtggtgtttcggcggctcaaggattcctacttcccatgtgttttggtgaatcagagtgaaccggttacaccaggtgattcggtgaatcagattatttcagagacacttgacgacataagttcagtaattcccaatagattcaaatccaaggtgtggagagagttttcacctatctatgttgagggtaagctccaggctgctgactgcgtgcattgccgcaaacgcctcagtgcaaataagtttgggggaagaagccatctgagtcgacatctgcagacctgtcaggcacgaaggggctacaataatcagaagggaacgctttacccttctagtgttcctgatttgaagtccattgggcaagatgagctctcacctgccttggcaaatgggaaggttcacatagcaggatactccagcaaacatctctggtctagtagctctgctgacacttcccctattgtccggcccattcaagtgtcggcgcatcaacctctgccatcacaagattttccaagcctggggaaacagagaacctcatttacaaccacaactagtgacataaggaaggttgaccaaggaacagcttatcaagaactagccaggatgatagtttcgcatggttatcctttatcaattgtagagcatgaagaaatgagaagatttgtaaagagcctcaaccctatgattcatgcagatgcagtctcacacaatgatatagaaggacattgctgtgctctatttgagaaggaaaaggcaaaacttaaagatcaattgaccctttcctcccggcgtgtctctttgtcagcaagcatatggactcctgagggagccgaaccaacagtaaattacctttgtttgacagcacattttattgataaaaactggaaagttcaccgaatgataatcaagtttggcatgtttcggtcctcacctactgatgtggaaaggatggtacatcataaggaggcttgtgtaccagagtctgaatgtggagcatataatgtcatatgggatgccattagagattggaatcttgatcagaagattttgagcttgacttctgttggtgaggttaggaatgctttaagttcctcaaagctgaaggaaatacttgtggagaaaaaatgccttcctatcagaggcaagctatatgatgttgcttgtgttgatgatgtccttaacactattgcttccaaagtgcagcaaaatatcattcaccttgtcggtgacatggtaacagagttttttgttgcacatacatcttcatcgttgaatcaacaacagcttatggaagtcatttcacagatgagtctgaagtgtccacaagaagatgctaagtggtggtacaaattttattttcggcttgaagtttttttgcatttcaataagccatttccttttgaagaagcagcatctccagagcatgtcatagttgctgagtctatttgcaagattttgaggacgttttatcgtgttattgaagtcatttctgcctctagttctccgacagcaaacatgtacttcaatgagatatggaaagtgagaacagtcttgcaagaagaagcatcaagtgagcatgcagaaatcactgcgatggtcgcagagatgcaggaaacattcaatgagtactggcaacattcatacttatggttatgcatacctgttatcctagaccctagattcaagttcggtttcattgagttccgtctgaaacgagcttttggattaaaatcagcaagctacttatctggcatacgtgaaacactccaggaactcttcaatgaatactgcagtccagtggatcagccgaatgtgcgtgtgccaaaaagcgaatcttttagtctagatgacaacgactcatttgaagattgggaccagcacctcaatgagcaagcgagcagtcagaaatccacggaactcgataactaccttgcggacggtttggttccaaggaaggatgacttcgataacctgaactggtggatgtgtcacgccacaaagtacccgacactggcggctatcgtgcaggacatcctggcgatgccagcatctgctgttccatcagaagcagcgttcacaagcagtggaccagtaattccaaagcaccacagcatgctaagcatcaagaccattgaggcacttgtttgcactcgagattggatgagataaagcgattgtgtaccctgaactctgaacaaccaatgatgggatgcagttttgttcaggggatggtcctggctcccaaccagtgggatccagtccccagccaggattgggtggtggatcctgtgaaattcctgcgttagaaacaggccctcagaggtttggcatgctttattggtgatcttggacacttctggttctggaatagcatccctagtggctataccagttcgttgcaaatggactcgcggttgaaagaataaactgagctactacttcagtccaatgttgcataggaaacatatatggctggtttggtggccagggatcatcaggccagacaatctttctctaacaccataataccatcgccacaattatgtgtagtagcacatcttatcttgtactaccattattcatggtggcgtccacagcgaaaagtaaccgtacgcgtcgaattgccgatggattactggatgtatgttagcaagaaaaaacaggctggaaagtgcaacacagctggggagagtgcgaggcaaggttgagcagttgaccattggacgcatatgcatgtgtacgtaacgtgttcttatatgcatgcttcatccccatcagaattcagaaagcacatttcatcctcaggttttccctactcttgcacgcagccggtcaatcgacatttttaaacacgctgatacagatgctcgatcagtagctaaaattaaacacctgagattaacttggactgatataaaatatactatatcattcactgagtgtctggattaatttggacgaatcaaaaaagtttatttgatttgattccatggaaatattgtaaacgag

SEQ ID NO: 211520 - DNA, 3428 bp, Zea Mays
ccgcccgcccgcacgcagacccagctcgatgccctaaccgtgcccaccggagtctcgttcccctccgaccgaggacccaagccccaaggttctccatctccagctatggagcaccatataattcagcaagtcggagagcatgagggggaggaggaggaggatggcatgggaacagaagcggcattcgagggggtgcacaatcacgacactttcagagtgcctgtactgccacagccgcatgagctgcaaggactccaatggaacgagccatctctggcggcaccagaagatctgccctggcaagagggacgtggtgtttcggcggctcaaggattcctacttcccatgtgttttggtgaatcagagtgaaccggttacaccaggtgattcggtgaatcagattatttcagagacacttgacgacataagttcagtaattcccaatagattcaaatccaaggtgtggagagagttttcacctatctatgttgagggtaagctccaggctgctgactgcgtgcattgccgcaaacgcctcagtgcaaataagtttgggggaagaagccatctgagtcgacatctgcagacctgtcaggcacgaaggggctacaataatcagaagggaacgctttacccttctagtgttcctgatttgaagtccattgggcaagatgagctctcacctgccttggcaaatgggaaggttcacatagcaggatactccagcaaacatctctggtctagtagctctgctgacacttcccctattgtccggcccattcaagtgtcggcgcatcaacctctgccatcacaagattttccaagcctggggaaacagagaacctcatttacaaccacaactagtgacataaggaaggttgaccaaggaacagcttatcaagaactagccaggatgatagtttcgcatggttatcctttatcaattgtagagcatgaagaaatgagaagatttgtaaagagcctcaaccctatgattcatgcagatgcagtctcacacaatgatatagaaggacattgctgtgctctatttgagaaggaaaaggcaaaacttaaagatcaattgaccctttcctcccggcgtgtctctttgtcagcaagcatatggactcctgagggagccgaaccaacagtaaattacctttgtttgacagcacattttattgataaaaactggaaagttcaccgaatgataatcaagtttggcatgtttcggtcctcacctactgatgtggaaaggatggtacatcataaggaggcttgtgtaccagagtctgaatgtggagcatataatgtcatatgggatgccattagagattggaatcttgatcagaagattttgagcttgacttctgttggtgaggttaggaatgctttaagttcctcaaagctgaaggaaatacttgtggagaaaaaatgccttcctatcagaggcaagctatatgatgttgcttgtgttgatgatgtccttaacactattgcttccaaagtgcagcaaaatatcattcaccttgtcggtgacatggtaacagagttttttgttgcacatacatcttcatcgttgaatcaacaacagcttatggaagtcatttcacagatgagtctgaagtgtccacaagaagatgctaagtggtggtacaaattttattttcggcttgaagtttttttgcatttcaataagccatttccttttgaagaagcagcatctccagagcatgtcatagttgctgagtctatttgcaagattttgaggacgttttatcgtgttattgaagtcatttctgcctctagttctccgacagcaaacatgtacttcaatgagatatggaaagtgagaacagtcttgcaagaagaagcatcaagtgagcatgcagaaatcactgcgatggtcgcagagatgcaggaaacattcaatgagtactggcaacattcatacttatggttatgcatacctgttatcctagaccctagattcaagttcggtttcattgagttccgtctgaaacgagcttttggattaaaatcagcaagctacttatctggcatacgtgaaacactccaggaactcttcaatgaatactgcagtccagtggatcagccgaatgtgcgtgtgccaaaaagcgaatcttttagtctagatgacaacgactcatttgaagattgggaccagcacctcaatgagcaagcgagcagtcagaaatccacggaactcgataactaccttgcggacggtttggttccaaggaaggatgacttcgataacctgaactggtggatgtgtcacgccacaaagtacccgacactggcggctatcgtgcaggacatcctggcgatgccagcatctgctgttccatcagaagcagcgttcacaagcagtggaccagtaattccaaagcaccacagcatgctaagcatcaagaccattgaggcacttgtttgcactcgagattggatgagataaagcgattgtgtaccctgaactctgaacaaccaatgatgggatgcagttttgttcaggggatggtcctggctcccaaccagtgggatccagtccccagccaggattgggtggtggatcctgtgaaattcctgcgttagaaacaggccctcagaggtttggtaggtgtacctgacttggttccatgtgtgtacagttgctcgatgtagttgcagatgtagttgcagatctgcggcccaaaacagagctaagctaattgtaatgttgcaggcatgctttattggtgatcttggacacttctggttctggaatagcatccctagtggctataccagttcgttgcaaatggactcgcggttgaaagaataaactgagctactacttcagtccaatgttgcataggaaacatatatggctggtttggtggccagggatcatcaggccagacaatctttctctaacaccataataccatcgccacaattatgtgtagtagcacatcttatcttgtactaccattattcatggtggcgtccacagcgaaaagtaaccgtacgcgtcgaattgccgatggattactggatgtatgttagcaagaaaaaacaggctggaaagtgcaacacagctggggagagtgcgaggcaaggttgagcagttgaccattggacgcatatgcatgtgtacgtaacgtgttcttatatgcatgcttcatccccatcagaattcagaaagcacatttcatcctcaggttttccctactcttgcacgcagccggtcaatcgacatttttaaacacgctgatacagatgctcgatcagtagctaaaattaaacacctgagattaacttggactgatataaaatatactatatcattcactgagtgtctggattaatttggacgaatcaaaaaagtttatttgatttgattccatggaaatattgtaaacgag

SEQ ID NO: 211521 - DNA, 3101 bp, Zea Mays
ctttcacttgcctccctcgtcgtctccgttacaacgcagacactgccgccgctccgcgacagtaactctgctctctctctctctcgcatggcgtactcctcgagccgcgggacgaaaccctaatggagaaccggcgccgccgccacgcccctgcgccgtagactcccctcgccgcagatagcgccagcgcttgccgatccggtgggaaaaaaaagtgggagcacggagcggcctcgcctcggcgggggaggcgcccgccatggggagcgacctcaaggagatgaagtacaggcggaggatcggggtggaggagcggccgcaatgcagcgacccgaggggcggcgcggactgggccgcgctgcagcaggaccccgtcgagctgctgcgcaagctggacgagctgagggaccagatcacgcgctcctgcaacgtcgtcgtcggccagccgcgggagcaccgcagggtcagccgccgtgcggtctccatgctccccgagcatctcgagccaccgcctctgccagggtaccaccgctcccgctacggtgggcggtatgggcacggcttgccgccaccaagcccatacgcaccgccacgccctgaacatggggaaaggtatgcgaggcagtctagtgggcactaccgccagtaccctcccaggcactgcgagaacggtgggatggggcctgggacctaccatcaccatgggtgtgcctgtccgcactgtctgcatgggcagaggactttcccgcaggaggagaacatcccaatggcgagatacttcgccgggcagcacgaatcataccggttggagaggtcgccttctgtttcatccgattatgatcgtgggtctgtggcgtcatcactttactctcatcggtctgtatcgaagatgagggcagagtacttcaggaagaaggcagaacatatctgccgtccagtggatggtgccgcacctttctctgtatgcagttcatgttataaactactgctgatgcctatggaaaaatgcgtagggaggaagcagaatcggtttcaatgtgggtcttgttgtcagataattagtttgaagcatcaggaagaaaatggtatcccctttgcacttgcaccatcatcatccttacatgcgcctgaaatggagcaaagcacaagtgaccagatgaggcaagattctgtccatcagcgccatgaggatttcaattttatgttcaacaattcaaatgatcattgcgatatgcaaaacaacatggatttcaccgatgataattcacttccttcgaccgcgagtaatgacaggattgagattgacaaagagtgtgggtcaactagaagcattcagtcaaaagctgagggtctctctttctctccaagtaggtctgtagacattggtagcccaaaggatatattgtgcgagagggataaagacagcaatgtggagccttcctcagatggtccacttagtccacgatctccaactttagaggacaaacttgttgacccgttgtgtgcccaggaaaaaggtaacgatgaggacgatcaaggcacggcttacagatcgaacctaacatgcaaaggagaatatgatgctaacgacgagtatgatggggacgttagtacaagaagcaaaccggagagcaatgtaaatgacaaagataccactgaaggcgaaacctcatgcagaaattacaaggaagacaactgttgcaacattgaagatagtagcaaaacatacgagcagaatagtggagaagatgacaccagtagtctagtagatggaaatgagaagtatgagtctatgaatactaaagacgatgatagcagccctggaggtgaggacacatgcaataggtatgagccaaaggttgaagacgatgaaaattgtgttcttggagctgagagcattagcaacaattgtgatgaaaataataaagatgccataaaaactggaagcataagtgagagacatgaagagctgataattgaagaagaaaatgagaaattgcagcaggcatttattgaagatgccaattcccaagcagggagtggttcatcaattaatgagcggacgaattctgggttttctcgcggttcatcagaggctgggttagatgaagatcagtcctcaaccgcgttaaggtttcaattaatggtcatccaatctctgaaagagcccttaagaaggcagagaagaaagctggtcctgttgacccaggttcatattggtacgactaccgtgctggtttttggggtgtcatgggacgagaatgtatcggcattgtccctccatttattagagaatttaattatccgatggccagaaattgtgccggtggggattctggtgtttttgtcaatggcagagaactgcatcaaagagatttagatctacttgtaggaagaggactaccacggacatctggaaaatcatactctcttgagatgtcaggaaatgtaattgatgaagacactggaaaaaaactacgcagtcttggaaaacttgctcctacgattgagaagttgaagcgtggttttggcatgcacgtccctgaagagtttagatagctggttctagtacaggatcttggttttgctaataatacactcttcaaagctgacaatggggtggcaaacgtgtggcttctgcgggacggtggtatcaaatctcagatttcttggactggagctctggaagcagcagtacttaagatccttggtgtgcggcgaaggttgtctggcactcaagaaaccaagataatctggtctaatgacttgactaccaatagtacccctcctgctaatttcaattgcttcaatggaagcgacgtgtgctgctagtgactctagattatcaggcagttcttaacttcactgctctgcctgtacgtgctattccttgaatgtgttatcattatcggtacattgccccatcacaggcatagaagtgttgtcagatgtaccatgagcaattgtcggcttgtaatatattggtagagatatgcttcccctaatatttatatgtatatatatgtgatcttgattcttgaatctcttgccaatacgattgattcctgaaccctgttaataagagtcttattttgaaagcc

SEQ ID NO: 211522 - DNA, 3154 bp, Zea Mays
cttgcctccctcgtcgtctccgttacaacgcagacactgccgccgctccgcgacagtaactctgctctctctctctctcgcatggcgtactcctcgagccgcgggacgaaaccctaatggagaaccggcgccgccgccacgcccctgcgccgtagactcccctcgccgcagtgagccccgttgcaagatttagctccgcgtcgcacagcttcttgcaggatagcgccagcgcttgccgatccggtgggaaaaaaaagtgggagcacggagcggcctcgcctcggcgggggaggcgcccgccatggggagcgacctcaaggagatgaagtacaggcggaggatcggggtggaggagcggccgcaatgcagcgacccgaggggcggcgcggactgggccgcgctgcagcaggaccccgtcgagctgctgcgcaagctggacgagctgagggaccagatcacgcgctcctgcaacgtcgtcgtcggccagccgcgggagcaccgcagggtcagccgccgtgcggtctccatgctccccgagcatctcgagccaccgcctctgccagggtaccaccgctcccgctacggtgggcggtatgggcacggcttgccgccaccaagcccatacgcaccgccacgccctgaacatggggaaaggtatgcgaggcagtctagtgggcactaccgccagtaccctcccaggcactgcgagaacggtgggatggggcctgggacctaccatcaccatgggtgtgcctgtccgcactgtctgcatgggcagaggactttcccgcaggaggagaacatcccaatggcgagatacttcgccgggcagcacgaatcataccggttggagaggtcgccttctgtttcatccgattatgatcgtgggtctgtggcgtcatcactttactctcatcggtctgtatcgaagatgagggcagagtacttcaggaagaaggcagaacatatctgccgtccagtggatggtgccgcacctttctctgtatgcagttcatgttataaactactgctgatgcctatggaaaaatgcgtagggaggaagcagaatcggtttcaatgtgggtcttgttgtcagataattagtttgaagcatcaggaagaaaatggtatcccctttgcacttgcaccatcatcatccttacatgcgcctgaaatggagcaaagcacaagtgaccagatgaggcaagattctgtccatcagcgccatgaggatttcaattttatgttcaacaattcaaatgatcattgcgatatgcaaaacaacatggatttcaccgatgataattcacttccttcgaccgcgagtaatgacaggattgagattgacaaagagtgtgggtcaactagaagcattcagtcaaaagctgagggtctctctttctctccaagtaggtctgtagacattggtagcccaaaggatatattgtgcgagagggataaagacagcaatgtggagccttcctcagatggtccacttagtccacgatctccaactttagaggacaaacttgttgacccgttgtgtgcccaggaaaaaggtaacgatgaggacgatcaaggcacggcttacagatcgaacctaacatgcaaaggagaatatgatgctaacgacgagtatgatggggacgttagtacaagaagcaaaccggagagcaatgtaaatgacaaagataccactgaaggcgaaacctcatgcagaaattacaaggaagacaactgttgcaacattgaagatagtagcaaaacatacgagcagaatagtggagaagatgacaccagtagtctagtagatggaaatgagaagtatgagtctatgaatactaaagacgatgatagcagccctggaggtgaggacacatgcaataggtatgagccaaaggttgaagacgatgaaaattgtgttcttggagctgagagcattagcaacaattgtgatgaaaataataaagatgccataaaaactggaagcataagtgagagacatgaagagctgataattgaagaagaaaatgagaaattgcagcaggcatttattgaagatgccaattcccaagcagggagtggttcatcaattaatgagcggacgaattctgggttttctcgcggttcatcagaggctgggttagatgaagatcagtcctcaaccgtccatggatagcgttaaggtttcaattaatggtcatccaatctctgaaagagcccttaagaaggcagagaagaaagctggtcctgttgacccaggttcatattggtacgactaccgtgctggtttttggggtgtcatgggacgagaatgtatcggcattgtccctccatttattagagaatttaattatccgatggccagaaattgtgccggtggggattctggtgtttttgtcaatggcagagaactgcatcaaagagatttagatctacttgtaggaagaggactaccacggacatctggaaaatcatactctcttgagatgtcaggaaatgtaattgatgaagacactggaaaaaaactacgcagtcttggaaaacttgctcctacgattgagaagttgaagcgtggttttggcatgcacgtccctgaagagtttagatagctggttctagtacaggatcttggttttgctaataatacactcttcaaagctgacaatggggtggcaaacgtgtggcttctgcgggacggtggtatcaaatctcagatttcttggactggagctctggaagcagcagtacttaagatccttggtgtgcggcgaaggttgtctggcactcaagaaaccaagataatctggtctaatgacttgactaccaatagtacccctcctgctaatttcaattgcttcaatggaagcgacgtgtgctgctagtgactctagattatcaggcagttcttaacttcactgctctgcctgtacgtgctattccttgaatgtgttatcattatcggtacattgccccatcacaggcatagaagtgttgtcagatgtaccatgagcaattgtcggcttgtaatatattggtagagatatgcttcccctaatatttatatgtatatatatgtgatcttgattcttgaatctcttgccaatacgattgattcctgaaccctgttaataagagtcttattttgaaagcc

SEQ ID NO: 211523 - DNA, 3203 bp, Zea Mays
cctccctcgtcgtctccgttacaacgcagacactgccgccgctccgcgacagtaactctgctctctctctctctcgcatggcgtactcctcgagccgcgggacgaaaccctaatggagaaccggcgccgccgccacgcccctgcgccgtagactcccctcgccgcagtgagccccgttgcaagcttcttgcaggatagcgccagcgcttgccgatccggtgggaaaaaaaagtgggagcacggagcggcctcgcctcggcgggggaggcgcccgccatggggagcgacctcaaggagatgaagtacaggcggaggatcggggtggaggagcggccgcaatgcagcgacccgaggggcggcgcggactgggccgcgctgcagcaggaccccgtcgagctgctgcgcaagctggacgagctgagggaccagatcacgcgctcctgcaacgtcgtcgtcggccagccgcgggagcaccgcagggtcagccgccgtgcggtctccatgctccccgagcatctcgagccaccgcctctgccagggtaccaccgctcccgctacggtgggcggtatgggcacggcttgccgccaccaagcccatacgcaccgccacgccctgaacatggggaaaggtatgcgaggcagtctagtgggcactaccgccagtaccctcccaggcactgcgagaacggtgggatggggcctgggacctaccatcaccatgggtgtgcctgtccgcactgtctgcatgggcagaggactttcccgcaggaggagaacatcccaatggcgagatacttcgccgggcagcacgaatcataccggttggagaggtcgccttctgtttcatccgattatgatcgtgggtctgtggcgtcatcactttactctcatcggtctgtatcgaagatgagggcagagtacttcaggaagaaggcagaacatatctgccgtccagtggatggtgccgcacctttctctgtatgcagttcatgttataaactactgctgatgcctatggaaaaatgcgtagggaggaagcagaatcggtttcaatgtgggtcttgttgtcagataattagtttgaagcatcaggaagaaaatggtatcccctttgcacttgcaccatcatcatccttacatgcgcctgaaatggagcaaagcacaagtgaccagatgaggcaagattctgtccatcagcgccatgaggatttcaattttatgttcaacaattcaaatgatcattgcgatatgcaaaacaacatggatttcaccgatgataattcacttccttcgaccgcgagtaatgacaggattgagattgacaaagagtgtgggtcaactagaagcattcagtcaaaagctgagggtctctctttctctccaagtaggtctgtagacattggtagcccaaaggatatattgtgcgagagggataaagacagcaatgtggagccttcctcagatggtccacttagtccacgatctccaactttagaggacaaacttgttgacccgttgtgtgcccaggaaaaaggtaacgatgaggacgatcaaggcacggcttacagatcgaacctaacatgcaaaggagaatatgatgctaacgacgagtatgatggggacgttagtacaagaagcaaaccggagagcaatgtaaatgacaaagataccactgaaggcgaaacctcatgcagaaattacaaggaagacaactgttgcaacattgaagatagtagcaaaacatacgagcagaatagtggagaagatgacaccagtagtctagtagatggaaatgagaagtatgagtctatgaatactaaagacgatgatagcagccctggaggtgaggacacatgcaataggtatgagccaaaggttgaagacgatgaaaattgtgttcttggagctgagagcattagcaacaattgtgatgaaaataataaagatgccataaaaactggaagcataagtgagagacatgaagagctgataattgaagaagaaaatgagaaattgcagcaggcatttattgaagatgccaattcccaagcagggagtggttcatcaattaatgagcggacgaattctgggttttctcgcggttcatcagaggctgggttagatgaagatcagtcctcaaccggtaagagtggggactcatcattttttgctggtttcttgaagaagggtttcaaggacctttctttattaaataagtccatggatagcgttaaggtttcaattaatggtcatccaatctctgaaagagcccttaagaaggcagagaagaaagctggtcctgttgacccaggttcatattggtacgactaccgtgctggtttttggggtgtcatgggacgagaatgtatcggcattgtccctccatttattagagaatttaattatccgatggccagaaattgtgccggtggggattctggtgtttttgtcaatggcagagaactgcatcaaagagatttagatctacttgtaggaagaggactaccacggacatctggaaaatcatactctcttgagatgtcaggaaatgtaattgatgaagacactggaaaaaaactacgcagtcttggaaaacttgctcctacgattgagaagttgaagcgtggttttggcatgcacgtccctgaagagtttagatagctggttctagtacaggatcttggttttgctaataatacactcttcaaagctgacaatggggtggcaaacgtgtggcttctgcgggacggtggtatcaaatctcagatttcttggactggagctctggaagcagcagtacttaagatccttggtgtgcggcgaaggttgtctggcactcaagaaaccaagataatctggtctaatgacttgactaccaatagtacccctcctgctaatttcaattgcttcaatggaagcgacgtgtgctgctagtgactctagattatcaggcagttcttaacttcactgctctgcctgtacgtgctattccttgaatgtgttatcattatcggtacattgccccatcacaggcatagaagtgttgtcagatgtaccatgagcaattgtcggcttgtaatatattggtagagatatgcttcccctaatatttatatgtatatatatgtgatcttgattcttgaatctcttgccaatacgattgattcctgaaccctgttaataagagtcttattttgaaagcc

SEQ ID NO: 211524 - DNA, 2351 bp, Zea Mays
ctcgtcgtctccgttacaacgcagacactgccgccgctccgcgacagtaactctgctctctctctctctcgcatggcgtactcctcgagccgcgggacgaaaccctaatggagaaccggcgccgccgccacgcccctgcgccgtagactcccctcgccgcagtgagccccgttgcaagggaggaagcagaatcggtttcaatgtgggtcttgttgtcagataattagtttgaagcatcaggaagaaaatggtatcccctttgcacttgcaccatcatcatccttacatgcgcctgaaatggagcaaagcacaagtgaccagatgaggcaagattctgtccatcagcgccatgaggatttcaattttatgttcaacaattcaaatgatcattgcgatatgcaaaacaacatggatttcaccgatgataattcacttccttcgaccgcgagtaatgacaggattgagattgacaaagagtgtgggtcaactagaagcattcagtcaaaagctgagggtctctctttctctccaagtaggtctgtagacattggtagcccaaaggatatattgtgcgagagggataaagacagcaatgtggagccttcctcagatggtccacttagtccacgatctccaactttagaggacaaacttgttgacccgttgtgtgcccaggaaaaaggtaacgatgaggacgatcaaggcacggcttacagatcgaacctaacatgcaaaggagaatatgatgctaacgacgagtatgatggggacgttagtacaagaagcaaaccggagagcaatgtaaatgacaaagataccactgaaggcgaaacctcatgcagaaattacaaggaagacaactgttgcaacattgaagatagtagcaaaacatacgagcagaatagtggagaagatgacaccagtagtctagtagatggaaatgagaagtatgagtctatgaatactaaagacgatgatagcagccctggaggtgaggacacatgcaataggtatgagccaaaggttgaagacgatgaaaattgtgttcttggagctgagagcattagcaacaattgtgatgaaaataataaagatgccataaaaactggaagcataagtgagagacatgaagagctgataattgaagaagaaaatgagaaattgcagcaggcatttattgaagatgccaattcccaagcagggagtggttcatcaattaatgagcggacgaattctgggttttctcgcggttcatcagaggctgggttagatgaagatcagtcctcaaccggtaagagtggggactcatcattttttgctggtttcttgaagaagggtttcaaggacctttctttattaaataagtccatggatagcgttaaggtttcaattaatggtcatccaatctctgaaagagcccttaagaaggcagagaagaaagctggtcctgttgacccaggttcatattggtacgactaccgtgctggtttttggggtgtcatgggacgagaatgtatcggcattgtccctccatttattagagaatttaattatccgatggccagaaattgtgccggtggggattctggtgtttttgtcaatggcagagaactgcatcaaagagatttagatctacttgtaggaagaggactaccacggacatctggaaaatcatactctcttgagatgtcaggaaatgtaattgatgaagacactggaaaaaaactacgcagtcttggaaaacttgctcctacgattgagaagttgaagcgtggttttggcatgcacgtccctgaagagtttagatagctggttctagtacaggatcttggttttgctaataatacactcttcaaagctgacaatggggtggcaaacgtgtggcttctgcgggacggtggtatcaaatctcagatttcttggactggagctctggaagcagcagtacttaagatccttggtgtgcggcgaaggttgtctggcactcaagaaaccaagataatctggtctaatgacttgactaccaatagtacccctcctgctaatttcaattgcttcaatggaagcgacgtgtgctgctagtgactctagattatcaggcagttcttaacttcactgctctgcctgtacgtgctattccttgaatgtgttatcattatcggtacattgccccatcacaggcatagaagtgttgtcagatgtaccatgagcaattgtcggcttgtaatatattggtagagatatgcttcccctaatatttatatgtatatatatgtgatcttgattcttgaatctcttgccaatacgattgattcctgaaccctgttaataagagtcttattttgaaagcc

SEQ ID NO: 211525 - DNA, 3110 bp, Zea Mays
ctcgtcgtctccgttacaacgcagacactgccgccgctccgcgacagtaactctgctctctctctctctcgcatggcgtactcctcgagccgcgggacgaaaccctaatggagaaccggcgccgccgccacgcccctgcgccgtagactcccctcgccgcagatagcgccagcgcttgccgatccggtgggaaaaaaaagtgggagcacggagcggcctcgcctcggcgggggaggcgcccgccatggggagcgacctcaaggagatgaagtacaggcggaggatcggggtggaggagcggccgcaatgcagcgacccgaggggcggcgcggactgggccgcgctgcagcaggaccccgtcgagctgctgcgcaagctggacgagctgagggaccagatcacgcgctcctgcaacgtcgtcgtcggccagccgcgggagcaccgcagggtcagccgccgtgcggtctccatgctccccgagcatctcgagccaccgcctctgccagggtaccaccgctcccgctacggtgggcggtatgggcacggcttgccgccaccaagcccatacgcaccgccacgccctgaacatggggaaaggtatgcgaggcagtctagtgggcactaccgccagtaccctcccaggcactgcgagaacggtgggatggggcctgggacctaccatcaccatgggtgtgcctgtccgcactgtctgcatgggcagaggactttcccgcaggaggagaacatcccaatggcgagatacttcgccgggcagcacgaatcataccggttggagaggtcgccttctgtttcatccgattatgatcgtgggtctgtggcgtcatcactttactctcatcggtctgtatcgaagatgagggcagagtacttcaggaagaaggcagaacatatctgccgtccagtggatggtgccgcacctttctctgtatgcagttcatgttataaactactgctgatgcctatggaaaaatgcgtagggaggaagcagaatcggtttcaatgtgggtcttgttgtcagataattagtttgaagcatcaggaagaaaatggtatcccctttgcacttgcaccatcatcatccttacatgcgcctgaaatggagcaaagcacaagtgaccagatgaggcaagattctgtccatcagcgccatgaggatttcaattttatgttcaacaattcaaatgatcattgcgatatgcaaaacaacatggatttcaccgatgataattcacttccttcgaccgcgagtaatgacaggattgagattgacaaagagtgtgggtcaactagaagcattcagtcaaaagctgagggtctctctttctctccaagtaggtctgtagacattggtagcccaaaggatatattgtgcgagagggataaagacagcaatgtggagccttcctcagatggtccacttagtccacgatctccaactttagaggacaaacttgttgacccgttgtgtgcccaggaaaaaggtaacgatgaggacgatcaaggcacggcttacagatcgaacctaacatgcaaaggagaatatgatgctaacgacgagtatgatggggacgttagtacaagaagcaaaccggagagcaatgtaaatgacaaagataccactgaaggcgaaacctcatgcagaaattacaaggaagacaactgttgcaacattgaagatagtagcaaaacatacgagcagaatagtggagaagatgacaccagtagtctagtagatggaaatgagaagtatgagtctatgaatactaaagacgatgatagcagccctggaggtgaggacacatgcaataggtatgagccaaaggttgaagacgatgaaaattgtgttcttggagctgagagcattagcaacaattgtgatgaaaataataaagatgccataaaaactggaagcataagtgagagacatgaagagctgataattgaagaagaaaatgagaaattgcagcaggcatttattgaagatgccaattcccaagcagggagtggttcatcaattaatgagcggacgaattctgggttttctcgcggttcatcagaggctgggttagatgaagatcagtcctcaaccggtaagagtggggactcatcattttttgctggtttcttgaagaagggtttcaaggacctttctttattaaataagtccatggatagcgttaaggtttcaattaatggtcatccaatctctgaaagagcccttaagaaggcagagaagaaagctggtcctgttgacccaggttcatattgccatttattagagaatttaattatccgatggccagaaattgtgccggtggggattctggtgtttttgtcaatggcagagaactgcatcaaagagatttagatctacttgtaggaagaggactaccacggacatctggaaaatcatactctcttgagatgtcaggaaatgtaattgatgaagacactggaaaaaaactacgcagtcttggaaaacttgctcctacgattgagaagttgaagcgtggttttggcatgcacgtccctgaagagtttagatagctggttctagtacaggatcttggttttgctaataatacactcttcaaagctgacaatggggtggcaaacgtgtggcttctgcgggacggtggtatcaaatctcagatttcttggactggagctctggaagcagcagtacttaagatccttggtgtgcggcgaaggttgtctggcactcaagaaaccaagataatctggtctaatgacttgactaccaatagtacccctcctgctaatttcaattgcttcaatggaagcgacgtgtgctgctagtgactctagattatcaggcagttcttaacttcactgctctgcctgtacgtgctattccttgaatgtgttatcattatcggtacattgccccatcacaggcatagaagtgttgtcagatgtaccatgagcaattgtcggcttgtaatatattggtagagatatgcttcccctaatatttatatgtatatatatgtgatcttgattcttgaatctcttgccaatacgattgattcctgaaccctgttaataagagtcttattttgaaagcc

SEQ ID NO: 211526 - DNA, 1057 bp, Zea Mays
gtcgtctccgttacaacgcagacactgccgccgctccgcgacagtaactctgctctctctctctctcgcatggcgtactcctcgagccgcgggacgaaaccctaatggagaaccggcgccgccgccacgcccctgcgccgtagactcccctcgccgcagtgagccccgttgcaaggtacgactaccgtgctggtttttggggtgtcatgggacgagaatgtatcggcattgtccctccatttattagagaatttaattatccgatggccagaaattgtgccggtggggattctggtgtttttgtcaatggcagagaactgcatcaaagagatttagatctacttgtaggaagaggactaccacggacatctggaaaatcatactctcttgagatgtcaggaaatgtaattgatgaagacactggaaaaaaactacgcagtcttggaaaacttgctcctacgattgagaagttgaagcgtggttttggcatgcacgtccctgaagagtttagatagctggttctagtacaggatcttggttttgctaataatacactcttcaaagctgacaatggggtggcaaacgtgtggcttctgcgggacggtggtatcaaatctcagatttcttggactggagctctggaagcagcagtacttaagatccttggtgtgcggcgaaggttgtctggcactcaagaaaccaagataatctggtctaatgacttgactaccaatagtacccctcctgctaatttcaattgcttcaatggaagcgacgtgtgctgctagtgactctagattatcaggcagttcttaacttcactgctctgcctgtacgtgctattccttgaatgtgttatcattatcggtacattgccccatcacaggcatagaagtgttgtcagatgtaccatgagcaattgtcggcttgtaatatattggtagagatatgcttcccctaatatttatatgtatatatatgtgatcttgattcttgaatctcttgccaatacgattgattcctgaaccctgttaataagagtcttattttgaaagcc

SEQ ID NO: 211527 - DNA, 3206 bp, Zea Mays
gtcgtctccgttacaacgcagacactgccgccgctccgcgacagtaactctgctctctctctctctcgcatggcgtactcctcgagccgcgggacgaaaccctaatggagaaccggcgccgccgccacgcccctgcgccgtagactcccctcgccgcagtgagccccgttgcaagatttagctccgcgtcgcacagcttcttgcaggatagcgccagcgcttgccgatccggtgggaaaaaaaagtgggagcacggagcggcctcgcctcggcgggggaggcgcccgccatggggagcgacctcaaggagatgaagtacaggcggaggatcggggtggaggagcggccgcaatgcagcgacccgaggggcggcgcggactgggccgcgctgcagcaggaccccgtcgagctgctgcgcaagctggacgagctgagggaccagatcacgcgctcctgcaacgtcgtcgtcggccagccgcgggagcaccgcagggtcagccgccgtgcggtctccatgctccccgagcatctcgagccaccgcctctgccagggtaccaccgctcccgctacggtgggcggtatgggcacggcttgccgccaccaagcccatacgcaccgccacgccctgaacatggggaaaggtatgcgaggcagtctagtgggcactaccgccagtaccctcccaggcactgcgagaacggtgggatggggcctgggacctaccatcaccatgggtgtgcctgtccgcactgtctgcatgggcagaggactttcccgcaggaggagaacatcccaatggcgagatacttcgccgggcagcacgaatcataccggttggagaggtcgccttctgtttcatccgattatgatcgtgggtctgtggcgtcatcactttactctcatcggtctgtatcgaagatgagggcagagtacttcaggaagaaggcagaacatatctgccgtccagtggatggtgccgcacctttctctgtatgcagttcatgttataaactactgctgatgcctatggaaaaatgcgtagggaggaagcagaatcggtttcaatgtgggtcttgttgtcagataattagtttgaagcatcaggaagaaaatggtatcccctttgcacttgcaccatcatcatccttacatgcgcctgaaatggagcaaagcacaagtgaccagatgaggcaagattctgtccatcagcgccatgaggatttcaattttatgttcaacaattcaaatgatcattgcgatatgcaaaacaacatggatttcaccgatgataattcacttccttcgaccgcgagtaatgacaggattgagattgacaaagagtgtgggtcaactagaagcattcagtcaaaagctgagggtctctctttctctccaagtaggtctgtagacattggtagcccaaaggatatattgtgcgagagggataaagacagcaatgtggagccttcctcagatggtccacttagtccacgatctccaactttagaggacaaacttgttgacccgttgtgtgcccaggaaaaaggtaacgatgaggacgatcaaggcacggcttacagatcgaacctaacatgcaaaggagaatatgatgctaacgacgagtatgatggggacgttagtacaagaagcaaaccggagagcaatgtaaatgacaaagataccactgaaggcgaaacctcatgcagaaattacaaggaagacaactgttgcaacattgaagatagtagcaaaacatacgagcagaatagtggagaagatgacaccagtagtctagtagatggaaatgagaagtatgagtctatgaatactaaagacgatgatagcagccctggaggtgaggacacatgcaataggtatgagccaaaggttgaagacgatgaaaattgtgttcttggagctgagagcattagcaacaattgtgatgaaaataataaagatgccataaaaactggaagcataagtgagagacatgaagagctgataattgaagaagaaaatgagaaattgcagcaggcatttattgaagatgccaattcccaagcagggagtggttcatcaattaatgagcggacgaattctgggttttctcgcggttcatcagaggctgggttagatgaagatcagtcctcaaccggtaagagtggggactcatcattttttgctggtttcttgaagaagggtttcaaggacctttctttattaaataagtccatggatagcgttaaggtttcaattaatggtcatccaatctctgaaagagcccttaagaaggcagagaagaaagctggtcctgttgacccaggtacgactaccgtgctggtttttggggtgtcatgggacgagaatgtatcggcattgtccctccatttattagagaatttaattatccgatggccagaaattgtgccggtggggattctggtgtttttgtcaatggcagagaactgcatcaaagagatttagatctacttgtaggaagaggactaccacggacatctggaaaatcatactctcttgagatgtcaggaaatgtaattgatgaagacactggaaaaaaactacgcagtcttggaaaacttgctcctacgattgagaagttgaagcgtggttttggcatgcacgtccctgaagagtttagatagctggttctagtacaggatcttggttttgctaataatacactcttcaaagctgacaatggggtggcaaacgtgtggcttctgcgggacggtggtatcaaatctcagatttcttggactggagctctggaagcagcagtacttaagatccttggtgtgcggcgaaggttgtctggcactcaagaaaccaagataatctggtctaatgacttgactaccaatagtacccctcctgctaatttcaattgcttcaatggaagcgacgtgtgctgctagtgactctagattatcaggcagttcttaacttcactgctctgcctgtacgtgctattccttgaatgtgttatcattatcggtacattgccccatcacaggcatagaagtgttgtcagatgtaccatgagcaattgtcggcttgtaatatattggtagagatatgcttcccctaatatttatatgtatatatatgtgatcttgattcttgaatctcttgccaatacgattgattcctgaaccctgttaataagagtcttattttgaaagcc

SEQ ID NO: 211528 - DNA, 1643 bp, Zea Mays
atttttgtcaccaagtgttcatattttaccgtatgtgtcatcataggtagacagttcttttaccaaggaaggaaaactgctacttcagagcttcaaacacgggcacagtatttctttagtttgaaagagatcgaatctgcaacaaaacattttgatcctgcaaataaaataggtgagggtggctttggacctgtttacaagggcacactagcaaatggtactatagttgcagttaaaaagctatcttcaaagtcgagccaaggaaatcgcgagtttttaaatgagataggaataatatctgctctaaggcatccgaatcttgtgaggctatttggttgctgtattgatggggatcagcttcttcttatatatgaattcttggaaaataatagtcttggccgtgcgctttttgaacatcagttaaaattggattggccaacaaggtacaatatctgccttggaactgcaaaaggcctggtctatctgcatgaagagtctgcactaaaaatcgtccacagagatattaagccatcaaatattcttcttgatggaaagatgcgacctaaaatatcagattttggcttggctaaactgaatgatgactgtggacgtgtgagcactcggatcgctggaactgttggttatatggcccctgaatatgccacaagaggttgcttaacacgtaaagcggacatctatagttatggagtggtggctcttgaggttgttagtggaatgagcaatacgaatagcatgtcaaatgaagaatatctgcatcttcttgattgggctgaaagattgaagcagcaagggaagctgctggaaatggtggaccggcgtctcggttctgactactcccaagaacaggcactgaggctgctggatgtagctctcctctgtacaagcatacaaccaacccagcggccaagaatgtcttcagtggtgaagatgctttgtggtgagatccccgtcgagattgtacctgctgacgatgatctaagtgaagatctacgactcaacatcgctcaatcccggcaatcaatagataacagccaaacaaattggtcccagtactcagtaaataacagccaaacaaattggtctgaaacgctttcaagcgatcgttcggtcttgccccacagcagcaaggacagtggctacctcccatcttcgagctccctttctgtcaagctgtgaacttcagcatcgagaatagctagccaggtgtcggcttttttttggggcccgttgctgcagttgtacataggcaaatgttgggtttcatgcttgcaatgcaagtatttgatgtctcatctcgattgtcaagtgtcattcaagaatatcgtccacgacacatggcaattgatcacagtactgtctcaacgtcagccatatttcggctagctccttagtttgttgctttggatgtagaaagttataatgacttataatttggaacagatggagatgtagtatatcattaggacagtgcacttgagaaatgtaggccagaaatattgtttcatatatgcagatcttggagacagtgcaatactttatttcggtcttctttctattgtttacaagcgcagttgtgtgcatgcagtactgctcatgttccacctttttgtatactgtcccta

SEQ ID NO: 211529 - DNA, 1810 bp, Zea Mays
atttttgtcaccaagtgttcatattttaccgtatgtgtcatcataggtagacagttcttttaccaaggaaggaaaactgctacttcagagcttcaaacacgggcacagtatttctttagtttgaaagagatcgaatctgcaacaaaacattttgatcctgcaaataaaatagggcacactagcaaatggtactatagttgcagttaaaaagctatcttcaaagtcgagccaaggaaatcgcgagtttttaaatgagataggaataatatctgctctaaggcatccgaatcttgtgaggctatttggttgctgtattgatggggatcagcttcttcttatatatgaattcttggaaaataatagtcttggccgtgcgctttttggccgcacagaacatcagttaaaattggattggccaacaaggtacaatatctgccttggaactgcaaaaggcctggtctatctgcatgaagagtctgcactaaaaatcgtccacagagatattaagccatcaaatattcttcttgatggaaagatgcgacctaaaatatcagattttggcttggctaaactgaatgatgactgtggacgtgtgagcactcggatcgctggaactgtgtaagctatttctcgggttgctgctgattcttcatttctctattacagtcaagttgcttaaccttctaaaagagttgctagtacaactgtacaacaatttattctgcgtaaagaaagttcatgtacttagcatgtgaagttaatgcttcctgtgtttgatcctattttgtgatggttgttattttagtggttatatggcccctgaatatgccacaagaggttgcttaacacgtaaagcggacatctatagttatggagtggtggctcttgaggttgttagtggaatgagcaatacgaatagcatgtcaaatgaagaatatctgcatcttcttgattgggctgaaagattgaagcagcaagggaagctgctggaaatggtggaccggcgtctcggttctgactactcccaagaacaggcactgaggctgctggatgtagctctcctctgtacaagcatacaaccaacccagcggccaagaatgtcttcagtggtgaagatgctttgtggtgagatccccgtcgagattgtacctgctgacgatgatctaagtgaagatctacgactcaacatcgctcaatcccggcaatcaatagataacagccaaacaaattggtcccagtactcagtaaataacagccaaacaaattggtctgaaacgctttcaagcgatcgttcggtcttgccccacagcagcaaggacagtggctacctcccatcttcgagctccctttctgtcaagctgtgaacttcagcatcgagaatagctagccaggtgtcggcttttttttggggcccgttgctgcagttgtacataggcaaatgttgggtttcatgcttgcaatgcaagtatttgatgtctcatctcgattgtcaagtgtcattcaagaatatcgtccacgacacatggcaattgatcacagtactgtctcaacgtcagccatatttcggctagctccttagtttgttgctttggatgtagaaagttataatgacttataatttggaacagatggagatgtagtatatcattaggacagtgcacttgagaaatgtaggccagaaatattgtttcatatatgcagatcttggagacagtgcaatactttatttcggtcttctttctattgtttacaagcgcagttgtgtgcatgcagtactgctcatgttccacctttttgtatactgtcccta

SEQ ID NO: 211530 - DNA, 2235 bp, Zea Mays
agcagcccctccaaaaaatctcaaacaactcttcagcacgggaaaacccgtacacaccacagcaccgtcgccaatgtccgccgccgcagccgactggcttccgtcagcgtccgtgacggcatccggccgcccggtgctttccgcgggcgaggtggagcggaatctcctcccgctcgtcgacctcgagcccgaggaaaatccgcgccttgctcccctccgcgcctgcctcctcgcgctgacttcccaccgcctcatcttcctccacgagccctcccgctccgcgcgcggcctgccgctcgccaccgtcgtccatgcgtaccctccccaccgcaggcacagccacaaccccctccgctccctcttctccgccccgtcctcatcttcctcgtctcagcatcaccgcatccgcctccagatctccatgccacccgtgcgatcagaggtcatcgccatcgtcgtgacctgcaaggctgacgttgatgtgttcttcgggaggctgctcgaggcgatccgtgcaagggcttgggaggtgacccctgcagctgctccgtcgagtggcacgtcggtggcagagggggccgcgcctacggaggacatcgcgatacggatgccggttgttggggtctcggggatactgcggatggagcaggagtcatgggagaacgccgggcagaacttgcaagatgcgttccaggatctcaatgccctcatgagcaaagctaaggaaatgatgcagttagcagaaaaaatgaggctcaagctattaatgaactcatccactgaatcaaattccaatgatgaagagatgggttctaagcaagacatgcaggatttgctgttgagtgttggcattgtgtctcctgtgacgaaagaaactgctggtgcgttgtatcatcagcagttgtcactacagctggcggactttgtaagaataccacttgagaaagcaggtggtatgatggcactagtcgatgtttattgtctcttcaaccgtgctaggggaacagagttgatctcaccagaggaccttttgcaagcttgttccctgtgggagaaagttgatgtatgttgatttctaatgagcagcccagtcatgctcaggaaatttgatagtggagtgaaggtgatccagaccaaaacacatagtgatgaagaggtaagcactaagcaatcacaacaataagccttaacgcataccgaatgcccactagacaacatattgcagccaatcagcattgactttgttagtgaatgtactgcagccacagattctgcagctgtctatgtttgtacttcgtacatttgccgctatcattgtttttagcactaccactaggcactagcgatcgctgaaccttttcctcaacgaacataggtatttgcaagaatctcatcacttgcacagaagccagatgctcttcagaaagggattagcccaagtgatgctgcattcacactgggaattgctccagctttagcaaaggagcatcttctaaatgcagaaaacaaaggcctgttgtgcagagatgttagtccagatggattccgcttttttagcaatttatttaatgacattgatccccaaaatattcactcgcaaaaaccccatgggatgtacaaggcgtggatctccgttgcgatggcgtctcactgaaaaagttcgactgggatatattgagatactggttgatcaagctggacatcgatgcaattatagtgtactctttgaaaacgtccgatcaagccagtcattggtgcgatcacaatgtatcctttgaaaacgttagtctgcatatctcgccattatgtaccataacaccaaaagatgtgatatagcaattagcaagcccatttgttctgttgaatgaagagcgtttgagtacgatgtatgaggattcgggctacattggtaaccgtattagcatgcgaccagattaacttttctgtactgactccatccaaaaataatgcaactctggtatagtcctaagctgtactacctcaattttcatcaaaattataagacgagttatgatactaaaaagtactgctagatatatatatttttgataaatataatttaacaatgggtctctgtcctttggagatgctcacaagaataaggataagatgtgtgtgtgtgtgttcataggtgtaaatgtatggacatgtatgagcatctatgttggagtgtgatttcaaaataaaaagtatagtgcgtgatatcaaaatgac

SEQ ID NO: 211531 - DNA, 1404 bp, Zea Mays
gtcttgccaaacgtggtctccctcacccagagatgaaaggtccaaaattgatgatcacaattcaaagtttgatctcggggtgccagatgatcttgatgtatcaattgaacttagaaattggctatttgcacttgaaggaactgaagaagtaggataccttttttctcctcgtggaggtgatggtatcagtagagaagaaaaatgctggcattcaaccttcaggaatctacatatctctggcaagagcagtgaccgacttaaattgggaggcagaagaaaggtgtcacccgaaaaggcatttccagtggaacgctttacggctggaattgaaggtttgcaggcaataaaacctcgtctgagagatcagtgcactaaaaaaggaccatcaaacaatcatgagatgggcagagattttaatagttcaagttctgttggtgaccatggagttgatgtcgaagctaccatggtcattggcgaagacgagattgagggtgccaaatggacaatggataatgtcaaattttctgtcaaagaaccaatcgaggcggttgcaacaaaagaagaactagagcaccttgtgatgctttgcagatctgaggctgatgcaatggggaggatcactgctggaattcttcgtctccttaaacttgacaaatctcttgggcaaggaactatagaacaactacgtaacctaggaagtggaggcatggacaatatcttttcacccaggaggctcagcaggcagaacagttttggtagcataggcactcctcggactccaactatgcaagccattgcagacgtcatgggttcgaaaaccacactggaagcaactatttcctcattacaaggcgagatttccgaatccaaggccaaatgtatggcactgatttctcaggcaagcagcactgaggatcaaaaccgtgccgaggacatcaggcagcttagcgaaaagctcgagagcatgcaatcgttggtgacacgattgagaactttgatcatttgatctgactatctgagttgtgcatggttttttttgtgtacagtacacaaggtcgttctgttcaaactcggaagtggcaaatgctgcttcctggtggctggttgagttattcttttgtgtacatttatatatcttgggaggcggtgtgtaaagattaaggggggtggaataatcggttgataggcagctggaggaaattttgtaggcagctggtactggcaaatatgctttgtagcacggcatcatatgatcaaacgggtcactaagaagagtgcagtgccatttatatcattgtatgtataaaatgtgcacagaacgtgcttttcgcgcacaaaaactttgttcctcctaagtcactgaagtgtttatatgccacttgtgtcaactatcgaagtgtttct

SEQ ID NO: 211532 - DNA, 2947 bp, Zea Mays
ctcccccaagttgttgtccatgtacctgagacaccttttctcgccctccatgcacattgatacagccgtctatgcaagcagtttcacaagaacctccacctgtgcctgacttcggtcaaaatttttgccctcctatatatccatttggcaatcaactattagactttgctgctggagttcctttgttttccctctattgtcttcagaccaccccttctccatcacctccgaagtttgcttcaaaaacagtcatcacatgccagtctatcatggtaaccctccaggagcaatcgtgcttaagaattgcttcattcttggctgatggagttgtacccaatcgtggtgccatattgccagagtcttcaatcaacagcctgacattttcacttaaagagtttgatctctctgttccattagatactgatgaaatcgcaaggtgcagtggaaccaagaatactaacccccaatcatcattttcgggtgcaagactgcatgtggaagacctatacttctgccagtcaccatcaactaagtgtccattgctaaaccttgacagagatccagcttgcttccttctgtgggaatatcaacctgttgatgcgagtcagatgaagtgggctacttggtcttctcacctaagtctctcacttgaaacttctagcacttcaaatggacagagagcagtcagtgattctaatttgtggaaatgtattgaactagatgatatccgatttgaggtagctatggttacagcagatggtgggcctttgttggatgtaccacctccagagggtgttgtaagaattggtgttgctttccaacagttcaagtccaacacctcagttgagcaattgttttttgtgttaggtttttatacttactttggtcaagtagcagaacgtatctcaaaggtcagcaacgctaacaagtctgagtcagtgaagtcatcggctgacaagtcggagaataaactgccaagtgatacagctgtgagtttaactatgaataatctccagctcaatttcttagaatctttgtcagcaagtgatgtacatatgcccttggttcagtttggcggaggggatctgttcctgaaagtttctcaccgcactctaggtggtgcctttgcagtcacgactaatttgatgtggacaactgtttcggtgaactgtttagaaggagaaagtgctattgtttgtgagcatggcactgcagtgactggtgaacacagcattttagtgcatggaaatgggcaccccaagatgagagctgtcttttgggttgatcataggagcaaacaccaggttaaagaacctcagttccttgatataaacatcactcatgtaatgccttacgatatccaggatatggagtgccatagcttgaatgtatcagctaaggtatctggtgttcgtcttgggggtggaatttcttacactgagtctttactgcatcgatttggtatcctgggtcctgatggcggtccaggggaaggtctcttgaggggtttgaaggatttatcttcaggcccacttgcgaagctgtttaaatcctctcacctcactgaaaaggaagatgaaaggtccaaaattgatgatcacaattcaaagtttgatctcggggtgccagatgatcttgatgtatcaattgaacttagaaattggctatttgcacttgaaggaactgaagaagtaggataccttttttctcctcgtggaggtgatggtatcagtagagaagaaaaatgctggcattcaaccttcaggaatctacatatctctggcaagagcagtgaccgacttaaattgggaggcagaagaaaggtgtcacccgaaaaggcatttccagtggaacgctttacggctggaattgaaggtttgcaggcaataaaacctcgtctgagagatcagtgcactaaaaaaggaccatcaaacaatcatgagatgggcagagattttaatagttcaagttctgttggtgaccatggagttgatgtcgaagctaccatggtcattggcgaagacgagattgagggtgccaaatggacaatggataatgtcaaattttctgtcaaagaaccaatcgaggcggttgcaacaaaagaagaactagagcaccttgtgatgctttgcagatctgaggctgatgcaatggggaggatcactgctggaattcttcgtctccttaaacttgacaaatctcttgggcaaggaactatagaacaactacgtaacctaggaagtggaggcatggacaatatcttttcacccaggaggctcagcaggcagaacagttttggtagcataggcactcctcggactccaactatgcaagccattgcagacgtcatgggttcgaaaaccacactggaagcaactatttcctcattacaaggcgagatttccgaatccaaggccaaatgtatggcactgatttctcaggcaagcagcactgaggatcaaaaccgtgccgaggacatcaggcagcttagcgaaaagctcgagagcatgcaatcgttggtgacacgattgagaactttgatcatttgatctgactatctgagttgtgcatggttttttttgtgtacagtacacaaggtcgttctgttcaaactcggaagtggcaaatgctgcttcctggtggctggttgagttattcttttgtgtacatttatatatcttgggaggcggtgtgtaaagattaaggggggtggaataatcggttgataggcagctggaggaaattttgtaggcagctggtactggcaaatatgctttgtagcacggcatcatatgatcaaacgggtcactaagaagagtgcagtgccatttatatcattgtatgtataaaatgtgcacagaacgtgcttttcgcgcacaaaaactttgttcctcctaagtcactgaagtgtttatatgccacttgtgtcaactatcgaagtgtttct

SEQ ID NO: 211533 - DNA, 4211 bp, Zea Mays
agggcccaccgtctcttctcacatcctcgcagttccacccctgtccccttccacctccctccccagtgcccccctccgctttctccatcccgcctccgatccggccacccgccaccgccgacaccgggcgacccgtcccaccgccgcgccgctccaggggaaccgtccgggcaggcgggggaggatggagtccatcatagcgcgggcgctggagtacacgctcaagtactggctcaagtccttctcccgcgaccagttcaagctccagggccgcaccgcgcagctctccaacctcgatatcaatggcgatgcgctgcacgcgagcctggggctgcctcccgcgctcgccgtcgacacagcgcgtgtcgggaagctccagatcacgttaccatctctatcaaatgtgcaagtagagccaattgaggtgaacattgacaagctcgatctcgtgcttgtagagaaggacgattctgaaaatctttccagccctagcagcactgcatcatctccatcagcaactaagagcagtggatatggttacgctgacaagacggaatgacagtgcaagtagggattgttaacctgctactggaaacacatggaggggctcaccgtcaaggggatgcaacatggtcaccgccactagcagcaatcacattccgtgatcttgtattgtacacaacaaatgaaaaatggcaggtagtaaacttgaaagaagcaagagatttctccaacaacaaagggttcatttatgtttttaagaaactggagtggcaatcactgtcagttgatctgttgcctcatcctgatatgttcgccgatgcaagatttaactcttctagtagtcaagacgacaaaagagatgatgatggtgcaaaacgaatgttttttggtggtgaaagatttttggaaggaatatctggagaggctaacatcacggtccagcggacagaacagaataatccacttgggcttgaggttcagctacatattacagaagctgtctgtcctgccttaagtgaacctggcttacgggcctttcttcgatttatgactggggtatctgtgtgcctaaacaggggagatatagatccaaaagctcaacagcttgcagaagcagcaggatcttcattggtgtccattatcgtagatcacatattcctctgcattaaagatactgagtttcaacttgaacttctcatgcagtctttgttcttctcacgggcaagcatttcagacggcgaatgctcaaagaacttatcttgcatcaaggtcggcgggatgtttctgagagacaccttttctcgccctccatgcacattgatacagccgtctatgcaagcagtttcacaagaacctccacctgtgcctgacttcggtcaaaatttttgccctcctatatatccatttggcaatcaactattagactttgctgctggagttcctttgttttccctctattgtcttcagaccaccccttctccatcacctccgaagtttgcttcaaaaacagtcatcacatgccagtctatcatggtaaccctccaggagcaatcgtgcttaagaattgcttcattcttggctgatggagttgtacccaatcgtggtgccatattgccagagtcttcaatcaacagcctgacattttcacttaaagagtttgatctctctgttccattagatactgatgaaatcgcaaggtgcagtggaaccaagaatactaacccccaatcatcattttcgggtgcaagactgcatgtggaagacctatacttctgccagtcaccatcaactaagtgtccattgctaaaccttgacagagatccagcttgcttccttctgtgggaatatcaacctgttgatgcgagtcagatgaagtgggctacttggtcttctcacctaagtctctcacttgaaacttctagcacttcaaatggacagagagcagtcagtgattctaatttgtggaaatgtattgaactagatgatatccgatttgaggtagctatggttacagcagatggtgggcctttgttggatgtaccacctccagagggtgttgtaagaattggtgttgctttccaacagttcaagtccaacacctcagttgagcaattgttttttgtgttaggtttttatacttactttggtcaagtagcagaacgtatctcaaaggtcagcaacgctaacaagtctgagtcagtgaagtcatcggctgacaagtcggagaataaactgccaagtgatacagctgtgagtttaactatgaataatctccagctcaatttcttagaatctttgtcagcaagtgatgtacatatgcccttggttcagtttggcggaggggatctgttcctgaaagtttctcaccgcactctaggtggtgcctttgcagtcacgactaatttgatgtggacaactgtttcggtgaactgtttagaaggagaaagtgctattgtttgtgagcatggcactgcagtgactggtgaacacagcattttagtgcatggaaatgggcaccccaagatgagagctgtcttttgggttgatcataggagcaaacaccaggttaaagaacctcagttccttgatataaacatcactcatgtaatgccttacgatatccaggatatggagtgccatagcttgaatgtatcagctaaggtatctggtgttcgtcttgggggtggaatttcttacactgagtctttactgcatcgatttggtatcctgggtcctgatggcggtccaggggaaggtctcttgaggggtttgaaggatttatcttcaggcccacttgcgaagctgtttaaatcctctcacctcactgaaaaggaagatgaaaggtccaaaattgatgatcacaattcaaagtttgatctcggggtgccagatgatcttgatgtatcaattgaacttagaaattggctatttgcacttgaaggaactgaagaagtaggataccttttttctcctcgtggaggtgatggtatcagtagagaagaaaaatgctggcattcaaccttcaggaatctacatatctctggcaagagcagtgaccgacttaaattgggaggcagaagaaaggtgtcacccgaaaaggcatttccagtggaacgctttacggctggaattgaaggtttgcaggcaataaaacctcgtctgagagatcagtgcactaaaaaaggaccatcaaacaatcatgagatgggcagagattttaatagttcaagttctgttggtgaccatggagttgatgtcgaagctaccatggtcattggcgaagacgagattgagggtgccaaatggacaatggataatgtcaaattttctgtcaaagaaccaatcgaggcggttgcaacaaaagaagaactagagcaccttgtgatgctttgcagatctgaggctgatgcaatggggaggatcactgctggaattcttcgtctccttaaacttgacaaatctcttgggcaaggaactatagaacaactacgtaacctaggaagtggaggcatggacaatatcttttcacccaggaggctcagcaggcagaacagttttggtagcataggcactcctcggactccaactatgcaagccattgcagacgtcatgggttcgaaaaccacactggaagcaactatttcctcattacaaggcgagatttccgaatccaaggccaaatgtatggcactgatttctcaggcaagcagcactgaggatcaaaaccgtgccgaggacatcaggcagcttagcgaaaagctcgagagcatgcaatcgttggtgacacgattgagaactttgatcatttgatctgactatctgagttgtgcatggttttttttgtgtacagtacacaaggtcgttctgttcaaactcggaagtggcaaatgctgcttcctggtggctggttgagttattcttttgtgtacatttatatatcttgggaggcggtgtgtaaagattaaggggggtggaataatcggttgataggcagctggaggaaattttgtaggcagctggtactggcaaatatgctttgtagcacggcatcatatgatcaaacgggtcactaagaagagtgcagtgccatttatatcattgtatgtataaaatgtgcacagaacgtgcttttcgcgcacaaaaactttgttcctcctaagtcactgaagtgtttatatgccacttgtgtcaactatcgaagtgtttct

SEQ ID NO: 211534 - DNA, 1156 bp, Zea Mays
gactgcaaattgcgcgtctcctccgcccttaatcctgacaaaaggaaaaacgcgaagcagagctccctccctcctctctcctcttcttcttcgtcgtggtgttggtgtggggcatctcgcaccccacccatccctgtcctcccgctcgccggtgcgcgcgcttttctagggtttccgctgccccagccgccaatcccgctcacctctcgtcaccggcgatggcgtcggcgtcggtgtcggccccggtggcaggggcaggggccgggggcgggaaggacgaggagctcgccgatctggtgcggcgcctcatggacgccctcgctcgctacgctgatcgcctgcccttcgaccttgatcgccagttcacatgccgcttgcttggtgtgattttagaagaaacagctccagaggagcttcagaaccatgtcacagtgaagccttccgtggtggaggttctccttgagattgcaaaattctgtgatgtgtatttgatggagcgcattcttgatgatgagagtgagggaaaggttttatcggccctgagtgaagctgggctttttggtggtggtggcttgataaaagataaggttctcttctgtagcacggagaatggccgtacatcttttgttcggcaactcgagcctgattggcatatcgacacaagtcctgaagttgttcaccaattagctaggtttatcaaatatcaactgcacatctccccgcagcgacctgaaagaatagcaaccaatgttttcaccgctccaagcttggaacagtattttggaggcctagaccagagataaagaggtcaaactccatccaggaaattggcggcggcggcggattagtgagaagggaggacgtcattgttttttcttttctctgctcgaatgatggaactcgttttttttcctgtatcatgtgtaaaagcctgtgctatgtaccagtaatccattgttgtgcgatatgtagtgcctcagaatctattcaagggaaaacatatgtagtagcatacttgtcgaatcagttgtgttaatgtacaactacaaccaaaatagcatagttgcaagtgccaacctccctgctattgccattcgctcttgtgtctgtttgtcacatcaagattcgctcttgtgttgtcacacgagtttgccga

SEQ ID NO: 211535 - DNA, 3217 bp, Zea Mays
gtgcgcccggtcaaaccccagaacgccccttcgtccagtcacgctcccccaacccctctccgcggtccgcccccctctcaccccacccatcgtccctcgcctcctcccgtcccgcacctcgccggagcaccgcccccctcgccggagcaccgcccccgcctccctcgcgcatccccctttttaccatctcctccgcctatctctgctccccttatccatcctcgagctcgcccgccgcgtggatcgcctcgacccattttactttttttttgtacctccccgcccgagcgttagctggtgggcggatgtacgtgtcttggctggagatggagatgccactggcttgacggattgatctcggggagctgcctttagtgaccggccgccctcggcctcgccgcggcggccatggacacggagaggggggcgggcagcgagcaggggtcgcccgacagcgaaatgggagacggcgacaacgacagcgtcggttacggcgcagagatggaggtggacgccgggagcggctcggccggggcctcggctccggcgagctcggcgtccgcatcggcctcggtctccgcgtcagcgtacgccgcgcgcgccggcgcctacgacggggtcgaccctttcgagggcatggagttcgacgacgaggaggaggcctggacgttctacaacgtctacgcccaccgcgtgggcttcagcacccggattagcgtcatgcacaggtcgcgacggaacggctccgtcatgtcccgccagttcgtctgcgccaaggagggattccgcacctaccgcgggaagaatgaggtttcacgtggtgatgccgtagacgctggcgacgacgatagtgggaggggtcggcggacgcgggctgtcaccagggttggctgcaaggccatgatccgggtgaagaagcaggacaatggccgctggagtgtgaccaagctggagactgcacataaccaccccctggtccctgcgaaccaggcacactgtctgcgcccgcacaagccactgtcagagtgtggaaagcagcggccttttgggggccatcgaaatggcagtttgcctctggcaattgagccaccgccacctcctcttacaccgcctgttcctcatacaagcatagctcaagtggttcctgagtatgtttcggatggtatcgggcatgacactagagtaattttggattatgtcaagcgcatgcaagctgaagatccagcgttcttttatgccatgcaatttgttgaggggcgtccagtggggaatgtgttttgggccgattcgagggctaggacggcatacaaagattttggagatgccatcatcttggatgactactgcaaaaggagcaagcatgaacttctactttcagctgctttgaaagtatttcctctaactaggctccagttctgtaagtggcacatcatgaacgaagcacaagataagctgtcatatctcctagatgtgtttccatccttccatgaggactttatcaattgcatcaacatgtctgaaacaatcaatgagtttgaagcaagttggaaggcattaatttctaaggtcagctctcaaaaaagtgaatggattgacttgatgtacagctgccgccatcagtgggtccccgtatatctgagagatacattctttggggatgtgtcattaaagctgcaatgttcaagcaggagttcgttgtttgaaggttatatcagtgccaaaactgattcacagtcattcattcagcagtacgaaaaagctttagactgttgttacgagaaagaggtgaaggaagaatttgaaacaaaatattcacttcctgatatgaagacatcatctcctatagaaaagcaaggagcggagttatatacaaggtcaatgtttttgaaattccaacaggaattggttggtgcctctgtttacactgctgacatggtgaaagaggagggcgatgcttcaatttatacagtgaccagatctgaaggaagtgagaagtctgtaacagttcagttcagttcttctggaagttcggcgacatgtagctgtcatatgtttgaatattttggtattgtctgcaggcacatacttaccgtgtttggcataagaggtgtctctgcactcccttctcattactttgtaaaaagatggacaaagaatgcactggatagaagctcaggcaagaatgttgacgaagttagcagagttgcggagcccaaggaggagcaaagaagtagcgctgaagatgatgagcagtccccgacatggcgttacaacagtttgtgtcgtgaagcactaaggtatgctgaggagggggcatcatcattagaggtttatattgtggcaatgcaagctcttcaagaggctgctaacagggttaatatggccaagagaggtattggacaggtagcaccattagcggtgatgccaattgcagcacaaccaccagaaagttttgcaagaaatcaggagattagttctaataagcaaaagaagagaaaaaggaattcaaatagctcaagggagaatgtcacaccaaatcaacttatttgataagttttctgggttacctgtccgaaatgcatcagctccttcaattggaaatctgcaaggtggagaaacaaaatccatagggactgattcacaaataaaagagagccatgaattatcccaagctaatggtagcaggggatgcagtgtaaatacattaaactccagtgtcgcgccacagctcgtgactgttcctattggactgtgccttccatccactgatggctccaagatatctgcggctggtatgaactctgtaaattctggagatatcagtagcaatggcaagttgtcatttggtcttcatcaatctcagtcatctgcacaacagccagctacaccatcacagacaacaacgcttgaccatattgactcccgtgctaatcctgagggttcatctataagggctgcagccattgcagccggcgcacgcattgggtccccatctgatgcagcaacaatcataaaagcggctcagtcaaaaggcgccatccacatcatgcctggggaaaacctcccaaattacctgaaaccactagcaccaaaaccactttctgcactaccaccggcgaacccactcaacccggcacatgcacccccaggacagctcagctttggtgattctgcagccgccaaggacgcaatcttcggtcaacttttgcctgattaa

SEQ ID NO: 211536 - DNA, 1351 bp, Zea Mays
caaatccaaagttcgacgaaaagggaccaatgtcgatcgccataaaagccgtctatctcgatctggacggtacaaaaccctgcacgcctccccatccacctgtcactcttaccgccagccccacatcacggagcatcccccttaataacagcaaactaccacacccatgtccacctccgtctccgccgccgccgttgccgctctcgtcccacccctcaccggccgccggtcgccgccggcatctcgcgtaccgcagatttgccgcagaagaatcagatccaaaccccgtatcttctcttcttccccctccttccccattgtccccgccgctgccatggccaccggcggcgccgcccccaccgcctccgatgccgggtccaagaagaagttgctcatcttagactccgaggaggatctcgcggtttctcttgcgaagtacactgcggagctgtcggagaagttcgcggccgagaggggtgccttcaccgccgtgctctctggcggatccctcatcgaggcactcaggaagctgacggagccgccgtacctggattcagtggactggagcaagtggcacgtcttctgggtggatgagagggtcgtgcccaaggaccatgtggatagcaactacaagctcgcctatgatgggtttctctccaaggtgccgattcctcctggacaagtttatgctataaacgatgcgttgtcagctgaaggagcggcagacgactacgaagcgtgcctgaagcagcttgtcaagaacggtgtgatttctatgtcagcggcgactggatttcccagtaatcaactcatccgcatacgttgcgatggtggtgactggagctggaaaggcggcagcggtgcagaaggcgctctcagacaagcaaacctcgtcagacctgctgcctgttgagatggctgtgctacaagatggagaattcacctggttcactgataaggcagcggtgtccttgctgcagaacaagtagagtctccatggtaaccttggctcggctcgaagccattttagctcataaaataaaagatccatgggcctgcgtgcatagctgcattcgtcctccaggatttcgtgtaacggagactcgatccttttatgtgtattgttcggagtaatgttcaaaaactctattgtcttccggcttttctgaaacattgctcggtaagtgtttggtttagtacatggttcgctgttccgcgctagacgcatggataggaaatgtggctgcattgaattcttccaggcttgtcgatcctggcatgttccagtttccagtggttttcagtgctcgtgccatctcagatatgaagagtggtctgcattcccggtgat

SEQ ID NO: 211537 - DNA, 2096 bp, Zea Mays
gtcccgttgaatgtctcctttcgcaggggtcttcagggggagaacttggggagttggtatgcgctagtaaatcgggtagcggggctttctttaaacccttcgaaagatactttcagatggagcttgcatcaaaacgggaagttttcctcccagtctatgtatgctgcattgatagggagggaaatatctcggcaggaaactctcatctggaaacttaggatcccattgaaaattaagatcttctgttggttcttaacacgaggggtgattttgacaaaggataacttaatcaaaaggaaatggaatgggtcaaaaagtgtgtgttctgttcccatgatgaaaccatcccacatctttttttcgactgccactatgctagatttctttggcgatcgatctactttacctttggtattagagaaccaactagcttgcaggatatggggtcttcttggttgcaggggttcaataaagacacaaaggcaaagatatatgttggagccataactatctgttgggcactgtggcttagtcgaaatgatgtggtttttgacaagaatcctattcaaacttacttgcaggtactctttcgaggaacctactggtgtcgtttctggggactactccaaaagcgtgaggaggacaccataaggattaaagatgcttgcagggtactggaagccaccacgatgcaaatcttagcaatgcacggttggagctttagaaacaggctaactaatagctagttctccaggtcccaactgcgcttgggtttgtttgccgccacggagcatcccccttaataacagcaaactaccacacccatgtccacctccgtctccgccgccgccgttgccgctctcgtcccacccctcaccggccgccggtcgccgccggcatctcgcgtaccgcagatttgccgcagaagaatcagatccaaaccccgtatcttctcttcttccccctccttccccattgtccccgccgctgccatggccaccggcggcgccgcccccaccgcctccgatgccgggtccaagaagaagttgctcatcttagactccgaggaggatctcgcggtttctcttgcgaagtacactgcggagctgtcggagaagttcgcggccgagaggggtgccttcaccgccgtgctctctggcggatccctcatcgaggcactcaggaagctgacggagccgccgtacctggattcagtggactggagcaagtggcacgtcttctgggtggatgagagggtcgtgcccaaggaccatgtggatagcaactacaagctcgcctatgatgggtttctctccaaggtgccgattcctcctggacaagtttatgctataaacgatgcgttgtcagctgaaggagcggcagacgactacgaagcgtgcctgaagcagcttgtcaagaacggtgtgatttctatgtcagcggcgactggatttcccaggtttgatctccagcttctgggaatgggacctgatggccacattgcgtctctcttccctggccaccctcttgttaacgagaaagagagtaatcaactcatccgcatacgttgcgatggtggtgactggagctggaaaggcggcagcggtgcagaaggcgctctcagacaagcaaacctcgtcagacctgctgcctgttgagatggctgtgctacaagatggagaattcacctggttcactgataaggcagcggtgtccttgctgcagaacaagtagagtctccatggtaaccttggctcggctcgaagccattttagctcataaaataaaagatccatgggcctgcgtgcatagctgcattcgtcctccaggatttcgtgtaacggagactcgatccttttatgtgtattgttcggagtaatgttcaaaaactctattgtcttccggcttttctgaaacattgctcggtaagtgtttggtttagtacatggttcgctgttccgcgctagacgcatggataggaaatgtggctgcattgaattcttccaggcttgtcgatcctggcatgttccagtttccagtggttttcagtgctcgtgccatctcagatatgaagagtggtctgcattcccggtgat

SEQ ID NO: 211538 - DNA, 1695 bp, Zea Mays
gcgcgacagcgggcgcgcgcggctgcgactgctgctgctgcttcttctccacttctccttccttcccctataaagcaaggaatagtcgcagcttgccccagcttcgcaagctttcctgctaatccctgccattagtagcaagcaagcaagaaagcagtggtagtaggtgccacccacacggttttcacggctgccggctgggagcgaccgaggagatcgtcgtcacgctcgatggaggccctggtggggaggtactggggtctggggggacggcggtgcggggcgtgcggcggatcgccggcggcggcgcactgccggacgtgcccgggcggcgcgtacctgtgcggggggtgcgacgcggggcacgcgcgggcggggcacgagcgggtgtgggtctgcgaggtgtgcgagtgcgcgccggccgccgtgacgtgccgcgccgacgccgccgcgctctgcgccgcgtgcgacgccgacatccacgacgccaacccgctggcgcgccgccacgagcgcgtccccgtgcagcccatcggcgccgccgctgatcccgccgcggagaaggcggcgctgctgttcggccttgccgcggaagggaaggacggcggcgacgcggccaaggtcgtcgtcgacgccagtaagctggacctcctgttcgcggacgacgtggtcgacccgttcctcgcccaagacttcgccaggttcccgcacgccgacagcgtcgtgccgaacgatggatccaactgcggcgccgctgtggacttcgactttggtggcggcgtcgccgtcgccgccaagcagccgtcctacagctcctacacggcggcgtcgctgggccacagcggctcgtcgtcggaggtcggcctggtcccagacgtgatgtgcggccgcggtgggagcgtgaccggcggcgtcatcgagctcgacttcgcgcagtccaaggcggcgtacctgccttacgctgcaactcctacccacagcctgtcgtctttggacgtgggcgccgtgccggagcgcagtgacggggtcatggcgggcaggctcgcgacgccgacgccggcgacggccacggagagcagggaggcgcggctgatgcgttaccgcgagaaacggaaaaaccggcggttcgagaagacgatccgctatgcgtcccggaaggcctacgcggagtcgcggccgcgcatcaagggccgcttcgccaagcgcgcggatgacaacgacgccgacgccgacctcgacgaggctgccgcgccggctccgccggcgcggtcgcagccgcagccgcagccgcagccatcgtaccgctacgtgctcgacttcgccgccggctacggcgtcgtgcccacattctgatgacgcgtgccgtgtgagtgttgccgcgcgcgtcgcgtgccccatgttttcacggattgggccggcgcgcgtgcgagccatgctgcatgcgcgcctacgtgtttgctggagcggcgagctcctagttggcgatcacatgccgttttgggctagccatggttaaattagcaggctagcgtgtactgctgctgcgtttgtttgctggggcgaccagttctactaatagtacgtagtaccgtgtaattttgggtcaggaagagatgcttagcatctgtttcgattgatcgatgtagtattatgctataattggaaaggcctctcgatctatttgcaaaaaaataa

SEQ ID NO: 211539 - DNA, 1316 bp, Zea Mays
aaaagatcttcggttcatggggtttctcgtgcaagctccgttccttcaaatacaagggatacattataccaaagtttgccaccaaccataaagtcatctctccgttctaagctacactcctttggagtcaaggaagagcttactgtttctcaaatcaaggctgaaatggagaagaccctgcgatggcttgcccctattgcaagtaacaccaccaaggctcatcatggtttcggttgggttggagagtgggcaagtaccggatgtgaactgcaagccaactgggcagctggacctgacccgaattgagacactgtaccatgctgacaaggacaagactgaagcatatatcctcgagcttgttattaggcttcatcatcttatcagtcaaactaaaactgctaatggtgagaggtctccaatcaagtctcctgtccagtctcctacacaaagaggggcctcaatcacattgtctccgaacataaaaaacagcaattcatcacctcttctgacgcaagatgaccaagacatgctaagtgatgtcaagtacaggacatttatccctggtataagcaaaagccaagagtttgacactaaggaaagacataataatcaaagcaggttaagcaaaagtaacagccattcaccaagcagtggcaaccggaaagaggcgctatcgatctcgatcaggaggctgcttcctgtgatcgactttgagatcgaccggacaaaagccctcgatgtgattgatagagttgacgatctgagagtacaatgatgaacctagattaatcaatgccaaagtctgaaaaatgcaccctcagtctatgatccagaaaatcaagattgcttgaggccctgttcggttgttccggattagagccccggattaattcctagccggattacttctctaatttatatagattttgatgagctggaatgaatcctggcttattccggtacaaccgaacaggccctgaaggataccagtaatcgctgagctaaattggcatgctgtcagagtgtcagtattgcagcaaggtagtgagataaccggcatcatggtgccagtttgatggcaccattagggttagagatggtggccatgggcgcatgtcctggccaactttgtatgatatatggcagggtgaataggaaagtaaaattgtattgtaaaaagggatttcttctgtttgttagcgcatgtacaaggaatgcaagttttgagcgagggggcatcaaagatctggctgtgtttccagctgtttttgttagccccatcgaatccttgacataatgatcccgcttaaataagc

SEQ ID NO: 211540 - DNA, 2373 bp, Zea Mays
ggagtaagaggtttcttcagcacacatgttgtggatcagagccttgtttcttcagaaacatacaatacctagattttctgtgaatattgacaaccactctaattgggatgagatggttgattcatgtgctttgcagttatcacatgacttgattcgacatcatgttcaatttttgcatgatgaatctcataagaataataatcatcaacaaaaagaagtgtttgcttccatgaatattagtgcagaaggtgaacttaagtccagtgagaatgagcgacccttgtgtggagttgcttctaaggagaatccaattcagctggctgcaggcagagctcagcaagagcctccaccatccaatgtggaagataaagtagaaaatgatcaatttttttttgaaggcatagttcaaagaaatccttctagtagacttgtaaaaggcagcgagtcatttgctattgttgcttttggaattcagatactgcagcatcctcagttctcaaaactttgttgggctacgtcaaagctacgggaaggcccctgcactgatataaatggaccatggaaaggctggccatttaattcctgtttgttgcagagcagcaccttacctgaacacatgttgatacccggacaggaacatcccgcatgaagagttcaagtgccaaagaatgtcaaaggaccaagtatgctgcaggaaccaatgtacaagttgctcctgttgccatccctgctgaggttcaagacattccagcccaacacactcaggatcatgaagttgttcctggtcctactgaggtgcaaggcaatccggttaagcatactgcagaacaacctggaagctattcgatggactgtgaccttgataatcatgtgaactctgtttccagcaaggatgcagtagaacacgatcatgtccattcagctttacctgatgtgcataggggcaatacacatgcagatacagtaacaaatgacggagaacctattggagcaaacaacaatgggaaagtgtccaggttaacctacggtgaagataaattcagaccaggtattcaaagatctgaaaaccacacagaatctatggaaggtttaagctgtttgcaaagggcaggagattccgttggatccccagcaagtattaacaatacagaattaccaaagaacaatgtttcttctgaagctcatattgatgataatgagttgaggagaaatgatcttgtgaatgatgttgaatcaaattcgatcgatggtaaacatgacaccatgatgaatctttcagttccaaaaatttcatgtctctacaaatgttgttctccatgtttccaatctatttataagatggttcatggtattatttcaaatactctaaggcctaatctgcattgcttaacagctgatgatatgcatgacattctgtcatcatggtgcttgaatctattagggtctgttagaaagttgtacagctcacatgatgaggccagctgcacagaagtttttgttagaatgtccaataaagaaacccacttagagcattgtgcttgtcagagtgatatctatctttcaagagaatgtgtatgccacttggaaagcaatggggatgttgaaactgcaaatactgattgtcatcctctatcaggacaaagcttaagttttttctttaaagatggtgtatggatgccgttggatctcactgcggaaacaaaacttcattgcagcttcaggagattctgtgtttgctcgatattaggaacagtttctatgctcagctagatcctcagttcatgatattgtctgatgcagttgcaaaagtacatatagtactctaatgctctaagtgtggctccagttgtgcacataacacaacatcatcaggatgtctttggttgattggaacttctcatccttgatgcaacttttgggcaagcttttattgcacataaattgcctctacctgttatggtcattagtggaaaactggctgttgtagttgcttcgtagactgaatatttaaaaagaagctaagatattagtcttcattttttttccaacgaagttacccatgtaggttggactgttgttgctgctggaaatttcacggttagatgatgactgagtgactgacgccatttcagttctcattgtaatatgtattatggcccaattaagcatcaagttgaaacatgattgaatcttatactcacattttgtgttgtacctctattctggtcagtggtatgctttctaatggacaactgacattcagcatgataaatctttataggttatataagaacacactgtttagatgaggttggaattatatttttgtacctgcttataggagtgtgaactgtgaacaagtttttagtagag

SEQ ID NO: 211541 - DNA, 1638 bp, Zea Mays
accccaccagtctctggcaggttctcccccccacccctctccgtctccgatcccgtccgcattgcttcgcgccggaccaaggaggaagggtcggcgtcgcaggcattgcggtctgctagccacgagggccatggacccgtgcccgttcgtgcgggtgctggtcggcaacctggcgctgaagatgccggcatcggcgccccccgccgccgccgcggcgtccggctccggcgtgcacccggccacgccgccctgctactactgccgcatccgcctcaacaagctgccctaccagacggcgcccgcgccgctgctgccggccaccgaggagggctcggcgccggcgccggcgtcgtgcgcggccgccttccacgcctccaaggccgacctggaccgggccgccgccaggcccgcgctcttcctcggcggccgcctccgcaccgcgcgcctcaaggtggccgtgtacgccggccgcgggggcggtgaaggcggcgggaggctgctcggcaagctcgtcttccggttcgacctcaggcgcgccgtggccgagcccttcgtcttcctcagcggctggttcgacatcggcaagcgcggcgccgggaagccggcggcggccaacgccgcgcgcgcgcagctcaacctcaccgtcctgggcgagcctgacccgaggttcgtcttcgagttcgacggcgagcccgagtgcagcccgcaggtgctccaggttaaggggagcatgaagcagcccatgttcacgtgcaagttctcctgccgcagcaacagcgacctgcgctcgcggtccgtgcagtccgactcgggcgccgtcggcccgcgcaactggctggcgaagctgtggtccgagcgcgagcgcgagcgcgcggggaaggagcgcaaggggtggtcggtgacggtgcacgacctgtcggggtcgccggtggcgctggcgtcgatggtgacgccgttcgtggcgtccccggggacggaccgcgtgggccgctccaacccgggcggctggctcatcctccgccgccgcgtggacgggacctggacgccgtggggccgcctcgagtgctggcgcgatcgcggcggcagcgccggggacgcccagctgggctaccgcttcgagctggtgcccgaccacaacagcaacgtcacgggctcgggcgtgtgcgtggccgagtccggcgtcccggcggcccgcggcgggcggttcgccatcgacctgaccacggccggatcccccgggcggggcagcggcgagttgagccgccacgcgctctggcccccgggcggcttcgtgatgtcggccgccgtgcagggggagggccggcgcggcaggccctccgtggagatcggcgtggcgcacgtcgggtgcgccgaggacgccgccgcgttcgtcgctctggcggccgccgtcgacctcagcatggacgcgtgccgactcttctcctgcaagctgcgccgggagctgtcggcgtgaacggcgaggggggagggagattgggtggtgatcggacgaacttgttttcgttgtttgtctgtaatcccgctgaaactggactgttcgtcttctaggtgccttttgtagcctagaagaagccataaaactggggtctggggtgagcgaggcgaggtgagtgaggc

SEQ ID NO: 211542 - DNA, 2347 bp, Zea Mays
cgggctcgttttttatggcaccgccgcccgcctaggggacgggggagagagaccaaccgccgcttgggctcttccgcctccagtcctccaccacggcaccacgtcgtcttacctcgcttcggcgccgcctccttctccatctccacccaaaagccgcgaagagatagggagaagaagaaaaaaaactcgcttgctgttcccgtgtctgctccgttgaggcctgcgttgttaattcgtgcggcgcttctcgtccggcggcggagagagcgtgctcttgctctgttggtgtgccgcttacttgctccaggaattggccttcgctgcatataaaaagaataagctggctccaagataatggcatctcttactccaggaatactattaaaggttctaaaacatattaactctgatgtcaaagtatgtggagaataccggtccattcttctccaagttattagcatagtccctgcaataactggttcagaactttggccggaccatgggttctttatcaaagtttcagattcttcacactcaacttatgtttccttgtctaaggaggacaatgaactcatcttatcaaacaaactacaacttggacagtttatatatgttgagaaggtccagtcaagtatacctgttccggttcttgttggggtccgcccagttccaggaaggaacccttgcattggaaacccaaaggatttgatgcaaatgtcaactccctctggagttatggaagcactggatcatcaacggacaacttccaagtcagctgatctgtctgaaagtgaaaaggaaaatttgcagagaaaggtagttatcaaagagcagaagacagttgtcgcttcccgttacatgcttggggtgtcaagcaacaacgggaaaattaccaacctcaactccagcattgatagtgaaaaaagtaatggaggaagtaccatatctgaatcaaataaaaaatctgttgccctgaaagtcagacaagaggcaaaacctcaggaacggtcaaataatacatctcctagtaacgctaagttagtttccacaaagcaagaaattagcaaggacacacgcaagaatattggcacttcacctagtccaaatggttctgctgtagtcaagaagcaaatgccaaaggagagcaaaaaggaagttgctactgagagaagatcaccaccaaagcttcataggagttcgccaacaccagcgaggacttcaccaacaaagctcagtccagcagcaaagcagaatggaaactctggtccagtttcttctgtatctactgttaaaaaaagagttagtgaaactatctcttgggactccctcccaacaagcctaatcaattcaggaaaggctgttgtccggaggaagaacattgctcttattgtagcggctgaggctcaaagggaggctgctgcagctgcgtatcttgtaaaaggccttggaattttttctgagataagggaatcttctgaagtagatccacaagctgcaatcaccaagtttttcgagctgcacaggcttatcgttcagcaaagtgctgtctggaaagcttacactcctgagcctagcaaagaatctcgaccggagaaggaaaaaccgtcgaggaaagcttctgcatctcatcatcaccagaacaaagctggcacacgcgacacagctaagaatcccgaaggtgcccagggcagtgagaagacggaatgggcccgggaggacggtttcaaggagatctgcaggtcatggattgttctgaggaaagaatcgcggtcgtggtttctgagcttcctggaggatgcacttgaatcaggattcatgtccgagggccaaaccaccaagaacacgagagaacgcgtgcggggacaacccaaacccaagggtggggacgggaggatcgcggtcctgctgtcgcagctcaaggagacgagcaactggctcgatcagctgctgcaggacgaggcggacacttccgcggacggtttggccgaaaccgttgaccagctgaagcagaaggtgtacaaatgcttgcttggaacggtcgaaaccgcggcgtcggcactcggaggaagataaaaaaattgatgtaatggtgacgaagacgagcattaagttattgggtgttcagtcctgcaacaggatgttggggtgaagaacacaatgaggggaagatgtaaatagtcgggttgctcatttttaagttataaactaatttatttttattttttgggaggtgggggtgggggaatttcctggtgttgcgtgtgaaatggcaattgattttcttgggtattcgaattgttacaaatgatcttgcgtgtcagcttttgaaatagtcgggtttctgatt

SEQ ID NO: 211543 - DNA, 2132 bp, Zea Mays
cccgctctccctttccatgcttccccaccaccacctgggtcgccgaaacgctgcagccgcgaagagatagggagaagaagaaaaaaaactcgcttgctgttcccgtgtctgctccgttgaggcctgcgttgttaattcgtgcggcgcttctcgtccggcggcggagagagcgtgctcttgctctgttggtgtgccgcttacttgctccaggaattggccttcgctgcatataaaaagaataagctggctccaagataatggcatctcttactccaggaatactattaaaggttctaaaacatattaactctgatgtcaaagtatgtggagaataccggtccattcttctccaagttattagcatagtccctgcaataactggttcagaactttggccggaccatgggttctttatcaaagtttcagattcttcacactcaacttatgtttccttgtctaaggaggacaatgaactcatcttatcaaacaaactacaacttggacagtttatatatgttgagaaggtccagtcaagtatacctgttccggttcttgttggggtccgcccagttccaggaaggaacccttgcattggaaacccaaaggatttgatgcaaatgtcaactccctctggagttatggaagcactggatcatcaacggacaacttccaagtcagctgatctgtctgaaagtgaaaaggaaaatttgcagagaaaggtagttatcaaagagcagaagacagttgtcgcttcccgttacatgcttggggtgtcaagcaacaacgggaaaattaccaacctcaactccagcattgatagtgaaaaaagtaatggaggaagtaccatatctgaatcaaataaaaaatctgttgccctgaaagtcagacaagaggcaaaacctcagtcaagaagcaaatgccaaaggagagcaaaaaggaagttgctactgagagaagatcaccaccaaagcttcataggagttcgccaacaccagcgaggacttcaccaacaaagctcagtccagcagcaaagcagaatggaaactctggtccagtttcttctgtatctactgttaaaaaaagagttagtgaaactatctcttgggactccctcccaacaagcctaatcaattcaggaaaggctgttgtccggaggaagaacattgctcttattgtagcggctgaggctcaaagggaggctgctgcagctgcgtatcttgtaaaaggccttggaattttttctgagataagggaatcttctgaagtagatccacaagctgcaatcaccaagtttttcgagctgcacaggcttatcgttcagcaaagtgctgtctggaaagcttacactcctgagcctagcaaagaatctcgaccggagaaggaaaaaccgtcgaggaaagcttctgcatctcatcatcaccagaacaaagctggcacacgcgacacagctaagaatcccgaaggtgcccagggcagtgagaagacggaatgggcccgggaggacggtttcaaggagatctgcaggtcatggattgttctgaggaaagaatcgcggtcgtggtttctgagcttcctggaggatgcacttgaatcaggattcatgtccgagggccaaaccaccaagaacacgagagaacgcgtgcggggacaacccaaacccaagggtggggacgggaggatcgcggtcctgctgtcgcagctcaaggagacgagcaactggctcgatcagctgctgcaggacgaggcggacacttccgcggacggtttggccgaaaccgttgaccagctgaagcagaaggtgtacaaatgcttgcttggaacggtcgaaaccgcggcgtcggcactcggaggaagataaaaaaattgatgtaatggtgacgaagacgagcattaagttattgggtgttcagtcctgcaacaggatgttggggtgaagaacacaatgaggggaagatgtaaatagtcgggttgctcatttttaagttataaactaatttatttttattttttgggaggtgggggtgggggaatttcctggtgttgcgtgtgaaatggcaattgattttcttgggtattcgaattgttacaaatgatcttgcgtgtcagcttttgaaatagtcgggtttctgatt

SEQ ID NO: 211544 - DNA, 2343 bp, Zea Mays
cccgctctccctttccatgcttccccaccaccacctgggtcgccgaaacgctgcagccgcgaagagatagggagaagaagaaaaaaaactcgcttgctgttcccgtgtctgctccgttgaggcctgcgttgttaattcgtgcggcgcttctcgtccggcggcggagagagcgtgctcttgctctgttggtgtgccgcttacttgctccaggaattggccttcgctgcatatacgtgaaggaattgggaaagttggtgttgtctgtgtgtccgtgttcatggccacggagctagagcctagagctttgcaagaaggttcaggcggaaaaagaataagctggctccaagataatggcatctcttactccaggaatactattaaaggttctaaaacatattaactctgatgtcaaagtatgtggagaataccggtccattcttctccaagttattagcatagtccctgcaataactggttcagaactttggccggaccatgggttctttatcaaagtttcagattcttcacactcaacttatgtttccttgtctaaggaggacaatgaactcatcttatcaaacaaactacaacttggacagtttatatatgttgagaaggtccagtcaagtatacctgttccggttcttgttggggtccgcccagttccaggaaggaacccttgcattggaaacccaaaggatttgatgcaaatgtcaactccctctggagttatggaagcactggatcatcaacggacaacttccaagtcagctgatctgtctgaaagtgaaaaggaaaatttgcagagaaaggtagttatcaaagagcagaagacagttgtcgcttcccgttacatgcttggggtgtcaagcaacaacgggaaaattaccaacctcaactccagcattgatagtgaaaaaagtaatggaggaagtaccatatctgaatcaaataaaaaatctgttgccctgaaagtcagacaagaggcaaaacctcaggaacggtcaaataatacatctcctagtaacgctaagttagtttccacaaagcaagaaattagcaaggacacacgcaagaatattggcacttcacctagtccaaatggttctgctgtagtcaagaagcaaatgccaaaggagagcaaaaaggaagttgctactgagagaagatcaccaccaaagcttcataggagttcgccaacaccagcgaggacttcaccaacaaagctcagtccagcagcaaagcagaatggaaactctggtccagtttcttctgtatctactgttaaaaaaagagttagtgaaactatctcttgggactccctcccaacaagcctaatcaattcaggaaaggctgttgtccggaggaagaacattgctcttattgtagcggctgaggctcaaagggaggctgctgcagctgcgtatcttgtaaaaggccttggaattttttctgagataagggaatcttctgaagtagatccacaagctgcaatcaccaagtttttcgagctgcacaggcttatcgttcagcaaagtgctgtctggaaagcttacactcctgagcctagcaaagaatctcgaccggagaaggaaaaaccgtcgaggaaagcttctgcatctcatcatcaccagaacaaagctggcacacgcgacacagctaagaatcccgaaggtgcccagggcagtgagaagacggaatgggcccgggaggacggtttcaaggagatctgcaggtcatggattgttctgaggaaagaatcgcggtcgtggtttctgagcttcctggaggatgcacttgaatcaggattcatgtccgagggccaaaccaccaagaacacgagagaacgcgtgcggggacaacccaaacccaagggtggggacgggaggatcgcggtcctgctgtcgcagctcaaggagacgagcaactggctcgatcagctgctgcaggacgaggcggacacttccgcggacggtttggccgaaaccgttgaccagctgaagcagaaggtgtacaaatgcttgcttggaacggtcgaaaccgcggcgtcggcactcggaggaagataaaaaaattgatgtaatggtgacgaagacgagcattaagttattgggtgttcagtcctgcaacaggatgttggggtgaagaacacaatgaggggaagatgtaaatagtcgggttgctcatttttaagttataaactaatttatttttattttttgggaggtgggggtgggggaatttcctggtgttgcgtgtgaaatggcaattgattttcttgggtattcgaattgttacaaatgatcttgcgtgtcagcttttgaaatagtcgggtttctgatt

SEQ ID NO: 211545 - DNA, 2471 bp, Zea Mays
tgttcatggccacggagctagagcctagagctttgcaagaaggttcaggcgggacattgtttgatgctgaacagcattattattgggtgtcttgctcttttcatctgtttggttggtgttccaatcatcttgacatctggccaggtttggatttttaggtgttacaggtccacagttatactagtaattacatgcctatattgctcctttatgtgtttctgaagctttaaccaatccatctttgtcctttcctcctttgaaaccatcggccgtatttttaagtaagccattactttcatggagcttaaccatcaattatctaacaattatttctttatattaggccaccatcaggaacacgcatgaatcctcatgcgcgacgcagcattatcagtaatgtggtggataatgcatctaaaattaacttctattactttttctttctttcacagaaaaagaataagctggctccaagataatggcatctcttactccaggaatactattaaaggttctaaaacatattaactctgatgtcaaagtatgtggagaataccggtccattcttctccaagttattagcatagtccctgcaataactggttcagaactttggccggaccatgggttctttatcaaagtttcagattcttcacactcaacttatgtttccttgtctaaggaggacaatgaactcatcttatcaaacaaactacaacttggacagtttatatatgttgagaaggtccagtcaagtatacctgttccggttcttgttggggtccgcccagttccaggaaggaacccttgcattggaaacccaaaggatttgatgcaaatgtcaactccctctggagttatggaagcactggatcatcaacggacaacttccaagtcagctgatctgtctgaaagtgaaaaggaaaatttgcagagaaaggtagttatcaaagagcagaagacagttgtcgcttcccgttacatgcttggggtgtcaagcaacaacgggaaaattaccaacctcaactccagcattgatagtgaaaaaagtaatggaggaagtaccatatctgaatcaaataaaaaatctgttgccctgaaagtcagacaagaggcaaaacctcaggaacggtcaaataatacatctcctagtaacgctaagttagtttccacaaagcaagaaattagcaaggacacacgcaagaatattggcacttcacctagtccaaatggttctgctgtagtcaagaagcaaatgccaaaggagagcaaaaaggaagttgctactgagagaagatcaccaccaaagcttcataggagttcgccaacaccagcgaggacttcaccaacaaagctcagtccagcagcaaagcagaatggaaactctggtccagtttcttctgtatctactgttaaaaaaagagttagtgaaactatctcttgggactccctcccaacaagcctaatcaattcaggaaaggctgttgtccggaggaagaacattgctcttattgtagcggctgaggctcaaagggaggctgctgcagctgcgtatcttgtaaaaggccttggaattttttctgagataagggaatcttctgaagtagatccacaagctgcaatcaccaagtttttcgagctgcacaggcttatcgttcagcaaagtgctgtctggaaagcttacactcctgagcctagcaaagaatctcgaccggagaaggaaaaaccgtcgaggaaagcttctgcatctcatcatcaccagaacaaagctggcacacgcgacacagctaagaatcccgaaggtgcccagggcagtgagaagacggaatgggcccgggaggacggtttcaaggagatctgcaggtcatggattgttctgaggaaagaatcgcggtcgtggtttctgagcttcctggaggatgcacttgaatcaggattcatgtccgagggccaaaccaccaagaacacgagagaacgcgtgcggggacaacccaaacccaagggtggggacgggaggatcgcggtcctgctgtcgcagctcaaggagacgagcaactggctcgatcagctgctgcaggacgaggcggacacttccgcggacggtttggccgaaaccgttgaccagctgaagcagaaggtgtacaaatgcttgcttggaacggtcgaaaccgcggcgtcggcactcggaggaagataaaaaaattgatgtaatggtgacgaagacgagcattaagttattgggtgttcagtcctgcaacaggatgttggggtgaagaacacaatgaggggaagatgtaaatagtcgggttgctcatttttaagttataaactaatttatttttattttttgggaggtgggggtgggggaatttcctggtgttgcgtgtgaaatggcaattgattttcttgggtattcgaattgttacaaatgatcttgcgtgtcagcttttgaaatagtcgggtttctgatt

SEQ ID NO: 211546 - DNA, 885 bp, Zea Mays
tttctattctagccactaatccgtcttctctggcggccatcagctggttcccttgctggctccgctggctctggactggagagcatacagacgcctgtctcctcgccatcctcggcccagcaacctcgattcctgcccaaggcttggtttggtccaaccaatcttgttgtgattgtaaccactgtagtcggagggctctgccaaatttatccagcatcttcttgctgtcagtgaccaccatttggttttgttgtaatgcctatagcatggccttctgcaatcattccctcaagtatccaacctttttatcagatggataatgacacatatgtctcgtttggttgccatatacctctagcctagcctgtattaggccagattgtgtggatacatacagtagcagtttgttttgttgtatgtcttaattaagagtggccattatgtatcctacctctttagaacatggataaggaaacatgtttcattttgttgccatacacctctaatctatcctgtataggcgagaccgtgtggatgcagttgcagtttgcttcattagctgaattaattaagaatggtcataaaggatggttttttttgcccgtataaatacatgctgcatgatatgaaggttgaaaccatgtgtaacttagtatattgtttgtaaagacactgaccattagtttatgggatatttcatccccgttgaggtatcatcatagccaagatccacttcctctgcttgacatgtcatggctgtagagagaaaatgtgagtgacaagagtaaaggacattcatattatgccatcgctcttcatatgttaattgtagaatttctggaggaacttaacttacctatcattttgatgcctcgacttctggat

SEQ ID NO: 211547 - DNA, 346 bp, Zea Mays
tttctattctagccactaatccgtcttctctggcggccatcagctggttcccttgctggctccgctggctctggactggagagcatacagacgcctgtctcctcgccatcctcggcccagcaacctcgattcctgcccaaggcttggtttggtccaaccaatcttgttgtgattgtaaccactgtagtcggagggctctgccaaatttatccagacgagcaagtcattgaggatcctggtgcccagcaggtagaagttgctgagtaggagctcgttgaaggcaagttgtgcccttgatcacttcctttttacccagtcatgttcttattaaatataatgatctgca

SEQ ID NO: 211548 - DNA, 446 bp, Zea Mays
attgtcatctccagtcgtgttgtggccggaagagacagacacgcaaacgagaggactcgagagagattccgccgccaccaccgccggctcagatgccgccgccgcagtcgggcatgaccctctgccgccttcccaaggccacccttggccttcccctttctctcccctctttgctatatcgtcccagcctgtccctcgccgcacgtcgcaccaaggccgtctccgccagggcctcctcctcctctccatcaccggactcttccttcggttcgcggatggaggattccgtcaagaagacggtggccgataaccccgttgtcatctactctaagtcatgatattccatggaggtgaagtcactcttcaagcggatcggtgtgcagccccacgtcatcgagctcgacaatctcggttgatgttcttgtgcagctgaccgctaatccctt

SEQ ID NO: 211549 - DNA, 2888 bp, Zea Mays
tctatatagtaaaacgcgaagagagagatacttctgcggaaacgaatggcagcagcaatggccaacaccacatgcctccgctcccgcctcctcgtcctcccaccgccaccggcgccccgcaccgtcgtgtcctttcgtctccgcccatgcgctactacgatctcctcgtcctcccgaaagaggagaccccgtctcgcggcacgggcggcgccgcccggcggcgctgtggccccggcgtcggccgcgtcgaaggaggatgaccagggggagatgggcagcggcgggggcctctctgcggatgatgcagagaggctgtgtcagtttctgcgggccgacctgccgcacctgttcgacgacgtcggcatcgaccggtccgcgtacgatgaccgcgtgcggttccgcgaccctatcacccgccacgacaccatcgacggctacctcttcaacatccgcctcctcaagctcctcttccgccccgacttctacctccacgccgtcaagcagacagggccgtacgagctcaccacgaggtggaccatggtgatgaagtttatgctccttccctggaagccggagctggtcttcactggcctgtcgatcatgggcgtcaacccgaagaatctcaagttcaacagccatgtgtgcaggatctttgggattcgatacaaaacaacgagtacttctcttctgaaggactatgggatgttttcaaacagctacggatttacaagacccctgacatagaaacaccaaattaccttattctaaagaggactgcacattatgaggttaggagttatgcgccattcttagtggttgaagcaaaaggtgataaactgacaggatcgtcgggcttcaacaatgtaaccggatgtatccatccagatagttctgccaatgaacaaagacttggacagtttaccagctccaaatacagcagttactttgcggaaggtagaaggaggcattgctgcagtgaaaaaattcagtggacgaccaaaagaagaaattgtgctccagaaggagaaggatctgcgctcccagttacttaacgatggattgaagcctcatccaggctgtttgcttgcacgttacaatgatcccaggacaaagagcttcttaatgaggaacgaggtgcttatacggctaattgacttcacactggagttgtaatcgtcaatactggcatcagatcgatgtaacacactgggcttggagcttccagtgagtcattagaaaggtaaatctgattctatttgtgtactttacctgaaaagaagtcgaagggttggctacagtagtgagagttatctcaccaagttacaaggtttaaacaatccctaaggcctggtttggtgaccagggaccacgagagaattcctcctcatggatccctccgtcatcctagtcaccaaacctatcctaagtatttgtagggaaaaaacttgcctctgaccctactgatgcaggaggctatggcaccggtcctgtcctttttttacctgcacataagtcatgtaaagctacttatcatttttcttcaaaacaatctttacatgttaaatttagagcactatcattctttctgctacactttcagccatttttctttaaaacaacatttacatgttaaatttagagcactgtatcattcttgctgctacactttcggtcatttttctgtaaaacaatatttacatgttaaatttagagcactatatctatcattcttgctgctacacttttagtccgtctgagctgcatttggttttttggtttctctgcaggagaaatgttgtagatgtcagatttgctttatgtaaatgtaaactctaaaaggtaataagctacatgctaaaacgacaggtcattttgattcgtttatcgaccaaaaatattgattaaaatataggaaaacattaaaatgaaaatacatgagaagtgcccttttacttatcttctcgtgcttctgcgattggattgggctgtcacgtttacatcctgggtccgctgatctgtttgggcttactttgcctggataatccgactctcaacattgaactcaataaggacaccctgactatgaacgttcagctgaactgactgtgctaaaatctaactagaatttagcgcttgtccacaggtttgtgtgataataagttaataactataaatatacacttcgtcatgcacagtgagaaaacatacacaatggataggccattatgtttagttatgaaatgcagttgcctccttcaattagtgtaatctggccagacgaacagacatgctgtctataattatgaaatgcagttgccacctttcggttgactggccaccaaacgcatcatccgaaacaggtttcagcgctgtcttaactatgtcctggtcagatgctcaaaaaccattgttgcattgcattgtttttcaagcaccacggcgacgagtgcatgcaacttgcaaatccagcacgtgtccatagatgctgaaggttggtgcgcctgtatccctatcaagctgtcctgaccctgcaggcatgcaagccgtacgggcagtagtaggtgagaactgccgatgtctccaaaaccattcattcccttttcgtttgcaatgtgggtaaccgaagatgtttaagaaacttggctgtaaggtaatctaacacttcaaatattacagcccaaaagctcatggttaaggattaaggatgatagtgttactattttcagtctgttgaacaccctttgttgaaaaccatttatggcactggacacgaccggatggtccggcctgcggacggtctgttcgtaggcgcgaacaatctgtgatatgattagatcagacgaattaaactcctacctccacgcttatttatctctctaaacccgtgg

SEQ ID NO: 211550 - DNA, 4109 bp, Zea Mays
atcctatcagatggttgtgagtgttagagacccattttgtttctgtcactaaataggttgtcttctttgtgctgttttgaaatagggtttattcagatgggactggacaataaaccgctctagatttccatttgcggtttaattagttggacggtcgattcaaccagctttcaatataacaagtttagttcaaataattaaaactgcaacaataactcagtgtgggaattctttcttagggaagggtcaaaggttcaaaggcttgtgatgttgccttttactttgttttttacatttatgatattgttgtcatttatcttcataatttctccttccattttttgtagaaaaacagctctgcaggaacacacatgaaaatacagggtgtaaggcatgtgtgatggggaaacctgtaaaaagaacaggagtatggaggtgaaaggaaaaaaaagtaaaaataggaacacatggagggagaaaaattaggtggaacatggtcacagaaaaatctagaggtagtccgggagaaaatctggaggtataatgtaaaaaaagtccaggtcacatgtgggatgtaagggcgcgaggacactttaggaaggaagaaaagacggtgcgaagaatcatttcactcatgattttagttctaaatagagagaacttgaattgaacacacacacacttctaatgtatcctgatcatgtatttttatatggaagtatgtaactatgttgtattcagttaattaagatacattttaaggccctgcatctacaattaaaatgcttatcaactgacttattgtataagttgctagagatatatctatggtccttaaaactgaacttcatctttcctccctgattcaataactgctaactaattctcttcccaacataatttttattatactcaatccggtatcctgtggattcaatttgcaggagtggggagttgaccctaccaaagagataccttcaagtgcagctacaaccaagtacactgatttcctacttgcaactgcggctggaaaagttgatggcacaaaaggttctgacaaaatggttactccatttgagaagactaaaattgctgcatacattgttggggccataactccatgcatgaggctttatgcatatctaggcaaagaactcatggctttccttaaacaagatgaaaatcatccatataagaaatggattaacacatatgcatccagtgattttgagaacaatgcactccaaatagaagaattgctggacaaactgagtgtatcattaactggtgaggaacttgagattattggcaagctctaccagcaagctatgaaactggaagtggagttcttttctgctaagcttgtagaccaacctgttgtagctccactttcaagatattgtgatccaaaatataaactcttgatcttctctgattttgatttgacatgcactgttgttgattcgtctgccattttggcggagatcgcaattttgtcattccaaaaggcaagtcaaagtgggattgataataacctcgaccgtgcaaaatcgggagaactgagaaatttgtggaacatgctctctaagcaatacatggaagagtatgaggaatgcatggaaagactacttcctccagaagaatcaaagtcactagattatgataaactgtataaaggcctggaggtgcttgctgagtttgagaaggctgcaaattctagggttgtcgactctggtgtcctgaggggaatgaatttagaagacatcaggaaagctggggagcggcttattcttcagggtggctgtaaaaatttctttcagaagattgtaaaaacaagggagatcctcaatttggatatccatattctttcctactgctggtgtgcagagcttataagatccgccttctcatcagccggctgtctagatggtttgaacatacatgcgaacgagttcgcctttgaggaatctgtttcaactggtgagattgacagaaagatccagtccccgctagacaaggttgagaagttcaagagcatcagaagcgacgcggacagcacggtgccattcctgtctgtttacatcggagactcggccggtgatttgctctgcttattggaggcagatatcggtatcgtcgttgggtcaagcacaagcttgcgtagagtgggcagacagttcggtgtttcctttgtcccgttgtttctcggtctagtggagaagcagaggcaactgatggatgaagatgcgtccgtgttcaagccgcggtctggagtcctttatacggtctctagctggtcagaaatacacgccttcgtgctgggaagcgatttcagctgatggatctgctgcttcttttctccatctttttccccttgagaagcaaaaaagcttttgccggttgattctgatgcatacgatgcgtgaatcctaatgtggtcattttatgaaagccacatgtcgattctggctaccactatgtatgaatgaatacctgtagtttgtggtgtggaatgggttaagtttgtgcccgtgaattgtgatcaatgtatcattgattcatccttgttccatttgggactaatttctgggtgttgctggcagcaactacagtatactggatgaatgatgaagtacaactcgtttttatttcagattctcagcaggaagcgtactagtactagccactagggcgaaatgcatgctactagatgtatgatgtgtcatatcggagtacaaatactgatgaactgccagcctggggttcggatgggtgcataatatatgatagaatatgaatgtggtctgttttcatatgctgtatcgtgttttagctagttgaaggtggcggcggcgcgggcgtcgacggcgaggatggtgctgaggttgagcgggtgcatgtactcctgtgggccgtccatgaactggctgacgatgatgcggttggccttctccgtggggtggaagttgtcccagaaggcgtagacgctgcggtccgggcagacgctggacgcggcggtgcagagccccacgccgttgtatggtccctggccgcagcacgcgaccttggaggtgacgaagccgtaggccgccgggtcggagatgaagtccatgtgcatccggtaggcgttgacggcgacgaagacgtcggcgccgagctccgcgttgacgcccttgatcatgtccaccagctgcgggttgtagagcgcggcggcgcgctgcagctcggcgtcgcactccccgtcgcggctgccccgcagcgccagctcggctggggcgcaccccagcgggcccgaccccgtgaccagcacccggcgcgcgcccagcgagtagagctgccgcagcaccttggcgtactcggacacgacgtagcgcacgtagtccggcagcgcgaactcgcgggaccgcgccgagaagggcaccaggtagtagttgttgatgaagtcgttgccgcccagggtgacgagcacgagcgctccgcggacgaggcgcgcggcggcgtcctcgccgacgaggcggctcaagcggtcctggtactgccggaagtagcgcagctgcttctggacgcggatgatgttggcgaactggacccccgtgtcgttgagcacgcccacgcccgccgacgcgaagttggcgcccaccagcagcttccgcccgtccaggtgcgggctcaggtacggcagcgccggctccgcgcccaggtactcgctgatgatgtccggcacgttcttgccgttggagaagcggcccgtcgcgcggtgcgtcgggtagtcgaggccgtacggcggcgagtcggcgcgcgccgtcgtggccaggtagttgttgttgccgctgtccaccagcgagtcgccgaagacgaagaaggcgcggggcggggtcggggtggccgtggctgggcgcacctgcagcagcaggaggacgaggaggaagcacgcagtggctgcgacgagcctgccacggctacctgctgctcctggaacggaaagcattctgctgctgcttcttcgccgctgctctgctcagctgctgctgcgggacgcctatataacaggaagaagataacggggagagtgggatgatcaatagtatacgggctgatggagctgctgc

SEQ ID NO: 211551 - DNA, 1615 bp, Zea Mays
cttcaaagaggctctacgcctaaagctcgatgcctacaaggccatcttcgagaatatatgattcatgcatgtgtgcaaatgctcccatttttactggcattgagcaattgccacaattttcacatctacaagaattaattggtctaacagctactgattctgttgaacttggagatatcgtggaccctcctgttatccgaactgctacttctatccttcctcttggatggactggactccctggtggtaaaaatgctgagccactgaaagttgatataattgggcatgacctacaaatgtgcactcttttccaggcacaaataaatggaaactggtattccacagtaatagagactctaccatcagctacttcatactcaccaaatggagaactgcaacccacattacagaaaatgcggattcttgttggacaaccactaaagcagcctccaaattacattagtggggatttcatgattcctgtgatggcaggtgctgattcaacacccgactttggatttgaatcattttttgaagataaagattgctgcaagggtttgagtggatttctaatatatgggacaagtgattttgtaactgtacgtaaagaggtccacgttaggactcggagagtgcgattgcttggattagagggggctggcaaaacatccctgcttaaagcaatgttaggacaagttaaagaaagaaatagcactgttcttgaatgcatacatgtcgatttgcatggcaagggaatatcaaatggattgtgctacatagattcgacaacggtaaacttgcaggagctacctttggaggttgggcggttcaaagaagaactgttgttaggactccatgatatcagcaggaagactgaccttgttattgcggtgcataacctagcacaccgaattccacagtatcaacggtccaatacttctcagcctcagcctgctctttcacttctcttggatgaagctaaggcgctaagcattccttggattcttgcaataaccaacaaattctctgttagtgcgcatgagcagaacagattgatcagctcagctatggaagcatatcaagtttctcctgagatgacaaaagttgttaactcttccccatttctgatgccaagtgctagaaacagtttgcagcagatcagatcagctactgggaagttgaagaaggatccagcaaatagatctggttatcttcctgtaaactttggattgtcatcatttcagaggaaggacattgttatgcatgtggagggtgttagttcccttcgtcaacttgtacatcaagtagtcctcaacaatgaagaaacagcatttgaggaacttgctcgtgagagattgttgaaggagctagcgtcagagaaagcagcgtccctgcaagtgaagcagaagccccggaaaagagatggctctgttacagctgctgctgtaggtgcatctctgggcgcgggcctgggaattgtaatggctgtgataatgggggcagcatcagcccttcgaaagccgtgattcatgtttctgaagaatgcgtctatattgagggcaatagaggataatgagttgaggcgagaggcaagacgatcagggtagtaggggac

SEQ ID NO: 211552 - DNA, 1762 bp, Zea Mays
taaaaagcaccctgctatagtcaccttctgcccagaagagcggtaagatcaaaatggtggtggtggactagctcgccgaggtggaaaatttggtgaagcagaatatatgattcatgcatgtgtgcaaatgctcccatttttactggcattgagcaattgccacaattttcacatctacaagaattaattggtctaacagctactgattctgttgaacttggagatatcgtggaccctcctgttatccgaactgctacttctatccttcctcttggatggactggactccctggtggtaaaaatgctgagccactgaaagttgatataattgggcatgacctacaaatgtgcactcttttccaggcacaaataaatggaaactggtattccacagtaatagagactctaccatcagctacttcatactcaccaaatggagaactgcaacccacattacagaaaatgcggattcttgttggacaaccactaaagcagcctccaaattacattagtggggatttcatgattcctgtgatggcaggtgctgattcaacacccgactttggatttgaatcattttttgaagataaagattgctgcaagggtttgagtggatttctaatatatgggacaagtgattttgtaactgtacgtaaagaggtccacgttaggactcggagagtgcgattgcttggattagaggtatctccatgtatttaggtattgttataatatgtccctttacttatgttctatggaaatgctacatatagtatatatttgtctgatgcagggggctggcaaaacatccctgcttaaagcaatgttaggacaagttaaagaaagaaatagcactgttcttgaatgcatacatgtcgatttgcatggcaagggaatatcaaatggattgtgctacatagattcgacaacggtaaacttgcaggagctacctttggaggttgggcggttcaaagaagaactgttgttaggactccatgatatcagcaggaagactgaccttgttattgcggtgcataacctagcacaccgaattccacagtatcaacggtccaatacttctcagcctcagcctgctctttcacttctcttggatgaagctaaggcgctaagcattccttggattcttgcaataaccaacaaattctctgttagtgcgcatgagcagaacagattgatcagctcagctatggaagcatatcaagtttctcctgagatgacaaaagttgttaactcttccccatttctgatgccaagtgctagaaacagtttgcagcagatcagatcagctactgggaagttgaagaaggatccagcaaatagatctggttatcttcctgtaaactttggattgtcatcatttcagaggaaggacattgttatgcatgtggagggtgttagttcccttcgtcaacttgtacatcaagtagtcctcaacaatgaagaaacagcatttgaggaacttgctcgtgagagattgttgaaggagctagcgtcagagaaagcagcgtccctgcaagtgaagcagaagccccggaaaagagatggctctgttacagctgctgctgtaggtgcatctctgggcgcgggcctgggaattgtaatggctgtgataatgggggcagcatcagcccttcgaaagccgtgattcatgtattctgtttctgaagaatgcgtctatattgagggcaatagaggataatgagttgaggcgagaggcaagacgatcagggtagtaggggac

SEQ ID NO: 211553 - DNA, 2844 bp, Zea Mays
caaaaagctaaagcccacttagaggtatctgttagcagaggctggtgacaccctatttgctacatttattggcacaaagcagtacaaagatattattgctgatgtgaacatattccaagggaccttatttcatgaagatactgctcatgatttagctcctgatgttgaccctgaacaaaatgatacccaaaagggtgaggaaagccatgggaaatcttaccgagaaacatcaaagaagctaagaaaaccaaaacctgcagtgcaccgaggtttcttggctcgtgctaatggaattccagcactggacctatacaatcttgcacagaaaagaaacaggaaacttgttctttgtggacactcacttggtggggcggtaggtacccgtagataatatacattatctcattatttgctcatacatcttcaatacaactgcaggttgctgcattggctactcttgcaattttgagagttattgctaccacttcatctgaagaggataacaggcttcatgtgaagtgcatcaccttctctcagccacctgttgggaatgctgctttaagagattatgttcacaaaagaggatggcaggactacttcaaatcctattgtattccagaagacttggtaccacgcattctatctccagcttattttcaccactacaatgcccagacacctgaagcatcttttacaaataaaactgatgtgaaatctgaagaagttatggaggcaagtggggaaaggcccagaggaaacaacagggaacacctcgttctcggtgttggtccagtgcaaaagtcattttggaggctttcaaaacttgttcccttggaaggggtgcggaaaagcttaagtgcaattcaaaaacaaacaaatgtttttgggaaggcaccatcacaattggatagctatttgcaatcaaaggttgatgaatcagaagaaccacctcaatctcttgagattcaagaaagttcacaaggaattgctcttacccctttatcggataaagatggagggaacactgaagataataataggactgagaaaataaatgcatctgaagcaggggggtctaaacgctggagcagggtaccttctttgccttcatatgtgccatttggtgagctttacctattgggagattcatcagtcaatacactttcagattcagaatactccaagatgacgtcggcatgtgcaggtgcagtctgttatatcggagttaagagagcgtttgcagtcgcactcaatgaagtcctatagggctagatttcaaaaaatatatgattcatgcatgtgtgcaaatgctcccatttttactggcattgagcaattgccacaattttcacatctacaagaattaattggtctaacagctactgattctgttgaacttggagatatcgtggaccctcctgttatccgaactgctacttctatccttcctcttggatggactggactccctggtggtaaaaatgctgagccactgaaagttgatataattgggcatgacctacaaatgtgcactcttttccaggcacaaataaatggaaactggtattccacagtaatagagactctaccatcagctacttcatactcaccaaatggagaactgcaacccacattacagaaaatgcggattcttgttggacaaccactaaagcagcctccaaattacattagtggggatttcatgattcctgtgatggcaggtgctgattcaacacccgactttggatttgaatcattttttgaagataaagattgctgcaagggtttgagtggatttctaatatatgggacaagtgattttgtaactgtacgtaaagaggtccacgttaggactcggagagtgcgattgcttggattagagggggctggcaaaacatccctgcttaaagcaatgttaggacaagttaaagaaagaaatagcactgttcttgaatgcatacatgtcgatttgcatggcaagggaatatcaaatggattgtgctacatagattcgacaacggtaaacttgcaggagctacctttggaggttgggcggttcaaagaagaactgttgttaggactccatgatatcagcaggaagactgaccttgttattgcggtgcataacctagcacaccgaattccacagtatcaacggtccaatacttctcagcctcagcctgctctttcacttctcttggatgaagctaaggcgctaagcattccttggattcttgcaataaccaacaaattctctgttagtgcgcatgagcagaacagattgatcagctcagctatggaagcatatcaagtttctcctgagatgacaaaagttgttaactcttccccatttctgatgccaagtgctagaaacagtttgcagcagatcagatcagctactgggaagttgaagaaggatccagcaaatagatctggttatcttcctgtaaactttggattgtcatcatttcagaggaaggacattgttatgcatgtggagggtgttagttcccttcgtcaacttgtacatcaagtagtcctcaacaatgaagaaacagcatttgaggaacttgctcgtgagagattgttgaaggagctagcgtcagagaaagcagcgtccctgcaagtgaagcagaagccccggaaaagagatggctctgttacagctgctgctgtaggtgcatctctgggcgcgggcctgggaattgtaatggctgtgataatgggggcagcatcagcccttcgaaagccgtgattcatgtttctgaagaatgcgtctatattgagggcaatagaggataatgagttgaggcgagaggcaagacgatcagggtagtaggggac

SEQ ID NO: 211554 - DNA, 3093 bp, Zea Mays
ccaaaaagctaaagcccacttagaggtatctgttagcagaggctggtgacaccctatttgctacatttattggcacaaagcagtacaaagatattattgctgatgtgaacatattccaagggaccttatttcatgaagatactgctcatgatttagctcctgatgttgaccctgaacaaaatgatacccaaaagggtgaggaaagccatgggaaatcttaccgagaaacatcaaagaagctaagaaaaccaaaacctgcagtgcaccgaggtttcttggctcgtgctaatggaattccagcactggacctatacaatcttgcacagaaaagaaacaggaaacttgttctttgtggacactcacttggttgctgcattggctactcttgcaattttgagagttattgctaccacttcatctgaagaggataacaggcttcatgtgaagtgcatcaccttctctcagccacctgttgggaatgctgctttaagagattatgttcacaaaagaggatggcaggactacttcaaatcctattgtattccagaagacttggtaccacgcattctatctccagcttattttcaccactacaatgcccagacacctgaagcatcttttacaaataaaactgatgtgaaatctgaagaagttatggaggcaagtggggaaaggcccagaggaaacaacagggaacacctcgttctcggtgttggtccagtgcaaaagtcattttggaggctttcaaaacttgttcccttggaaggggtgcggaaaagcttaagtgcaattcaaaaacaaacaaatgtttttgggaaggcaccatcacaattggatagctatttgcaatcaaaggttgatgaatcagaagaaccacctcaatctcttgagattcaagaaagttcacaaggaattgctcttacccctttatcggataaagatggagggaacactgaagataataataggactgagaaaataaatgcatctgaagcaggggggtctaaacgctggagcagggtaccttctttgccttcatatgtgccatttggtgagctttacctattgggagattcatcagtcaatacactttcagattcagaatactccaagatgacgtcggtgcagtctgttatatcggagttaagagagcgtttgcagtcgcactcaatgaagtcctatagggctagatttcaaaaaatatatgattcatgcatgtgtgcaaatgctcccatttttactggcattgagcaattgccacaattttcacatctacaagaattaattggtctaacagctactgattctgttgaacttggagatatcgtggaccctcctgttatccgaactgctacttctatccttcctcttggatggactggactccctggtggtaaaaatgctgagccactgaaagttgatataattgggcatgacctacaaatgtgcactcttttccaggcacaaataaatggaaactggtattccacagtaatagagactctaccatcagctacttcatactcaccaaatggagaactgcaacccacattacagaaaatgcggattcttgttggacaaccactaaagcagcctccaaattacattagtggggatttcatgattcctgtgatggcaggtgctgattcaacacccgactttggatttgaatcattttttgaagataaagattgctgcaagggtttgagtggatttctaatatatgggacaagtgattttgtaactgtacgtaaagaggtccacgttaggactcggagagtgcgattgcttggattagagggggctggcaaaacatccctgcttaaagcaatgttaggacaagttaaagaaagaaatagcactgttcttgaatgcatacatgtcgatttgcatggcaagggaatatcaaatggattgtgctacatagattcgacaacggtaaacttgcaggagctacctttggaggttgggcggttcaaagaagaactgttgttaggactccatgatatcagcaggaagactgaccttgttattgcggtgcataacctagcacaccgaattccacagtatcaacggtccaatacttctcagcctcagcctgctctttcacttctcttggatgaagctaaggcgctaagcattccttggattcttgcaataaccaacaaattctctgttagtgcgcatgagcagaacagattgatcagctcagctatggaagcatatcaagtttctcctgagatgacaaaagttgttaactcttccccatttctgatgccaagtgctagaaacagtttgcagcagatcagatcagctactgggaagttgaagaaggatccagcaaatagatctggttatcttcctgtaaactttggattgtcatcatttcagaggaaggacattgttatgcatgtggagggtgttagttcccttcgtcaacttgtacatcaagtagtcctcaacaatgaagaaacagcatttgaggaacttgctcgtgagagattgttgaaggagctagcgtcagagaaagcagcgtccctgcaagtgaagcagaagccccggaaaagagatggctctgttacagctgctgctgtaggtgcatctctgggcgcgggcctgggaattgtaatggctgtgataatgggggcagcatcagcccttcgaaagccgtgattcatgtattcttttgatccattatttacttcttgatttaaggatgtctgaacaaaagcactagtgtaggcatgaaaaatgaaattttagggcagaatagttagctgataccgtagtgccacattttggctgtgtatagaatgtaggttgagccttttttttgctgatctgaattttgttgtgttactggagtatggcttggatatgttctacatcatgttttaatttagttataaatctgtatcatgtctatgaccactagccaatttactatctttttttattattttattcttttctaacttggctaaaaattatattaaaattacaaagcaggtttctgaagaatgcgtctatattgagggcaatagaggataatgagttgaggcgagaggcaagacgatcagggtagtaggggac

SEQ ID NO: 211555 - DNA, 3533 bp, Zea Mays
ccgacctcacgtcctcaccccacgccaatggcggccgctctggcgagccgcgtggagagttgggtgcgggaccaggcggcgcggctgcagccctgggcggcggcgctgccgcaggcgccgcggtggccctggcccccgccgcggcccgcctggccgtggcccggggaccgcagacgccagcgggaacgcatgttccgggaggagtacgaacgtcgtagcagacagctccgcgagctctgccgcgctgtccgcgtcgacaccgtagccgagctccaggagttgctctgcgccatggtactcgccgagtgcgtctacaagagacctgtttctgagatgatgagatatatcaacaagtttaagtctgattttggtggaaatgttgtgtccctggagcgtgttcaaccatccttggatcatgtaccacatcggtaaccaaaaagctaaagcccacttagaggtatctgttagcagaggctggtgacaccctatttgctacatttattggcacaaagcagtacaaagatattattgctgatgtgaacatattccaagggaccttatttcatgaagatactgctcatgatttagctcctgatgttgaccctgaacaaaatgatacccaaaagggtgaggaaagccatgggaaatcttaccgagaaacatcaaagaagctaagaaaaccaaaacctgcagtgcaccgaggtttcttggctcgtgctaatggaattccagcactggacctatacaatcttgcacagaaaagaaacaggaaacttgttctttgtggacactcacttggtggggcggttgctgcattggctactcttgcaattttgagagttattgctaccacttcatctgaagaggataacaggcttcatgtgaagtgcatcaccttctctcagccacctgttgggaatgctgctttaagagattatgttcacaaaagaggatggcaggactacttcaaatcctattgtattccagaagacttggtaccacgcattctatctccagcttattttcaccactacaatgcccagacacctgaagcatcttttacaaataaaactgatgtgaaatctgaagaagttatggaggcaagtggggaaaggcccagaggaaacaacagggaacacctcgttctcggtgttggtccagtgcaaaagtcattttggaggctttcaaaacttgttcccttggaaggggtgcggaaaagcttaagtgcaattcaaaaacaaacaaatgtttttgggaaggcaccatcacaattggatagctatttgcaatcaaaggttgatgaatcagaagaaccacctcaatctcttgagattcaagaaagttcacaaggaattgctcttacccctttatcggataaagatggagggaacactgaagataataataggactgagaaaataaatgcatctgaagcaggggggtctaaacgctggagcagggtaccttctttgccttcatatgtgccatttggtgagctttacctattgggagattcatcagtcaatacactttcagattcagaatactccaagatgacgtcggtgcagtctgttatatcggagttaagagagcgtttgcagtcgcactcaatgaagtcctatagggctagatttcaaaaaatatatgattcatgcatgtgtgcaaatgctcccatttttactggcattgagcaattgccacaattttcacatctacaagaattaattggtctaacagctactgattctgttgaacttggagatatcgtggaccctcctgttatccgaactgctacttctatccttcctcttggatggactggactccctggtggtaaaaatgctgagccactgaaagttgatataattgggcatgacctacaaatgtgcactcttttccaggcacaaataaatggaaactggtattccacagtaatagagactctaccatcagctacttcatactcaccaaatggagaactgcaacccacattacagaaaatgcggattcttgttggacaaccactaaagcagcctccaaattacattagtggggatttcatgattcctgtgatggcaggtgctgattcaacacccgactttggatttgaatcattttttgaagataaagattgctgcaagggtttgagtggatttctaatatatgggacaagtgattttgtaactgtacgtaaagaggtccacgttaggactcggagagtgcgattgcttggattagagggggctggcaaaacatccctgcttaaagcaatgttaggacaagttaaagaaagaaatagcactgttcttgaatgcatacatgtcgatttgcatggcaagggaatatcaaatggattgtgctacatagattcgacaacggtaaacttgcaggagctacctttggaggttgggcggttcaaagaagaactgttgttaggactccatgatatcagcaggaagactgaccttgttattgcggtgcataacctagcacaccgaattccacagtatcaacggtccaatacttctcagcctcagcctgctctttcacttctcttggatgaagctaaggcgctaagcattccttggattcttgcaataaccaacaaattctctgttagtgcgcatgagcagaacagattgatcagctcagctatggaagcatatcaagtttctcctgagatgacaaaagttgttaactcttccccatttctgatgccaagtgctagaaacagtttgcagcagatcagatcagctactgggaagttgaagaaggatccagcaaatagatctggttatcttcctgtaaactttggattgtcatcatttcagaggaaggacattgttatgcatgtggagggtgttagttcccttcgtcaacttgtacatcaagtagtcctcaacaatgaagaaacagcatttgaggaacttgctcgtgagagattgttgaaggagctagcgtcagagaaagcagcgtccctgcaagtgaagcagaagccccggaaaagagatggctctgttacagctgctgctgtaggtgcatctctgggcgcgggcctgggaattgtaatggctgtgataatgggggcagcatcagcccttcgaaagccgtgattcatgtattcttttgatccattatttacttcttgatttaaggatgtctgaacaaaagcactagtgtaggcatgaaaaatgaaattttagggcagaatagttagctgataccgtagtgccacattttggctgtgtatagaatgtaggttgagccttttttttgctgatctgaattttgttgtgttactggagtatggcttggatatgttctacatcatgttttaatttagttataaatctgtatcatgtctatgaccactagccaatttactatctttttttattattttattcttttctaacttggctaaaaattatattaaaattacaaagcaggtttctgaagaatgcgtctatattgagggcaatagaggataatgagttgaggcgagaggcaagacgatcagggtagtaggggac

SEQ ID NO: 211556 - DNA, 4146 bp, Zea Mays
ccgacctcacgtcctcaccccacgccaatggcggccgctctggcgagccgcgtggagagttgggtgcgggaccaggcggcgcggctgcagccctgggcggcggcgctgccgcaggcgccgcggtggccctggcccccgccgcggcccgcctggccgtggcccggggaccgcagacgccagcgggaacgcatgttccgggaggagtacgaacgtcgtagcagacagctccgcgagctctgccgcgctgtccgcgtcgacaccgtagccgagctccaggagttgctctgcgccatggtactcgccgagtgcgtctacaagagacctgtttctgagatgatgagatatatcaacaagtttaagtctgattttggtggaaatgttgtgtccctggagcgtgttcaaccatccttggatcatgtaccacatcggtaaccaaaaagctaaagcccacttagaggttcaatatttgttgtggccgttctttgcaaaaagtttgtaatcaaggactacaatcaaatacaattgagctattttttatgcaactctaatctcaagtaggtcaagtaaccatgtacaatccttgctttatctaagctcccttagataaagacacagaagggcagacttggtgcagtggtgagagctgtctcaccgagtcaccaggtagtggtttgaagcaacccctctgcatttgcaggggaaaggcttccctcagtttatcccttttctagataccagccatgtgggagcttctgccactcggtttgcctgctcttagataaagacacaaaaaatagtcctttctgtaattactgtgagtatggggcaaattatgttatgggatgtcctaaatgcgtgatctttgctggaaagcaaatagtcaatctaaaaaattacttctgctcctggacaatcctgtaggttggatctttacacaatatctatatatttatgctgattatccaatatccattccattccttattttaagtagtccaaataatgacaatctgcacatgattctgctgtattttttttatataaatccaatcactggtgaaattatgtaggtatctgttagcagaggctggtgacaccctatttgctacatttattggcacaaagcagtacaaagatattattgctgatgtgaacatattccaagggaccttatttcatgaagatactgctcatgatttagctcctgatgttgaccctgaacaaaatgatacccaaaagggtgaggaaagccatgggaaatcttaccgagaaacatcaaagaagctaagaaaaccaaaacctgcagtgcaccgaggtttcttggctcgtgctaatggaattccagcactggacctatacaatcttgcacagaaaagaaacaggaaacttgttctttgtggacactcacttggtggggcggttgctgcattggctactcttgcaattttgagagttattgctaccacttcatctgaagaggataacaggcttcatgtgaagtgcatcaccttctctcagccacctgttgggaatgctgctttaagagattatgttcacaaaagaggatggcaggactacttcaaatcctattgtattccagaagacttggtaccacgcattctatctccagcttattttcaccactacaatgcccagacacctgaagcatcttttacaaataaaactgatgtgaaatctgaagaagttatggaggcaagtggggaaaggcccagaggaaacaacagggaacacctcgttctcggtgttggtccagtgcaaaagtcattttggaggctttcaaaacttgttcccttggaaggggtgcggaaaagcttaagtgcaattcaaaaacaaacaaatgtttttgggaaggcaccatcacaattggatagctatttgcaatcaaaggttgatgaatcagaagaaccacctcaatctcttgagattcaagaaagttcacaaggaattgctcttacccctttatcggataaagatggagggaacactgaagataataataggactgagaaaataaatgcatctgaagcaggggggtctaaacgctggagcagggtaccttctttgccttcatatgtgccatttggtgagctttacctattgggagattcatcagtcaatacactttcagattcagaatactccaagatgacgtcggtgcagtctgttatatcggagttaagagagcgtttgcagtcgcactcaatgaagtcctatagggctagatttcaaaaaatatatgattcatgcatgtgtgcaaatgctcccatttttactggcattgagcaattgccacaattttcacatctacaagaattaattggtctaacagctactgattctgttgaacttggagatatcgtggaccctcctgttatccgaactgctacttctatccttcctcttggatggactggactccctggtggtaaaaatgctgagccactgaaagttgatataattgggcatgacctacaaatgtgcactcttttccaggcacaaataaatggaaactggtattccacagtaatagagactctaccatcagctacttcatactcaccaaatggagaactgcaacccacattacagaaaatgcggattcttgttggacaaccactaaagcagcctccaaattacattagtggggatttcatgattcctgtgatggcaggtgctgattcaacacccgactttggatttgaatcattttttgaagataaagattgctgcaagggtttgagtggatttctaatatatgggacaagtgattttgtaactgtacgtaaagaggtccacgttaggactcggagagtgcgattgcttggattagagggggctggcaaaacatccctgcttaaagcaatgttaggacaagttaaagaaagaaatagcactgttcttgaatgcatacatgtcgatttgcatggcaagggaatatcaaatggattgtgctacatagattcgacaacggtaaacttgcaggagctacctttggaggttgggcggttcaaagaagaactgttgttaggactccatgatatcagcaggaagactgaccttgttattgcggtgcataacctagcacaccgaattccacagtatcaacggtccaatacttctcagcctcagcctgctctttcacttctcttggatgaagctaaggcgctaagcattccttggattcttgcaataaccaacaaattctctgttagtgcgcatgagcagaacagattgatcagctcagctatggaagcatatcaagtttctcctgagatgacaaaagttgttaactcttccccatttctgatgccaagtgctagaaacagtttgcagcagatcagatcagctactgggaagttgaagaaggatccagcaaatagatctggttatcttcctgtaaactttggattgtcatcatttcagaggaaggacattgttatgcatgtggagggtgttagttcccttcgtcaacttgtacatcaagtagtcctcaacaatgaagaaacagcatttgaggaacttgctcgtgagagattgttgaaggagctagcgtcagagaaagcagcgtccctgcaagtgaagcagaagccccggaaaagagatggctctgttacagctgctgctgtaggtgcatctctgggcgcgggcctgggaattgtaatggctgtgataatgggggcagcatcagcccttcgaaagccgtgattcatgtattcttttgatccattatttacttcttgatttaaggatgtctgaacaaaagcactagtgtaggcatgaaaaatgaaattttagggcagaatagttagctgataccgtagtgccacattttggctgtgtatagaatgtaggttgagccttttttttgctgatctgaattttgttgtgttactggagtatggcttggatatgttctacatcatgttttaatttagttataaatctgtatcatgtctatgaccactagccaatttactatctttttttattattttattcttttctaacttggctaaaaattatattaaaattacaaagcaggtttctgaagaatgcgtctatattgagggcaatagaggataatgagttgaggcgagaggcaagacgatcagggtagtaggggac

SEQ ID NO: 211557 - DNA, 3565 bp, Zea Mays
acacgcttcccctccgtcctccgtcccctccgtcccctcttgccgcaacagatcgccaaccccgacctcacgtcctcaccccacgccaatggcggccgctctggcgagccgcgtggagagttgggtgcgggaccaggcggcgcggctgcagccctgggcggcggcgctgccgcaggcgccgcggtggccctggcccccgccgcggcccgcctggccgtggcccggggaccgcagacgccagcgggaacgcatgttccgggaggagtacgaacgtcgtagcagacagctccgcgagctctgccgcgctgtccgcgtcgacaccgtagccgagctccaggagttgctctgcgccatggtactcgccgagtgcgtctacaagagacctgtttctgagatgatgagatatatcaacaagtttaagtctgattttggtggaaatgttgtgtccctggagcgtgttcaaccatccttggatcatgtaccacatcggtatctgttagcagaggctggtgacaccctatttgctacatttattggcacaaagcagtacaaagatattattgctgatgtgaacatattccaagggaccttatttcatgaagatactgctcatgatttagctcctgatgttgaccctgaacaaaatgatacccaaaagggtgaggaaagccatgggaaatcttaccgagaaacatcaaagaagctaagaaaaccaaaacctgcagtgcaccgaggtttcttggctcgtgctaatggaattccagcactggacctatacaatcttgcacagaaaagaaacaggaaacttgttctttgtggacactcacttggtggggcggttgctgcattggctactcttgcaattttgagagttattgctaccacttcatctgaagaggataacaggcttcatgtgaagtgcatcaccttctctcagccacctgttgggaatgctgctttaagagattatgttcacaaaagaggatggcaggactacttcaaatcctattgtattccagaagacttggtaccacgcattctatctccagcttattttcaccactacaatgcccagacacctgaagcatcttttacaaataaaactgatgtgaaatctgaagaagttatggaggcaagtggggaaaggcccagaggaaacaacagggaacacctcgttctcggtgttggtccagtgcaaaagtcattttggaggctttcaaaacttgttcccttggaaggggtgcggaaaagcttaagtgcaattcaaaaacaaacaaatgtttttgggaaggcaccatcacaattggatagctatttgcaatcaaaggttgatgaatcagaagaaccacctcaatctcttgagattcaagaaagttcacaaggaattgctcttacccctttatcggataaagatggagggaacactgaagataataataggactgagaaaataaatgcatctgaagcaggggggtctaaacgctggagcagggtaccttctttgccttcatatgtgccatttggtgagctttacctattgggagattcatcagtcaatacactttcagattcagaatactccaagatgacgtcggtgcagtctgttatatcggagttaagagagcgtttgcagtcgcactcaatgaagtcctatagggctagatttcaaaaaatatatgattcatgcatgtgtgcaaatgctcccatttttactggcattgagcaattgccacaattttcacatctacaagaattaattggtctaacagctactgattctgttgaacttggagatatcgtggaccctcctgttatccgaactgctacttctatccttcctcttggatggactggactccctggtggtaaaaatgctgagccactgaaagttgatataattgggcatgacctacaaatgtgcactcttttccaggcacaaataaatggaaactggtattccacagtaatagagactctaccatcagctacttcatactcaccaaatggagaactgcaacccacattacagaaaatgcggattcttgttggacaaccactaaagcagcctccaaattacattagtggggatttcatgattcctgtgatggcaggtgctgattcaacacccgactttggatttgaatcattttttgaagataaagattgctgcaagggtttgagtggatttctaatatatgggacaagtgattttgtaactgtacgtaaagaggtccacgttaggactcggagagtgcgattgcttggattagagggggctggcaaaacatccctgcttaaagcaatgttaggacaagttaaagaaagaaatagcactgttcttgaatgcatacatgtcgatttgcatggcaagggaatatcaaatggattgtgctacatagattcgacaacggtaaacttgcaggagctacctttggaggttgggcggttcaaagaagaactgttgttaggactccatgatatcagcaggaagactgaccttgttattgcggtgcataacctagcacaccgaattccacagtatcaacggtccaatacttctcagcctcagcctgctctttcacttctcttggatgaagctaaggcgctaagcattccttggattcttgcaataaccaacaaattctctgttagtgcgcatgagcagaacagattgatcagctcagctatggaagcatatcaagtttctcctgagatgacaaaagttgttaactcttccccatttctgatgccaagtgctagaaacagtttgcagcagatcagatcagctactgggaagttgaagaaggatccagcaaatagatctggttatcttcctgtaaactttggattgtcatcatttcagaggaaggacattgttatgcatgtggagggtgttagttcccttcgtcaacttgtacatcaagtagtcctcaacaatgaagaaacagcatttgaggaacttgctcgtgagagattgttgaaggagctagcgtcagagaaagcagcgtccctgcaagtgaagcagaagccccggaaaagagatggctctgttacagctgctgctgtaggtgcatctctgggcgcgggcctgggaattgtaatggctgtgataatgggggcagcatcagcccttcgaaagccgtgattcatgtattcttttgatccattatttacttcttgatttaaggatgtctgaacaaaagcactagtgtaggcatgaaaaatgaaattttagggcagaatagttagctgataccgtagtgccacattttggctgtgtatagaatgtaggttgagccttttttttgctgatctgaattttgttgtgttactggagtatggcttggatatgttctacatcatgttttaatttagttataaatctgtatcatgtctatgaccactagccaatttactatctttttttattattttattcttttctaacttggctaaaaattatattaaaattacaaagcaggtttctgaagaatgcgtctatattgagggcaatagaggataatgagttgaggcgagaggcaagacgatcagggtagtaggggac

SEQ ID NO: 211558 - DNA, 654 bp, Zea Mays
gtccatatttgggtaggtcccgatgtcggtggggagtttgggccttatcgccagtcagaacggaattcacttcaagaagtatgccgagaagcttttggactctggtgcggtttaccgctacttttgctccaatgaggaatttgagcaaatgaagtagcaaagcagagacaacttcctcctgtgtatatggggaagtgggcaagtgcttctgatgcagaggtacatcaggagttagagaaaggtacgccgtacacttaccgcttccacgtgccaaaggaagggtcattgaaagttaatgacttaattcgtggtgagttggaacttagacactcttggtgatttcgtgattatgagaagcaatggacagcctgtgtataacttctgtgtgacagttgatgacgctaccatgcaaatatctcatgttatcagagctgaagagcatttaccaaacacattgcggcaagctctaatttataaagctcttggatttgcaatgccttcatttgctcatgtttcgcttattctggctcctgacacaagtaaactgtctaaacgacatggagctacttctgtggggcagtataaagagatggtcaattatttagcactactgggctgggtgatggtactgaaaatgagttcttcactatcgaa

SEQ ID NO: 211559 - DNA, 1612 bp, Zea Mays
gaaaaatgattgaaatactgcgagtgtggcaaacaaactagctagttccaattttgagcactgctactttacataagtaaatgaccaaacctatcaccaaaaaggaaattgtgtacacaaaatggaagaaaaaacacaggacgaaatacgcgagaaattccaggacacagcggcggtcacgcgttttctgacggctgacctgattgggagcacgccgctgccgttggagttgacgccccggcctggagccaccgtcatcgaggggggattgccgcgttcggcgccgctcgcggtgacggtcggcctcgcactcgctactggtggtggtggaagcctcgcactcgctatcgctagtcgctactgatggttccaagagcaaaggcccatgttgtttgggatccagtaggcccaatcaagccgttgactccgaggagagccgcttccgatgtcctcgcctcttgccgacaccttcacccactcccagcaggccagcacacattggcgacgcttctcgccggagaagggtgggcggaggatgccctgcctggcccctgccaattgacggccacatggcttcttctagcagggcatcatttcctctcctatggttaagttgattgaaacttttgctgttttttgcaagtctcagagaactgcttatagggagaaggtgttaattgaagcagagaaacaatttctgcatgatttcacttttttcaaggaaaagttatcagttgattttggccaaatagtggatgtcgaatgcattgatagtacttgccaagttctgtgtgacaaggtcaggggttgttgttcaatttgcaagtcaaggtgtactgaagctatcatcgattctctaaaaattttggctgaagcaatgactattaagcatcagaagtttttgaattccaacaaccttctggcgaaagatatggatattaagtcagatgagaaagctaccaaaattgataccaatgtgcagccagttgatgttaagtcgaatgagaaaggggctggtgtggacattgttgaggcttctcatggaaaagctcatgtggtttttagctagatgatgctggggttatggttaatgaactactacttactactaattaccaggatttccaggagaacaggttgttgatgtcatttgttaatttccatgagcaagagaagatctctaaagaaatcgtaacacacgctatagaaagctgcatgaagaaacaagcagataacttgtattgttttttttgtatattagttttttttctctatttttagagaaaaaaactacgtgtttattatgaccattagatcttgatctagtggatatgagatgtgtgtgttttgtgtttgcaaaacacacagattttcctttaaaagaaatctgcgtgttttttcagctaaaaacacacgtgtgttttttgggcaaaaattgcccatgtgctgtatagacagtccctataagttttactttgtgttcttgcaagatctcatgcgcttattcaaactactaattaaggtccggcaaccttgagtcacttgggtttaggtgtgaaaacgagtcaggctgtcgtttaccggatatggattcagatacttttatattcgg

SEQ ID NO: 211560 - DNA, 1784 bp, Zea Mays
aaatgattgaaatactgcgagtgtggcaaacaaactagctagttccaattttgagcactgctactttacataagtaaatgaccaaacctatcaccaaaaaggaaattgtgtacacaaaatggaagaaaaaacacaggacgaaatacgcgagaaattccaggacacagcggcggtcacgcgttttctgacggctgacctgattgggagcacgccgctgccgttggagttgacgccccggcctggagccaccgtcatcgaggggggattgccgcgttcggcgccgctcgcggtgacggtcggcctcgcactcgctactggtggtggtggaagcctcgcactcgctatcgctagtcgctactgatggttccaagagcaaaggcccatgttgtttgggatccagtaggcccaatcaagccgttgactccgaggagagccgcttccgatgtcctcgcctcttgccgacaccttcacccactcccagcaggccagcacacattggcgacgcttctcgccggagaagggtgggcggaggatgccctgcctggcccctgccaattgacggccacatggcttcttctagcagggcatcatttcctctcctatggttaagttgattgaaacttttgctgttttttgcaagtctcagagaactgcttatagggagaaggtgttaattgaagcagagaaacaatttctgcatgatttcacttttttcaaggaaaagttatcagttgattttggccaaatagtggatgtcgaatgcattgatagtacttgccaagttctgtgtgacaaggtcaggggttgttgttcaatttgcaagtcaaggtgtactgaagctatcatcgattctctaaaaattttggctgaagcaatgactattaagcatcagaagtttttgaattccaacaaccttctggcgaaagatatggatattaagtcagatgagaaagctaccaaaattgataccaatgtgcagccagttgatgttaagtcgaatgagaaaggggctggtgtggacattgttgaggcttctcatggaaaagctcatgtggtttttagctagatgatgctggggttatggttaatgaactactacttactactaattaccaggtgcaagtgtaacttctgatctgcttttcgtctactgtgtcactccactgtgtagcaatcagagcagtaaccttactagtatctctgttcaaacaaaggaagtgcaccatacaatctacagtttaatcaccctacctgtgccttgcatcagttttaaacgttggagctcattcctgatttccaggagaacaggttgttgatgtcatttgttaatttccatgagcaagagaagatctctaaagaaatcgtaacacacgctatagaaagctgcatgaagaaacaagcagataacttgtattgttttttttgtatattagttttttttctctatttttagagaaaaaaactacgtgtttattatgaccattagatcttgatctagtggatatgagatgtgtgtgttttgtgtttgcaaaacacacagattttcctttaaaagaaatctgcgtgttttttcagctaaaaacacacgtgtgttttttgggcaaaaattgcccatgtgctgtatagacagtccctataagttttactttgtgttcttgcaagatctcatgcgcttattcaaactactaattaaggtccggcaaccttgagtcacttgggtttaggtgtgaaaacgagtcaggctgtcgtttaccggatatggattcagatacttttatattcgg

SEQ ID NO: 211561 - DNA, 1404 bp, Zea Mays
atgagttggagtcgcgggcgaggtggatccgacgagatccatggcggagggcgaggaggctccgatggatctatggctgggggcgaggtagctccgacgaggtacatggcgcgggtggaggcagctgcgattccgacgaggtccacgtcggagggcgaggaggccgtgactggatctatggcggggggcgagtgggctgctgcagggtccatggtggaggagaggaaggtccgacgggatccatggctgggggtggtggagctggctgcgacggtatctacggcggggggcgagggtgtcccgacaggatccattttcgctgtccggcgacagcaacctgttgtgaagcaggcgggtctggtgttccactgcgcgaagggcatcatttcctctcctatggttaagttgattgaaacttttgctgttttttgcaagtctcagagaactgcttatagggagaaggtgttaattgaagcagagaaacaatttctgcatgatttcacttttttcaaggaaaagttatcagttgattttggccaaatagtggatgtcgaatgcattgatagtacttgccaagttctgtgtgacaaggtcaggggttgttgttcaatttgcaagtcaaggtgtactgaagctatcatcgattctctaaaaattttggctgaagcaatgactattaagcatcagaagtttttgaattccaacaaccttctggcgaaagatatggatattaagtcagatgagaaagctaccaaaattgataccaatgtgcagccagttgatgttaagtcgaatgagaaaggggctggtgtggacattgttgaggcttctcatggaaaagctcatgtggtttttagctagatgatgctggggttatggttaatgaactactacttactactaattaccaggatttccaggagaacaggttgttgatgtcatttgttaatttccatgagcaagagaagatctctaaagaaatcgtaacacacgctatagaaagctgcatgaagaaacaagcagataacttgtattgttttttttgtatattagttttttttctctatttttagagaaaaaaactacgtgtttattatgaccattagatcttgatctagtggatatgagatgtgtgtgttttgtgtttgcaaaacacacagattttcctttaaaagaaatctgcgtgttttttcagctaaaaacacacgtgtgttttttgggcaaaaattgcccatgtgctgtatagacagtccctataagttttactttgtgttcttgcaagatctcatgcgcttattcaaactactaattaaggtccggcaaccttgagtcacttgggtttaggtgtgaaaacgagtcaggctgtcgtttaccggatatggattcagatacttttatattcgg

SEQ ID NO: 211562 - DNA, 2604 bp, Zea Mays
caggagaccaggctggactgctctctgctggtgcgttcgctccccgttgactgccactctccttgcgtgcactatcgtcccggcgacgactccgctgccgtcgccgcctacgccaggttccgaagtcttcgtgagccccttctcctacaacgagcactcacaccaatcaccagtgatttattgcgcatgaggactgcatctccccttgaaatttgaggctttggaaaactgctgaatggagtattcctcaagtgaagacgagggattggttggagattttatcgacgctgaggataatacgttcactaagaatattgaccaaggaactggcgtgatggcttcccagatccatggtgatgatccctcggtgggatccatgccacctgttattggaaatgagctgctgatggcagctgatgtattggccaaaaatgacgaacctcgtatgggcatggaattcgactctgatgctgctgctcgcgcattctacaatgcatatgctttatgctttgggtttgggattcgtgttgcccgatcccgtagtgagcgaagaaagggcgtcgaggtgctcgtcatgaagcgttttgtgtgcttgaaagagggacatcacaggaagaagaagccagttgagcctagcaataagaaaaagaggaaacgactctctatacgggatgggtgcccagcaatgatggaggtggtgcgtaggggcccagataggtgggtcatcacgaagttggtgctggagcacacccatgttattgttagtgcagaccgggcacgggaggtccaactccatcgcctctctggaaagtttcaggaacatgagaaccagttgcaggaggtgcgaaggaacgtgtttggagatacgaatgcgcaagggctctttaattacttcaagaaaatgcaatcagataattctagttttttcttttctatacaagttgacagtaaaaactatgtgagcaatgcagtttgggttgatgcaagagctagaatggcatacacgtactttggggatgctgtttactttgacactacttgtagtcaaaatgagaacatgctgccctttgcagctttcacaggagttaatcaccatggtgacactgttgtttttggctgtgccttaattttggacaggacggaatcttcatacggctggatttttgagacgtggttgacagcaatggatagtaggttgccattttccttgactaccgatgaagatggcgcatcttgtctagatgcaagaagagactgactgatgcccgcacaaggtttcctgggttacatgaggagctcaagagatgtgtcaatgggtgtgataccgcggttatttttgacatgctctggggctccattcttgacaagtatggcctgagagacgataattggctgcagtcactgtatgaaattaggcacaaatgggttcctgcatacctaaccagcttcttcttcgctgagctttccttaactcacagagtagaaacagtcatttctgaaaaccgacatggtcttggaaaaacaagcgaggagtatctacaccagagctgcatttgaaacattccagctggaattggttgaagcaatgcaacattatgccgtcaaggttcaggatggatcatacatgaaatactacgtcgaaagaaacggtgatcctcctaccaggcacaccgttttctacaacgttgctgagaagaaggcatggtgcgagtgctgcagattcgctttctcggcgatactgtgcaggcatgtccttagtgtgttcctcttggccggtgtcatcatgcttccagagccttgcatcacaaagcgatggacaaagaaggctaagtcagggcctgaactcatcgggcttaacgttggaaatggaagtagcagtccagattctgtggcatcaagatataatgatctcgttcgtgatgcgatcaagtgtgcagagaagggaactgtatcggccggcgccttcagagttgcaaaggaagtgctgcgcaaagccttcatggatatcaggggtcacggggagaaactgtgcaaggatgctctgcgctctgcatcaagccgatagcagcgattcgttattttagagggcatttgagagattaacctgctatctttgccgctaaatttgttgagcgaacacgaggaacttcaagtgcttgcgacagtgacttaagccgcatgtcaggttgtcatgaaaaatccagatttgctaatcgagacatgtttagtcttgtttgctgaatcgttcctttttctaagtctctgatcagcagaccgtatatatagttctggaaaacactattttgtactctagattgtacgaaagcaaaatttgaaataggaagtaagatagaagatgagatgaaaatgagcaagaataataagagcctccaaacaggctaggtataggggagagatgaggagaggaaagaggtttacagtcggtttagacaaaaaaaaattaagaagccatgtgagaaagacaagtggagtcatgtattaatagtgaagagctaaatattatacaaatgagctaaatggtagactgcaactgtccttgccatcaatggtcggctatattattaaacttactctgacaacccg

SEQ ID NO: 211563 - DNA, 2307 bp, Zea Mays
aggagaccaggctggactgctctctgctggtgcgttcgctccccgttgactgccactctccttgcgtgcactatcgtcccggcgacgactccgctgccgtcgccgcctacgccaggttccgaagtcttcgtgagccccttctcctacaacgagcactcacaccaatcaccagtgatttattgcgcatgaggactgcatctccccttgaaatttgaggctttggaaaactgctgaatggagtattcctcaagtgaagacgagggattggttggagattttatcgacgctgaggataatacgttcactaagaatattgaccaaggaactggcgtgatggcttcccagatccatggtgatgatccctcggtgggatccatgccacctgttattggaaatgagctgctgatggcagctgatgtattggccaaaaatgacgaacctcgtatgggcatggaattcgactctgatgctgctgctcgcgcattctacaatgcatatgctttatgctttgggtttgggattcgtgttgcccgatcccgtagtgagcgaagaaagggcgtcgaggtgctcgtcatgaagcgttttgtgtgcttgaaagagggacatcacaggaagaagaagccagttgagcctagcaataagaaaaagaggaaacgactctctatacgggatgggtgcccagcaatgatggaggtggtgcgtaggggcccagataggtgggtcatcacgaagttggtgctggagcacacccatgttattgttagtgcagaccgggcacgggaggtccaactccatcgcctctctggaaagtttcaggaacatgagaaccagttgcaggaggacggaatcttcatacggctggatttttgagacgtggttgacagcaatggatagtaggttgccattttccttgactaccgatgaagatggcgcatcttgtctagatgcaagaagagactgactgatgcccgcacaaggtttcctgggttacatgaggagctcaagagatgtgtcaatgggtgtgataccgcggttatttttgacatgctctggggctccattcttgacaagtatggcctgagagacgataattggctgcagtcactgtatgaaattaggcacaaatgggttcctgcatacctaaccagcttcttcttcgctgagctttccttaactcacagagtagaaacagtcatttctgaaaaccgacatggtcttggaaaaacaagcgaggagtatctacaccagagctgcatttgaaacattccagctggaattggttgaagcaatgcaacattatgccgtcaaggttcaggatggatcatacatgaaatactacgtcgaaagaaacggtgatcctcctaccaggcacaccgttttctacaacgttgctgagaagaaggcatggtgcgagtgctgcagattcgctttctcggcgatactgtgcaggcatgtccttagtgtgttcctcttggccggtgtcatcatgcttccagagccttgcatcacaaagcgatggacaaagaaggctaagtcagggcctgaactcatcgggcttaacgttggaaatggaagtagcagtccagattctgtggcatcaagatataatgatctcgttcgtgatgcgatcaagtgtgcagagaagggaactgtatcggccggcgccttcagagttgcaaaggaagtgctgcgcaaagccttcatggatatcaggggtcacggggagaaactgtgcaaggatgctctgcgctctgcatcaagccgatagcagcgattcgttattttagagggcatttgagagattaacctgctatctttgccgctaaatttgttgagcgaacacgaggaacttcaagtgcttgcgacagtgacttaagccgcatgtcaggttgtcatgaaaaatccagatttgctaatcgagacatgtttagtcttgtttgctgaatcgttcctttttctaagtctctgatcagcagaccgtatatatagttctggaaaacactattttgtactctagattgtacgaaagcaaaatttgaaataggaagtaagatagaagatgagatgaaaatgagcaagaataataagagcctccaaacaggctaggtataggggagagatgaggagaggaaagaggtttacagtcggtttagacaaaaaaaaattaagaagccatgtgagaaagacaagtggagtcatgtattaatagtgaagagctaaatattatacaaatgagctaaatggtagactgcaactgtccttgccatcaatggtcggctatattattaaacttactctgacaacccg

SEQ ID NO: 211564 - DNA, 2556 bp, Zea Mays
ccgcagcagcacaactgccacaagcaaagcaagccagcctgcgctgcgagagggaggaccgaggagggagagggagagagagagaccggacaggcgggcagcaagcaacgggcacgaaccgccgccgacctctcacaggcggaggagggagggaccgagggagagacgctctcctctctctctctctcacacacacacgcacagtcccatggtcgcgcacgccgcagcatccgcatccgcatccgcctcctccctgtgagtcgccgagcgacgccgcgcagatgaaggtgtcgtccaggaagaaaccgccgccgcagcaacagcgggaggagacggaggagcaagggtcgtcgggggcggccgaggccatggacgccgccgcagccgcggccgttcaggaggaggcggaggcggaggcggaggcggaggcggaggggaggacagtgctggtaggcgtgcgcgcggacgccgagagccgggcgctgctcacctgggtgctcgtcaatgtggccgcgcccctggaccgcgtcgtcgccgtccacgtcgcgccgccgtccgccgccgaggcggtcgacttcgacgccatgctcgccgtctacgagggcttctgcaacctcaagcagatcaatctaaacctgaagatttgcaaggactcgtcggtgcgcaaggcgctagttcgtgaggccagcctgttcggggccgcaaaggttgtcctcggcgtcgccaagaagaggcgtgcgatttcgtcgtcgcactcagttgcaaagtactgcgcaaagaagctgcccgcgaagtgtgcggtcctcgccgtgagcaatggcaagattgagttccggagagagtcgagcgtccatccagatgacggtgagggtgacgccacgcgtgactttggcaccaagggaagtgaattggagaatttgtcaacggatcaggtcgagatcgacgcagatccttctagtacaaatgctgaagagtcaactgtcaaacagggagacgagatttccgagcttccaggtaagggtgccagtgtgctctactgtgttcttcctgagagaagcagcggttctgttgcaagtacatctagtaggcaagaccaagattcagtggatctgccatctgaaggggctggggagctatattgcttattgccacccaggaatggccattcagtcaggagcattggtgattctaagcgttcaaatgcgagccaaaaggatgataaaccagccaatccatcactggaaggagatggcgatctgtactgccggctgccgaggactggacgaccgggtaggaattctgggggatccaatcgttctgccggtataagaggtgcagttaggcgtagcagtagtttctccagcgatatccatctgagctcagagacatcacctattaagaaggatggctcggttagcatgactgccaccgaaaggagttcttctgctgtatccacagaagctgaggactcaccgaaatacaccgcacgaactgctgaaacaccctcgagctccccaatgtcgctgagacggatggtagaggggagatctgaccgctgtcacctccatagaagaatctttagacatcaaagaagttcatcttttgaatgggcaaagatctcaatggttcaatgggcgatgagacttccgagccgatacacttcggtccacccagatggcaaaccactgaaaccgggtgcaagtccaaggctgaactgtgattctgaaactgagtccactgcagctgttgagccagaatcaatgttttctttcgctttctatgatgtagcatggcctccaagtgaactggaatcactgcgagagaagtattcttcagtttgtaggatgttttcttatgaagaactgaagcttgcgacgtccaactactcacctgatatgttaattgggaagggtggaaccagccaggttttcaaggcacaacttgatggcggaacatttgctgccataaagattctgaaaccctcggttgatgcaatacacgagtttgttacggaggttgagaccgtaaccagcttgcagcatgagaacattgtagcactaaggggattcagcttcgagaactacaaccttgtgttggcatatgattacatgccccgagggagcttggacaaagctcttcatgggaagaatgatggcacagagtttcttgtctgggagaggagaattaagatagcaattgacatcgcaagagcactcgaatttctccatctcggcggtgtgacccagtctgtgatccatggagatgttaagtcttcaaatatcctcctttcagaggattttggggcacggctctgcgatttcgggttagcaaagcgagtgtcggcttcgactccccacctaacatgtactgacatcaccgggacttttgggtacatggcgccggagtatttttcacacggggaggtcaacgagaagattgacgtctacgcattcggagttgttctgctggagattgtttcgggaaggaggcccatcacaccagggagcgcgaagggtcaagaaagcctggtcggttggcgttcgtcatccacggtga

SEQ ID NO: 211565 - DNA, 502 bp, Zea Mays
ggaagaaatcaccatttgtcatcgatttattgccagcagtttggcaagacaactgaactctcaaggcgtgaaagagaggagcttgagaaacaaaaagctcatgaacgttatatgaagcttcaggagcaaggaaaaacagaacaagcacgaaaagatttggaacgtcttgctttaataagacaacaaagggctgatgcggcgaagaaacgcgaagaggagaaagctggagcagaggaagtccgaagcacggaagtaactgcaacagtcatggaccaagagtccacgaagtgacgaaggcacgatctgcgtcgattggatatttgtttctaatgcaccagctaccttttcatagacccggcctctattctgtattcccataaaaatatgcattgacagttgacaccagtctcgtggtcgtggtttcctgtaaacttgagcttgacaaaactgaaaagtagtaaagatcagcttgcaagaaactggctcttcttatttgctgtcc

SEQ ID NO: 211566 - DNA, 2704 bp, Zea Mays
tcgcactcgacagccgccaccaccaccacctggtccacgtcgccggcggcaatgtgggcgcaactggccgtcgcgctgttcgtggcgttagccgtggctcccccggcccgtggctccgacgtgccttcgttcccgctgtcgcaggcgcagtccccatccaactcctcgtccccgtccaacgccgcctcgcggccgtgccacctggacctctcggccgagctcttcggtggggtagccgcggcgtgcggcgccggcggggggccgggctcgctggaccgcggccgctgctgcccggtcctggcggcctggctcttcgcggcgcacgcgcgcaccgcgctgtccgtgcccccggcgcctccgccctcggcgctagtgggggacgagggaatggggcccgacggcgacgacgacgggcccatggtgccgtacgacaaccagaggtgtgtcgacacgctgggcgcagcgctggagcggcgcggggtggcgctgccccggcccaacgcgacgtgcgacacggtgctctgcttctgcggcatccggctccaccagatcggctcgctccgctgccccgccgcgttcgccgtcaaaactggcgccgcggccaggaacgccacgcccaccgccgcggtgaaggccctggagaagagctgccgcaacgcctcctacgccggctgctcgcgatgcgtgcagtccctgcaaaaggtaaatacccaggagaacaagtacttggcattaacctgagggtttatcttgtcaagctgcaaaacgatctcacccaagaacttgtacccagaaccatctttcgcgtggaagttcacaggtcgaaagcagggtgagacagcagcttctgaacatttgcaacatttccaggaatctctgaagtagcttgaagagcaaacaacttgcttacaacctatcagagtaaaacaaagaaacaacagaaatccaagagggcatcatcacgaacttggcctggattttgggataatgctgctaatgcagcaaactgctctgtcatgttagtcgcagacttgtactcatgcagtgcaagctcaacgaaatctggctcattcaatgacgcaaggatgcttagtgggccaactgtagggatctttccttctacatacaacatgtgggactcgctttttggtaagtcaattatctgttaattcttctatttctgaatcctaaagaaaaatggtccctaatagcttatggtttacttgaaaagttcatgaatactccggtaacagaattcaaggtgatattacagaacaatcatatctaatcgctctttcgcatgctctatatgtattcttttagggagggcaaccatctttagagtagcaattagctgaacctgcaaaaaaaatctttttgttagccctgatttgggaggatttccccaaactagccaataatattatattggtaaaattaaaataaagtggacaaggaaaggcgccttgtcaggcaaagagaagagctgaagataggattagcttctatctatattgcagagtttgctggtaccaggaaacacaaaagaaatacaatactcctatctatcacctgtctagatctccttctagaaagaaaccataggatgaatggtgggaccaccagcatagcatgagtatacaatgaaagcagatcataaccaccagcattatagctgcttttaaaaagtaagtgttactctgaaagtttctccttttcaaggtcacaaatgattggatttttttggttatataccatttgtttgcttgcattatagttgcttttttgtggtttgaatctaacaggattttcctacttttgttgtattgtttgctttttttagaaaaaaacacagtaaaaatacgggcctctagtttataaacactcggcatgtagactagcgagatagtatatagattaaacaacagttaataaatgatattaggaagaagcttgtgtagcatcggtggccctatggggcatgctatgtcaacaatgcatcagtggccttgtcagttttattttgaccccctcaaggccttgcaaccatttcccaagccacagtatccaagagatggcagtgtcactcacagaagcagctgttcttagtatgtgatttaggaattcaatgaattatatctatgtatggttacacaagtcctatgctgacaatctgtaacatgtgtatgcttgtatttgaacctgaaacctgtgtaggctggtgtgagatctgtttgtggtatttttggtaacctgaaacctattttctatgttgtgtatgttgttttttggtaacctgaaacctgttgtgtatgttgtgcgtactactttgtagaaacctgaaatctgttttgtatacaacagcttctatgctggtacgagattgaaaccatagaaggtgttgttttgtatgctgcttgcatgcccaaggtcccacaaagcttctatggttcagactaaagaacctacagttttgtatggcatatggttccacaaggttacaaagaagttgatgttttgtatgtttaacctgaaacctgtgtttgcacaaggttccgacagcatcttccatggttcagacaacaacttctgcatcaaatagttttgttcagatttaacatagatttattcaaactaaaaacttttttcaacacatattctgtgttgtcctaatatggcgccggtaagggcgcctcgagttcta

SEQ ID NO: 211567 - DNA, 1732 bp, Zea Mays
gcaaaactgcaaatgcgggcgaccaggcaacgaagacactcgggagtcgggtctcggggttccagttcgacgacgacccttgagtactacttgactcgagtccacaatgcttcgcctccagggacggcgcacgagcgcgcggatggctaacgacgtgggggtgtccacgccggatgtagggcacgaagcggcggcgctgagcggcgggacgggggatgaggagccattggtgtccaccgggacggaggagccgccggcaacggaggatggggtgccggcggaaatcgaggaagaggggaagggaccggcggcgccattggaggggtcaccggcggtgatcaccgtggaaggagaggaggaggtgaagtggctggggcattactcctctgcgcagaccattctcatcgtcggcgacggagacttctccttctctctggcgctggccaccgcattcgactccggtgccaacctcgtcgcgacgtccctcgacacctatgaggtcctgaagcgtaagtacagcaaagcggaggcaaatatagtgattctgaaaagattgggcgccacggttttgcatggtgttgatgcgaaacgaatgaggtttcacactgacttgaagaacagacggtttgatcgtattgtctttaattttcctcatggtggattcaaaggaaaagagaatgacttgcgtatgatcaacttgcacaaggagttggtgtgggtttttttccgcaatgcacgccaccttgttcggcaacttggtgaagtccatgttacccacaagtctggggaaccatacgacagctgggatcttgagcacctggcctctgagtcttcttttgctatgtttgacaaagttccttttcgaagggaagactatccaggttataatcaaaagagaggagatggtaagaggtgcgacaaaccttttgatcttggtgcatgttgcacattcaagttccaaatcagaaacttgaagaagcagaagcaaatgaataggaggtctcgtttaatcccaaaccttgtaggcagcaactttcatccaggccattcggtaactgacaggggggtatttcatccagttgcacctgttgaagcaaggtcttggcaccatttttctccgccagctcacacagagagcatgctgatgtctccacagccttacacagttaatcaatggcaacggtcaggttttccactgaactctgatggcattgtggctggaccttatttgcataaacaggagagttgccacccggtggtgagcatgccaggcccatggctgaatgatttgcccgctcaaggtggcattcctccacctctaccaatgagcagaatcccatctcctgatctccttgcacctcgggagcagccttggtatcagcagagaactattcttgatcacccaggagtcgatgactacttctttgcccgggaacaccaaatgagtctacagagggagtatgaaatgaagaggcaagtcattccattggaacatcgccgtagggacagggagtctgttgagaagctagagtggctgcacaggatgatcgcattgtatggtaggaagtgaaggatctttgggaggtgccagtatgaaggagctgggcctaccagtttcaggcttctataggactacaggcagttaagcatgcctgcttttgaagtggagctgtccgaagagagttcctgattagttgctcattctgcaatagagtatggcttacattttcgt

SEQ ID NO: 211568 - DNA, 716 bp, Zea Mays
gtgattttaaatagataaaagacaaaagagctactcgagatagtataaagctgcaggcctgcagtcgcccccaaattccccgaaccaaatcactcccaccgtctccacagcaaccagcacacatttccctttggcggatcgaaggaaggaaggaggagatgggtggcggcatggaggtgcacaaaaaccggtggatcgaagagtggaacgccggccgggagaacctcgagttcaacttccgctggacccgccgcagcctcgccgtcgtcggcctcttcggcctcgctgtccccatcctcgtctacaagggcatcgtccgcgaattcatcaattttctgtttgttcctgctgggttggatccagcatatgcaggacgaggatgcaggtcggccatacaggaagttcctgtaagcggcgtccagggctgcaggatacgtcgattcctcgaccggggctgcgaggaggggagtttccgttcagtttgtgtcggtattgttttagtctgaatctgatgaagcaatttggaatgctgaattattgtgcctgatccaaatgaataaggtgtaatgactcgtcttttcaattactgaaactggagatgtttgaatttacttggtcacttgtatggtaaaatagcagcgttgtcatatactgtttatgacttcatttgagcgccgtggaggaatatgggatatccatggaggattggagtttgc

SEQ ID NO: 211569 - DNA, 2107 bp, Zea Mays
cgcagacccgtggacggcgcaccggtccaaagtcaaaagggcaagagggggcaaaaagggagaaatttcctctcacaaaaccctcgccagcttatcccccttcctccctcacacgatctctcctcgacggctaacccggattgccgtctcaggctcgggatccgggcgctcgcggcgatggacggcggcggcggcgctggcggcgcggagggggagctcacggcgcaggagacagcgctctacgaccgccagatccgcgtctggggcgtcgatgcccagaagagttctgcaagaatattgttctagctggagttggaagtttatccttgatggatgataatgtagtcacagaggaggatctgaatgcaaatttcctaattcctcctgatgagagcatatatggtggtagatctcgagcccaagtttgctgcgagtctttgatagatttcaatcctatggttcgagtttttgttgaaaagggtgatccatcattaattgatggagaattccttgacaagtttgacattgttgtacttagccgtgcatctcttaaaacaaagaaaaagcctggaggagcaactgaacaacaggagttgacatattctagccttcaggaagctatctctgtgccttggaatagtctaccgaagaagacggcaaaattatactttgctatgagagtactggaggattatgaattatctgaagggcgcagccctggcgaaacaacactttctgatatagatgcagttctggctcggaggaaggatatgtgtgataaaatgtctttgaatgagtctcgtattcctactactctcgtggaacgactgctagcagctggaaagaaggagcatcctcctgtatgtgctatccttggtggtattcttggtcaggaggtgatcaaatcgatatcctgcaagggcgatccagtcaagaatttcttctatttcgatgtggctgacggtaaaggtgtcatcgaggatatcccaccaccaccacctgcaaaataaagcactcagctgcgtaactctcgactcgacttggttcactaatcgttttctgtacccactcagcttcgaacatgtagtagcaacttttagatctagagccatgtgaaaaaaggcaggtttgactttaacccagatgtttagggatttttcgagcagcaaactgtgacagtatgtatgcattgacaatttaaagctgaagtctggaccggtttccatgcttttgggggcggatttcctttgtcgtccctttacccatttgtcaaatttggtagcggtggttgtggggaggggggaatgaagtgagaaggctatgtttataactgtgaaccgacggttgcagctatacatatcgtcatgcctgtgtactcatgtggcatgtttcatgcttgattacaatgcctgttgcttgaatggctccctgcatatgcgtgtcgttgttgctcactgccagattgtttggtcgcattcgataacatagtttcactggtgccagacgaggaacagcaacggtgtgctgaacttgaagaggctgggatgcagttttgggcgaaagtagttgaattatgaaagaacttgttagttctctagccggcaaggttggtgttatcgagatggtgcaactgaatttggacagaacttaccctagtagccatccgaagcagctgtctggaggtgatttctgaccagagactaccccagtgcagttcagatatcagtttctttgctgtagatgcgtcatttctcccggtcagattgtggtctgtctgtgccatgggatctgatccatctgtagattctgtagtatggtgttcctgagaaaaggatcgattagaagcaggaagatccagaccttgtgtagtcatattcgtcatcagttggtgaaggttcactgaactggacatgaaagaaaggcgcttgccgtatgatctgtgatcgcccagcatattggacatgaaagaaaggctgcaggcaagagaaacacgcactaaaaaacatttaagcttcacacatgtcgaaaactatatatgaagttgtacgatgcggccccaggaaaaggataaagtatcaagcaaaatcgcagtgacgtgaagatttat

SEQ ID NO: 211570 - DNA, 2242 bp, Zea Mays
gccaaataaaaactagactaagcttccttagcgtgaatctggaccgtcagctctccgttcgtcctcgacggacggctcgatgacgcagacccgtggacggcgcaccggtccaaagtcaaaagggcaagagggggcaaaaagggagaaatttcctctcacaaaaccctcgccagcttatcccccttcctccctcacacgatctctcctcgacggctaacccggattgccgtctcaggctcgggatccgggcgctcgcggcgatggacggcggcggcggcgctggcggcgcggagggggagctcacggcgcaggagacagcgctctacgaccgccagatccgcgtctggggcgtcgatgcccagaagagactaagtaaggcgcacgtgcttgtgtgtggcatgaacggaaccaccatcgagttctgcaagaatattgttctagctggagttggaagtttatccttgatggatgataatgtagtcacagaggaggatctgaatgcaaatttcctaattcctcctgatgagagcatatatggtggtagatctcgagcccaagtttgctgcgagtctttgatagatttcaatcctatggttcgagtttttgttgaaaagggtgatccatcattaattgatggagaattccttgacaagtttgacattgttgtacttagccgtgcatctcttaaaacaaagaaaaagcctggaggagcaactgaacaacaggagttgacatattctagccttcaggaagctatctctgtgccttggaatagtctaccgaagaagacggcaaaattatactttgctatgagagtactggaggattatgaattatctgaagggcgcagccctggcgaaacaacactttctgatatagatgcagttctggctcggaggaaggatatgtgtgataaaatgtctttgaatgagtctcgtattcctactactctcgtggaacgactgctagcagctggaaagaaggagcatcctcctgtatgtgctatccttggtggtattcttggtcaggaggtgatcaaatcgatatcctgcaagggcgatccagtcaagaatttcttctatttcgatgtggctgacggtaaaggtgtcatcgaggatatcccaccaccaccacctgcaaaataaagcactcagctgcgtaactctcgactcgacttggttcactaatcgttttctgtacccactcagcttcgaacatgtagtagcaacttttagatctagagccatgtgaaaaaaggcaggtttgactttaacccagatgtttagggatttttcgagcagcaaactgtgacagtatgtatgcattgacaatttaaagctgaagtctggaccggtttccatgcttttgggggcggatttcctttgtcgtccctttacccatttgtcaaatttggtagcggtggttgtggggaggggggaatgaagtgagaaggctatgtttataactgtgaaccgacggttgcagctatacatatcgtcatgcctgtgtactcatgtggcatgtttcatgcttgattacaatgcctgttgcttgaatggctccctgcatatgcgtgtcgttgttgctcactgccagattgtttggtcgcattcgataacatagtttcactggtgccagacgaggaacagcaacggtgtgctgaacttgaagaggctgggatgcagttttgggcgaaagtagttgaattatgaaagaacttgttagttctctagccggcaaggttggtgttatcgagatggtgcaactgaatttggacagaacttaccctagtagccatccgaagcagctgtctggaggtgatttctgaccagagactaccccagtgcagttcagatatcagtttctttgctgtagatgcgtcatttctcccggtcagattgtggtctgtctgtgccatgggatctgatccatctgtagattctgtagtatggtgttcctgagaaaaggatcgattagaagcaggaagatccagaccttgtgtagtcatattcgtcatcagttggtgaaggttcactgaactggacatgaaagaaaggcgcttgccgtatgatctgtgatcgcccagcatattggacatgaaagaaaggctgcaggcaagagaaacacgcactaaaaaacatttaagcttcacacatgtcgaaaactatatatgaagttgtacgatgcggccccaggaaaaggataaagtatcaagcaaaatcgcagtgacgtgaagatttat

SEQ ID NO: 211571 - DNA, 1665 bp, Zea Mays
cctgcctagccagcgccatcgcccccacccgatgacccccccgttgccggtgaaccagccacaaccccatctcaaggacgacgacaaggaagcagatgtcgccactgccaaaactaatgggtctaaggcggatcctcatcccacccatctcgcctgctcctcgccagatcgtcaaccacatgattgcttgtgctgctgctgcttgcaggtgggctctgacggtccggtaactgcttgtgattgcaaacacaaccaaacttgttagtatttcgacccttggtggatgaatggggcctgcattaggtcactcatggacattggtaatatcttgcccgttaggtggcgttaacacattgtgttgatgaacctgaagacatacgaagtgctcgaaagggtgttataaacatgttcagacttcagagtgtaaaattgtagatttttggggggtaatatcattttctcctggcaagatgtggctacgataatctaaagccatcgcacggcaaattggccagcggcggcggcaggtggtggtgtgagcctgcgaggcttcctacctgcgctggaagtttaggtgcttgatggcgaggaagaagagaaagacgaagaggccaatgatggcaagatggaggcaggtcaccagcacaaagtagcgatcctgcaggcccaggtacccctctaggaactcacgcaccgtctgctccccgagccccggcaccaggatctgctccgtcctgtctgcgagctgtgagaacattagcccataaaccgtccatgccgccggatccgcccagtacacccaccgccaccacacaggcatcatctgcagcaaatttactcaactcgtcagccgattcagatggggggttacctctctcacgattatgaagccagagaagacgttccaaaagataaagatgaggaacgacagccccatggcgatctcgatgttgggggtcagggccaccgtcatcatcccgtatagagtgtagtacatgaagctcatcacctggtataggaagaaccagaagaatttgctcgctgtcacctggaacccaatcattgggtacacgattgatgagaagatcatcacttgcaccaacatgtaaggtgaacggggacgtccaatatccccagcgcaaccatggttggagatcatctgtttcagtttgcagaattggttaacaacttgttgcacaaacttttagtaaagattgtatgtcttgtactcatgcatgtttcatggtgtatgctaagctacattcatctaaccttttgatatgacgaatcctccaagtatgtagattgcaataagagctgcagtccctagcatgttggccatcacttgcgtccttcctatggccgctaagaagcgatacaagcccattgacatttgatgcatggcaaaaagtaccagaaagtgctggatgaacctgccataagcaatgtaatttcatttcttgcttttacctattgaagctgaagcatcagaagtcattcagcatgtaagtaccaggagatgagtacctgatagcagaaggtgcatatccaatcacatagtaggttaagcctgtccaaaggcctgtctcaacaagcgatattgggatgctaataaggaaaagtgtggagatcaccaaagccataacagttatctgaatggtcttg

SEQ ID NO: 211572 - DNA, 519 bp, Zea Mays
ggcttttgatgaccgttcccaacttcccattgctaatgttgtatcattttcacttggaccaacaactgatgtatcttgtttcccttccaacagggtggataaggacgattcacgctgcttcaattgtggttcttatagccatgctatgaaggattgcccaaagcctcgggacaatgttgcaattagcaatgcacgaaaacagcataatttgaaaagaaaccaatctaatgttaaccgtgtacaaaaccgatactaccagaaaacgcccggcaaatttgatgatttgaaagctggagtactgggacctgaaactagacagtgcttggggatcggggagaatgatcctcctccttggctgcacagaatgcgtgagttaggctatcctccgggctacctagggactaaggtgctgtttggtttagtacttgaagtggtaacgggaatggagtgggctaccgccgctatctgatacattgtttggttaatgtggaaaacgtgatcaactccgtttacagcgtt

SEQ ID NO: 211573 - DNA, 490 bp, Zea Mays
cgtagcatatcgcccgcagctgcccctgcccgccacgatgccgccgcccctgcagcctccactgttgctgcgccttcacctcctcttccgctctgaaacccaaattcctttactccggcgacgacccagctgcgacgcgccccattgccggaccaggagggttggaggcggcggcagtgggcttcgtcaccggtaagaggaaggccaccgaggtagcccaagcgtaggttctggagaaatattgttcagaaaggggatacggtggtcgatgccacatgcggccatgcgggaatgacaatgacacgctcgctctgcttaagatggtggctgacaaaacaggccgtggatgtgtttatgggatggacattcaagaatctgcgatagagaatacttcctcttttctgaaaatggccgtggatgatgaacatcatgtcagggactggtaaaactatttcctatatggtcatagtagaatggaagagattgttcc

SEQ ID NO: 211574 - DNA, 1153 bp, Zea Mays
atgccgccgcccctgcagcctccactgttgctgcgccttcacctcctcttccgctctgaaacccaaattcctttactccggcgacgacccagctgcgacgcgccccattgccggaccaggaggtatatatccgttcgcgcctccgctgcacagctcgccgccgcggacgtctcgacggcgcagcagcttgaacttgggttggaggcggcggcagtgggcttcgtcaccggttctggagaaatattgttcagaaaggggatacggtggtcgatgccacatgcggccatgcgggaatgacaatgacacgctcgctctgcttaagatggtggctgacaaaacaggccgtggatgtgtttatgggatggacattcaagaatctgcgatagagaatacttcctcttttctgaaaatggccgtggatgatgaacatcatgtgtgggtttgaactatgaagcttttacctaatttcccctgaagaatgaaatagaaaggagacacttatgaattctgatttgacattattatttactattcagatacagaggatacttgtcatcttctcactgaatatttgatatatctgtacctgtcattgtatttgttttatgtggcagcagggactggtaaaactatttcctatatggtcatagtagaatggaagagattgttcccaaagacgctcctgtcaggtgatcaaggccttcctataagttcgttgctgtttgaaaattccaactcaattggtactataattcaacaaaacagtttcctggaaaagtggaaatgccagttcaagtagtgttaataataatcctagacttgctgattcactgtaacacattcattctaggcttgtttctttcaattttcaacttggtctaccttccaggaggagataaaactgtaatcacagtgcctagaacaactgagttagcattgcaagctgccagcagaattctcagttctgggggactcataaagtcataagtgttcttgtatacattgggcatccaggtggaaggtaaacaccagttgcaaacattgtagtctacccatctagaaaagaatgcaattgtagcataatgtctagttaaatcatcgtaagtttgactaactatgtataaaagcatgggcttattaattttcttctctc

SEQ ID NO: 211575 - DNA, 1811 bp, Zea Mays
ctgactatagcctgaacgctactcatgcgcgtgcacggtgcacctgaagaaacgagccatttaccgcgcggacaagcaagcaaactgcccagaagaacggctctccacttcacacctgtttgctgtttttcatctcccgttcacctcgcgtgccgcatgcgcgacaactagagcgaccgccgccgctctacgcccagctgcccatgtcttcgtcgggcccttcgccggcgacgggaacccaccacaccaggtcaacaccgttgcaagtaattcatgttttgggaaacttcatgagaatttggtctgtttactccttgtatagctacctatccaacagtggagattcaatagttggctttatcttcagttgtcttgtacccacttcagtcatattcttggtcttacagaagccttggaaaggccgacctttgcccaactcacaggttgttcctacagttgtcaatggaggaatcctggcattctactttgtattatggggtaaaggacttcttgcttgtggtccactagttgctctactggcagagtatgcaggtgctgttcttggagttctctctgctgctttatatggaaggaaatctaacatctggaaaaagattggtggacttgctgctatgttggcagcatattatctcttgtcaaatggatggtctacaagaacccattctcctctatatagctttggaagtgaaccagtggagaaggcagcacaaactattggagtgaaagcaatgatggtgccaattactgctgggatcttgtctgctttaaggagagtattagctcggcgtgtttctctcaagaatcaacttaaaaggcggctccatgctataactattgcttctgctacttgtttcctttttccgtttgccatgtgggatacgatcctaggttcggcatctgacagcattgttaaattacaactaccaagttgggcatactttagtactgttttatttggaatggtgcttatattctatgttgacaatgttgctgaagaaaagttgcatctggtcttctcttctccaaggcacttaatggtctcaacaggttgcatcatcgtgttggaaacagtgtaccaaatggatttctcccttttaggatttctggtctgttctgttattttgggattcggtatttctgaagcaacctccttggaacgctcaaagaaaagccctttagagacccatgaactatcgaatggggtgttccacaatcaattgcctatttcagaacttccaagctgaagaatatatgacctaggttgagatcggtgaaagttaatattacacaacacgtttcaagagtggactgttacggtttgagtagtaacgaagaatattaaagctacgacgttgtgaatggctgcggttgcacacctcaagctcaatggttcgattctttgcgtgaaggttttaacgagacagaaaacacggatgtttttgacctgccaatgcccaatgtgtctttgtaatcctccattattgttggccacctgcatcctgtacatgtgaacaactcaagtagatgtgtatccgtattccccttgcagatattgcaattgtcacagcatcctgtttaactgcttgggtagtttcgaaaatttgtttttctcacttggagacgcagatggttcaagctgttaacagaagtgcactgattgttctttttcagaggctgaaacctgtatgtaacccgtccatgatatgattaacaagctgactttatctttgacctattcgtgaatgcaatcagcgagtctcctgcatgctgcagcgccactcatgtcagtc

SEQ ID NO: 211576 - DNA, 2385 bp, Zea Mays
gcctgaacgctactcatgcgcgtgcacggtgcacctgaagaaacgagccatttaccgcgcggacaagcaagcaaactgcccagaagaacggctctccacttcacacctgtttgctgtttttcatctcccgttcacctcgcgtgccgcatgcgcgacaactagagcgaccgccgccgctctacgcccagctgcccatgtcttcgtcgggcccttcgccggcgacgggaacccaccacaccaggtcaacaccgttgcaagtaattcatgttttgggaaacttcatgagaatttggtctgtttactccttgtatagctacctatccaacagtggagattcaatagttggctttatcttcagttgtcttgtacccacttcagtcatattcttggtcttacagaagccttggaaaggccgacctttgcccaactcacaggttgttcctacagttgtcaatggaggaatcctggcattctactttgtattatggggtaaaggacttcttgcttgtggtccactagttgctctactggcagagtatgcaggtgctgttcttggagttctctctgctgctttatatggaaggaaatctaacatctggaaaaagattggtggacttgctgctatgttggcagcatattatctcttgtcaaatggatggtctacaagaacccattctcctctatatagctttggaagtgaaccagtggagaaggcagcacaaactattggagtgaaagcaatgatggtgccaattactgctgggatcttgtctgctttaaggagagtattagctcggcgtgtttctctcaagaatcaacttaaaaggcggctccatgctataactattgcttctgctacttgtttcctttttccgtttgccatgtgggatacgatcctaggttcggcatctgacagcattgttaaattacaactaccaagttgggcatactttagtactgttttatttggaatggtgcttatattctatgttgacaatgttgctgaagaaaaatcgcaaagtgaaccttgagcacttgttttgttatcatcggttaggctgtctctagcggccttacctatcctacatcctatctcaaactccgctttgtaaacagtgtggtctgtaatgcaaaacaatgttttgcacggtcatatgcacgatctactgggcacaacctatcagtgaacgagcctgtagctgagctggttaggtggctcttcccgaatttcatattagagttaaaaaaagatccccttgtggctcgtatgtcccacgccaccaaagtacaggtctggcctaggtcatggttgttatcatatgagctatggtgccgttgtgtaggagcagtacagtctcgaggtttttttttgacagccttcttagcaagatgcctgggggctgtcttacctcccgtatatcaagtttttttttgcagtccgagccaaatcttcagtatattatagatttgaaattatttctcaaatatcttcatgtataacaatattagacaatacttttgggtgcttcttgaagtatttttattggcttttatactatgaaatatgaatcctaactcataagtcataagacatgaatggcctccctttagttaactgtcaattgtgcttcgtggttaaccttcgctccgtgtttgtaatgcgtttacttggttggcaggttgcatctggtcttctcttctccaaggcacttaatggtctcaacaggttgcatcatcgtgttggaaacagtgtaccaaatggatttctcccttttaggatttctggtctgttctgttattttgggattcggtatttctgaagcaacctccttggaacgctcaaagaaaagccctttagagacccatgaactatcgaatggggtgttccacaatcaattgcctatttcagaacttccaagctgaagaatatatgacctagctacgacgttgtgaatggctgcggttgcacacctcaagctcaatggttcgattctttgcgtgaaggttttaacgagacagaaaacacggatgtttttgacctgccaatgcccaatgtgtctttgtaatcctccattattgttggccacctgcatcctgtacatgtgaacaactcaagtagatgtgtatccgtattccccttgcagatattgcaattgtcacagcatcctgtttaactgcttgggtagtttcgaaaatttgtttttctcacttggagacgcagatggttcaagctgttaacagaagtgcactgattgttctttttcagaggctgaaacctgtatgtaacccgtccatgatatgattaacaagctgactttatctttgacctattcgtgaatgcaatcagcgagtctcctgcatgctgcagcgccactcatgtcagtc

SEQ ID NO: 211577 - DNA, 1705 bp, Zea Mays
gcctgaacgctactcatgcgcgtgcacggtgcacctgaagaaacgagccatttaccgcgcggacaagcaagcaaactgcccagaagaacggctctccacttcacacctgtttgctgtttttcatctcccgttcacctcgcgtgccgcatgcgcgacaactagagcgaccgccgccgctctacgcccagctgcccatgtcttcgtcgggcccttcgccggcgacgggaacccaccacaccaggtcaacaccgttgcaagtaattcatgttttgggaaacttcatgagaatttggtctgtttactccttgtatagctacctatccaacagtggagattcaatagttggctttatcttcagttgtcttgtacccacttcagtcatattcttggtcttacagaagccttggaaaggccgacctttgcccaactcacagttgtcaatggaggaatcctggcattctactttgtattatggggtaaaggacttcttgcttgtggtccactagttgctctactggcagagtatgcaggtgctgttcttggagttctctctgctgctttatatggaaggaaatctaacatctggaaaaagattggtggacttgctgctatgttggcagcatattatctcttgtcaaatggatggtctacaagaacccattctcctctatatagctttggaagtgaaccagtggagaaggcagcacaaactattggagtgaaagcaatgatggtgccaattactgctgggatcttgtctgctttaaggagagtattagctcggcgtgtttctctcaagaatcaacttaaaaggcggctccatgctataactattgcttctgctacttgtttcctttttccgtttgccatgtgggatacgatcctaggttcggcatctgacagcattgttaaattacaactaccaagttgggcatactttagtactgttttatttggaatggtgcttatattctatgttgacaatgttgctgaagaaaagttgcatctggtcttctcttctccaaggcacttaatggtctcaacaggttgcatcatcgtgttggaaacagtgtaccaaatggatttctcccttttaggatttctggtctgttctgttattttgggattcggtatttctgaagcaacctccttggaacgctcaaagaaaagccctttagagacccatgaactatcgaatggggtgttccacaatcaattgcctatttcagaacttccaagctgaagaatatatgacctagctacgacgttgtgaatggctgcggttgcacacctcaagctcaatggttcgattctttgcgtgaaggttttaacgagacagaaaacacggatgtttttgacctgccaatgcccaatgtgtctttgtaatcctccattattgttggccacctgcatcctgtacatgtgaacaactcaagtagatgtgtatccgtattccccttgcagatattgcaattgtcacagcatcctgtttaactgcttgggtagtttcgaaaatttgtttttctcacttggagacgcagatggttcaagctgttaacagaagtgcactgattgttctttttcagaggctgaaacctgtatgtaacccgtccatgatatgattaacaagctgactttatctttgacctattcgtgaatgcaatcagcgagtctcctgcatgctgcagcgccactcatgtcagtc

SEQ ID NO: 211578 - DNA, 1687 bp, Zea Mays
gcctgaacgctactcatgcgcgtgcacggtgcacctgaagaaacgagccatttaccgcgcggacaagcaagcaaactgcccagaagaacggctctccacttcacacctgtttgctgtttttcatctcccgttcacctcgcgtgccgcatgcgcgacaactagagcgaccgccgccgctctacgcccagctgcccatgtcttcgtcgggcccttcgccggcgacgggaacccaccacaccaggtcaacaccgttgcaagtaattcatgttttgggaaacttcatgagaatttggtctgtttactccttgtatagctacctatccaacagtggagattcaatagttggctttatcttcagttgtcttgtacccacttcagtcatattcttggtcttacagaagccttggaaaggccgacctttgcccaactcacaggttgttcctacagttgtcaatggaggaatcctggcattctactttgtattatgggtgctctactggcagagtatgcaggtgctgttcttggagttctctctgctgctttatatggaaggaaatctaacatctggaaaaagattggtggacttgctgctatgttggcagcatattatctcttgtcaaatggatggtctacaagaacccattctcctctatatagctttggaagtgaaccagtggagaaggcagcacaaactattggagtgaaagcaatgatggtgccaattactgctgggatcttgtctgctttaaggagagtattagctcggcgtgtttctctcaagaatcaacttaaaaggcggctccatgctataactattgcttctgctacttgtttcctttttccgtttgccatgtgggatacgatcctaggttcggcatctgacagcattgttaaattacaactaccaagttgggcatactttagtactgttttatttggaatggtgcttatattctatgttgacaatgttgctgaagaaaagttgcatctggtcttctcttctccaaggcacttaatggtctcaacaggttgcatcatcgtgttggaaacagtgtaccaaatggatttctcccttttaggatttctggtctgttctgttattttgggattcggtatttctgaagcaacctccttggaacgctcaaagaaaagccctttagagacccatgaactatcgaatggggtgttccacaatcaattgcctatttcagaacttccaagctgaagaatatatgacctagctacgacgttgtgaatggctgcggttgcacacctcaagctcaatggttcgattctttgcgtgaaggttttaacgagacagaaaacacggatgtttttgacctgccaatgcccaatgtgtctttgtaatcctccattattgttggccacctgcatcctgtacatgtgaacaactcaagtagatgtgtatccgtattccccttgcagatattgcaattgtcacagcatcctgtttaactgcttgggtagtttcgaaaatttgtttttctcacttggagacgcagatggttcaagctgttaacagaagtgcactgattgttctttttcagaggctgaaacctgtatgtaacccgtccatgatatgattaacaagctgactttatctttgacctattcgtgaatgcaatcagcgagtctcctgcatgctgcagcgccactcatgtcagtc

SEQ ID NO: 211579 - DNA, 1967 bp, Zea Mays
atctaatcaaaagggtcaacaccgttgcaagtaattcatgttttgggaaacttcatgagaatttggtctgtttactccttgtatagctacctatccaacagtggagattcaatagttggctttatcttcagttgtcttgtacccacttcagtcatattcttggtcttacagaagccttggaaaggccgacctttgcccaactcacaggttgttcctacagttgtcaatggaggaatcctggcattctactttgtattatggggtaaaggacttcttgcttgtggtccactagtgtaagtatcttgttctatcaggaccatggatttttcacatagctgcatggtctgtagtgtgtggtgcggtgcatttatgccagggaatatctagttcaatctccacctatgtgcaatgtttaaagaatgctgcgagccagtgatatcagatcattgtggaaacaaattacacttcatggacatcaaccgtaggacatttgtatgtcgtccttacctgttgatctaatgcatgatatgatgatagtcattctgacttgagagctgcacacatgaatttgcatgattgcatttggggatggggagttgcacttactctcctcgggttgtgcagtatgattctgaacacttcaacagaaaaacagcatttcattaccattaaccacatcattggtatattttgcactgctttgagcatactaaagaagcatttactggcacttctatctaaactcatttttgctgtctatcgagtctagtgctctactggcagagtatgcaggtgctgttcttggagttctctctgctgctttatatggaaggaaatctaacatctggaaaaagattggtggacttgctgctatgttggcagcatattatctcttgtcaaatggatggtctacaagaacccattctcctctatatagctttggaagtgaaccagtggagaaggcagcacaaactattggagtgaaagcaatgatggtgccaattactgctgggatcttgtctgctttaaggagagtattagctcggcgtgtttctctcaagaatcaacttaaaaggcggctccatgctataactattgcttctgctacttgtttcctttttccgtttgccatgtgggatacgatcctaggttcggcatctgacagcattgttaaattacaactaccaagttgggcatactttagtactgttttatttggaatggtgcttatattctatgttgacaatgttgctgaagaaaagttgcatctggtcttctcttctccaaggcacttaatggtctcaacaggttgcatcatcgtgttggaaacagtgtaccaaatggatttctcccttttaggatttctggtctgttctgttattttgggattcggtatttctgaagcaacctccttggaacgctcaaagaaaagccctttagagacccatgaactatcgaatggggtgttccacaatcaattgcctatttcagaacttccaagctgaagaatatatgacctagctacgacgttgtgaatggctgcggttgcacacctcaagctcaatggttcgattctttgcgtgaaggttttaacgagacagaaaacacggatgtttttgacctgccaatgcccaatgtgtctttgtaatcctccattattgttggccacctgcatcctgtacatgtgaacaactcaagtagatgtgtatccgtattccccttgcagatattgcaattgtcacagcatcctgtttaactgcttgggtagtttcgaaaatttgtttttctcacttggagacgcagatggttcaagctgttaacagaagtgcactgattgttctttttcagaggctgaaacctgtatgtaacccgtccatgatatgattaacaagctgactttatctttgacctattcgtgaatgcaatcagcgagtctcctgcatgctgcagcgccactcatgtcagtc

SEQ ID NO: 211580 - DNA, 2058 bp, Zea Mays
gtaatttccatgtcctacactgtcaacaccgttgcaagtaattcatgttttgggaaacttcatgagaatttggtctgtttactccttgtatagctacctatccaacagtggagattcaatagttggctttatcttcagttgtcttgtacccacttcagtcatattcttggtcttacagaagccttggaaaggccgacctttgcccaactcacaggttgttcctacagttgtcaatggaggaatcctggcattctactttgtattatggggtaaaggacttcttgcttgtggtccactagtgtaagtatcttgttctatcaggaccatggatttttcacatagctgcatggtctgtagtgtgtggtgcggtgcatttatgccagggaatatctagttcaatctccacctatgtgcaatgtttaaagaatgctgcgagccagtgatatcagatcattgtggaaacaaattacacttcatggacatcaaccgtaggacatttgtatgtcgtccttacctgttgatctaatgcatgatatgatgatagtcattctgacttgagagctgcacacatgaatttgcatgattgcatttggggatggggagttgcacttactctcctcgggttgtgcagtatgattctgaacacttcaacagaaaaacagcatttcattaccattaaccacatcattggtatattttgcactgctttgagcatactaaagaagcatttactggcacttctatctaaactcatttttgctgtctatcgagtctagtgctctactggcagagtatgcaggtgctgttcttggagttctctctgctgctttatatggaaggaaatctaacatctggaaaaagattggtggacttgctgctatgttggcagcatattatctcttgtcaaatggatggtctacaagaacccattctcctctatatagctttggaagtgaaccagtggagaaggcagcacaaactattggagtgaaagcaatgatggtgccaattactgctgggatcttgtctgctttaaggagagtattagctcggcgtgtttctctcaagaatcaacttaaaaggcggctccatgctataactattgcttctgctacttgtttcctttttccgtttgccatgtgggatacgatcctaggttcggcatctgacagcattgttaaattacaactaccaagttgggcatactttagtactgttttatttggaatggtgcttatattctatgttgacaatgttgctgaagaaaagttgcatctggtcttctcttctccaaggcacttaatggtctcaacaggttgcatcatcgtgttggaaacagtgtaccaaatggatttctcccttttaggatttctggtctgttctgttattttgggattcggtatttctgaagcaacctccttggaacgctcaaagaaaagccctttagagacccatgaactatcgaatggggtgttccacaatcaattgcctatttcagaacttccaagctgaagaatatatgacctaggttgagatcggtgaaagttaatattacacaacacgtttcaagagtggactgttacggtttgagtagtaacgaagaatattaaagctacgacgttgtgaatggctgcggttgcacacctcaagctcaatggttcgattctttgcgtgaaggttttaacgagacagaaaacacggatgtttttgacctgccaatgcccaatgtgtctttgtaatcctccattattgttggccacctgcatcctgtacatgtgaacaactcaagtagatgtgtatccgtattccccttgcagatattgcaattgtcacagcatcctgtttaactgcttgggtagtttcgaaaatttgtttttctcacttggagacgcagatggttcaagctgttaacagaagtgcactgattgttctttttcagaggctgaaacctgtatgtaacccgtccatgatatgattaacaagctgactttatctttgacctattcgtgaatgcaatcagcgagtctcctgcatgctgcagcgccactcatgtcagtc

SEQ ID NO: 211581 - DNA, 1801 bp, Zea Mays
cgcggactcgtcggtccgcaaaataccgtagacgcccggcccggccgcccgcacctgcccccgctcagcgtggcggctggcgtccccatcccactcgtcgcccatctgccgtgacgtctctcctctctccagcggttcccatctactacttaactcgcaggccgcggccgcctagaccttcctctcacttcgcgggtacgcagagtcgctagacgcacctcgctcgcaacttgttggactcgaaggggcaatagacagcaggcagggccccgaactgcgggaggagattcccaaggatctcgtcggccgggtagaggaagggacggggacgggcgatggcggcggacggcggcggcggggtggactgggagagcctggcggaggccacctccggggcaatcggctcgctcgtcagcaccaccgtgctctacccgctcgacacctgcaagaccaagttccaggccgagctccagacgcaccagggcgctcagaagtataggaacctttcagatgtcttttgggaagcgattcgtaaaaagcaatttttgtccctatatcagggcctgaacacgaagaacattcagtcttttgtctcctcgtttttttatttttatgggtatagctattttaaaagactctacttggagaagagtggagcaaagtctattggaacaacagccaacttgttagttgctgctgctgctggtgcttgtactgttatcgtgacacagccattagatacagcagcttctaggatgcagacaagtgtctttggaaagtctaaagggctgagagaaactcttgcagaagtacaccgcgtttgatcagttcaagcaaaggatacttcataggcagcggcgcaaaaatgcaggatcagcggaggataattccggagttgctctttctgctttctcagcttttctgcttggcgccgtctctaaaagtattgctacagtattgacttatccattaatcagatgcaaggtgatgattcaggctgcagaccctgatgaggatgatgacgatgaacctggaaggccaagcaaatcaagaacaccaaaaacaatgctaggtgccttgcatgctatctggagcaaggaaggcattccaggcttcttcaaaggcttgaatgctcagatccttaaaacagttctgagctccgccttgctgctgatgattaaggagaagatctcgaagttcacttgggtctcactgcttgccctgcggcggtatcttttcgtttctcagaagaggatcaagagtgcaactgtataaatacgttagctccaaaacacaaactagcacacatagcgacatggtgcttctggagatgttatgccaaggaataaatctgaggaataatcagcagaaatacttaaccaagagagagagaataaggtgtgtatctggggtcgatagcatcagagggctcttcaataagtttgtccatttcttttttttctctctctctctgaatctcttgtagctagtgacgtagatgttgcgcggatctgaaactggactgtacttttagcgtttgttgcctgtaattaggggtgataatgggctctgaattttacagtataatatttaaggttcggattatgattgggtcctgtttctattcatttttaattaaattttatttaggactctaagaaattgtgaaaaacatttagagcgtgatctattatcatccctacctgtaacgtgtaaaatagcagcgtgttaatattccctttaaaaaaggtaatcgatcggcagtgtgatgtaagatgtgttgtcgatcgttcccttttgc

SEQ ID NO: 211582 - DNA, 1651 bp, Zea Mays
cgcgtacgacgtaatgcaggagcaggacgtggacgatggcggcggcaggacgacccagcagcaggagaagtcgatcgacgactggctccctatcaactcctccaggaaggccaagtggtggtactccgccttccacaatgtcaccgccatggtcggcgccggcgtgctcggcctcccctacgccatgtccgagcttggctggggccctggcatcgcggtgatgatcctgtcgtggataatcaccctatacacgctatggcagatggtggagatgcacgagatggtgcctgggaagcggttcgaccggtaccacgagctcgggcagcacgtcttcggcgacaggctgggcctctggatcgtggtggcgcagcagctggcagtagaggtgagcctgaacatcatctacatggtcaccggcggccagtccctcaagaagttccacgacgtcatctgcgacggcggcaggtgcggcggcgacttgaagctctcctacttcatcatgatcttcgcctccgtccacctggtcctctcccagctccccaacttcaactccatctccgccgtgtcgctcgccgccgccgtcatgtcgctcagttactccaccattgcgtggggcgcgtcgctgcacagagggaggagagaggacgtggactaccacctgcgcgccacgaccaccccagggaaggtgttcggcttcctgggaggcctaggggacgtggcgttcgcctactcggggcacaacgtggtgctggagatccaggccaccatcccgtccacgccggacaagccgtccaagaaggccatgtggaagggcgcctttgtcgcctacgtcgtcgtcgccatctgctacttccccgtcacgttcgtcgggtactgggccttcggcagcggcgtcgacgagaacatcctcatcacgctctccaagcccaagtggctcattgccctcgccaacatgatggtcgtcgtccatgtcattggcagttaccaggtttatgccatgccggtgtttgacatgatagagacggtgctggtcaagaaaatgaggttcgctccgagcctcacgctccgtcttattgcccggagcgtctatgttgcgttcacaatgtttctaggcatcactttccccttcttcggtggattgctcagtttcttcggcggattagccttcgcaccgacaacttattttcttccctgcatcatgtggctcaaggtttacaagcccaaacggttcggcctttcatggttcatcaactggatctgcatcgttattggagtgctgctgttgattctgggtccgataggagggctccggcagatcattttgtcagccaccacatacaaattctaccagtaaaatcgatcaactggagtcgtatggcgtggctgttttgttagcattacatttcttagggtggattggcttttaatgtacacgagcgagtgagattgatgctagtagctcctaggagtatatatatttctatcatccacagagcttaatgtatcttgtagttgggacattaaaagagcaagtaggctttactcggtgatctttcgtttcacaacgttgtttagcactctttattgttttgtgtggctcgcgcgggaccaacactattagggtcgttcgttacttcaggaacggaggcat

SEQ ID NO: 211583 - DNA, 982 bp, Zea Mays
catctcaatgtttcattcattaaacttcgcgagaacatgggaggagcagtagagcagcacaggacgtagatgtacggtagccggccggcgcccatggattcaagctcacagcccgccgcaattgatggatcgagagggagcggaggaggagagagaaacaaaagggaggaggaggacgacgacgaggcggcggcggaggccggcaacggcagacagctggtgatgcccgaggacgggtacgagtggaagaagtacggccagaagttcatcaagaacatccagaaaatgaggagctacttccggtgccggcacaggctgtgcggcgccaagaagaaggtggagtggcacccgcgcgaccccggcggcgacctccgcatcgtctacgacggcgcgcaccagcacgggcccccgccgctggcggctcctcccggcggccacggccagatgcagggcggcggcgcctccgactccaacagatacgagctgtgcacccagtacttcggcggggcccggtcgcgctgacgacctggcgggccagctagctagcgtcgggggtggcatggcagctgacaagaaaggccggccggcgggcggcggcgtggcgtcccgtcgcgtcacgctcacgcccgcatcacctcctgcccctgctggctgctggcctgctgcagcaccgatcgctttcgctgcgcaccggagggcagcggcagcggcagcggctggctggtgctgccggtggcggttgacttgacgccttgcgccggcgcaaccgacgtgatgttgagtgcggattaattggtgctgcaccggtcaacgctgtggtctactactagtgtactacactattacgacgacgattgaaaagcaccagtgagtaccgaggcactccttccagaattatataattcagcttatagatataagcatctaatgacctgcttataaattatcataatctagatatctagattatattatttgtttg

SEQ ID NO: 211584 - DNA, 2387 bp, Zea Mays
cttttattcccattacaacgtgcgcacaaaaagtggcaccaaaactttgaacggtggccatgctggagcgcttccctgtggccaactggccaatggaggagaaatatgaaccaaccaatgacaagtcggacccactggattgacagcctctgacgccgaaaaagccacagatcggatcgcggcgggcagaggccacctccggattcgggcgctcggcgtagccgcgcagtggtgtgtctgcctccctccttgtatcctcctcgaattcgagcggcggcgacggcgggaagggagatggaggcggttagaggcgatgggaggtggtgcgtggtgactggcggccgcgggttcgccgcgaggcatctggtgacgatgctgctccgctccggcgagtggcgggtgcgcgtggccgacctgggccctgccatcacgctcgaccgcgacgaagaagagggtttcctgggtgctgctctccgcgaaggccaggccgtctacgtgtccgccgacctccgtgacaaggcccaggtcgccagagcttttgaaggggcagaagtagttttccatatggctgctccagattcatccatcaacaacttccaccttcattatggagtcaatgtcgatggaacaaagaatgttattgacacttgtatccgttgcaaggtgaagagactcatctatactagttcacctagtgtcgtgtttgatggagttcatggaatttttaatgcagatgaatcaatgccttacccagataagtttaatgattcatattcagaaacgaaagcggatgcagaaaagcttgtgatgagagctaatggtagggaagggcttcttacatgctgtatacgcccaagtagcatttttggccctggtgataagctaatggttccatctttggttgctgctgcaagggcagggaagtccaaatacattattggtgatgggaacaactactatgatttcacctacgtggaaaatgtggcatatggccatgtttgtgcggagaaaactctatcatctgaagatggtgcaaagatagccgctggaaaaacctatttcataacaaatatggagcctataaaattctgggagttcatgtcattgattttagaaggtcttggatatgaaaggccttcagtaaaaataccagtctctgttatgatgccggtggctcatgttgtagaatggacttaccagaaatttgccaagtatggaatgaaagttcctcagctgaccccttcaaggatcaggctgctttcatgtaacaggacattcagttgctcaagagcaaaggagcagcttggttatgaacctctcgtgtcccttaaggatggagtgaagagaacagtagagtcgtactcccatctacaagctcagaatcataggagtatatcaaaggcttcaattttcctcgggaatggaaatcttgcaaaaacagtactttgggaagatgcgaagcaaactgtgacagtgcttctactgttggctgttatctactaccacttatttacatgtggttcggtcacaaggttgagaaactcgaggcctctaattttcacatcacccaggcacaggctcatcatattgctaattccattagttcgaattggaactctttagtcagtgcgctaagatctctttgtagaggaaatgattggctattgtttctcaaggcatgctaagccctgcttctgtctgatactttcattagattagaatttttgttacatgctttacaagtcaatttccaaatgccatgtgaagcattagtcattgttcgtatactttttatgttaaaacatcattgtccgtttttgctaggtttcactatctctgctggttgtcagcatccttagttccatgtcttctcaggctgcatttaaaataggtactgctctggttttcacaggcttcaaagcgtatgagaaatgggaggacagcattgatagtatggtgggcgacgcctgtaccattcttctgcactttggttctgccaaggaatcatctagctagaaacaaacgtaggtgtagcttgcagactgccagttactttgtttactgatattatcttcagctccagctgtttctgggtttcgttgacctaaattttcttctgtattcatctgatggtgttgtagaattgcctagcggcacatatgcaagttttggactcttttcctcttgatagttgatgtacaatatgaaattgtacattttccccctttcccctcggagtggttctcttcccatcaacggtgacaataggctctagtaaagatcgaattggattatgattggactctatttctattcatttttgaactaaaatttatttagagtccaaagaaattgtgaagaaacatttggatcgcgatccattacca

SEQ ID NO: 211585 - DNA, 2119 bp, Zea Mays
cttttattcccattacaacgtgcgcacaaaaagtggcaccaaaactttgaacggtggccatgctggagcgcttccctgtggccaactggccaatggaggagaaatatgaaccaaccaatgacaagtcggacccactggattgacagcctctgacgccgaaaaagccacagatcggatcgcggcgggcagaggccacctccggattcgggcgctcggcgtagccgcgcagtggtgtgtctgcctccctccttgtatcctcctcgaattcgagcggcggcgacggcgggaagggagatggaggcggttagaggcgatgggaggtggtgcgtggtgactggcggccgcgggttcgccgcgaggcatctggtgacgatgctgctccgctccggcgagtggcgggtgcgcgtggccgacctgggccctgccatcacgctcgaccgcgacgaagaagagggtttcctgggtgctgctctccgcgaaggccaggccgtctacgtgtccgccgacctccgtgacaaggcccaggtcgccagagcttttgaaggggcagaagtagttttccatatggctgctccagattcatccatcaacaacttccaccttcattatggagtcaatgtcgatggaacaaagaatgttattgacacttgtatccgttgcaaggtgaagagactcatctatactagttcacctagtgtcgtgtttgatggagttcatggaatttttaatgcagatgaatcaatgccttacccagataagtttaatgattcatattcagaaacgaaagcggatgcagaaaagcttgtgatgagagctaatggtagggaagggcttcttacatgctgtatacgcccaagtagcatttttggccctggtgataagctaatggttccatctttggttgctgctgcaagggcagggaagtccaaatacattattggtgatgggaacaactactatgatttcacctacgtggaaaatgtggcatatggccatgtttgtgcggagaaaactctatcatctgaagatggtgcaaagatagccgctggaaaaacctatttcataacaaatatggagcctataaaattctgggagttcatgtcattgattttagaaggtcttggatatgaaaggccttcagtaaaaataccagtctctgttatgatgccggtggctcatgttgtagaatggacttaccagaaatttgccaagtatggaatgaaagttcctcagctgaccccttcaaggatcaggctgctttcatgtaacaggacattcagttgctcaagagcaaaggagcagcttggttatgaacctctcgtgtcccttaaggatggagtgaagagaacagtagagtcgtactcccatctacaagctcagaatcataggagtatatcaaaggcttcaattttcctcgggaatggaaatcttgcaaaaacagtactttgggaagatgcgaagcaaactgtgacagtgcttctactgttggctgttatctactaccacttatttacatgtggttacaccttcatcacagcgatggcaaagcttttgtcactaactgctctgttcttattcattcatggcatgctgccatcaaatctgttcggtcacaaggttgagaaactcgaggcctctaattttcacatcacccaggcacaggctcatcatattgctaattccattagttcgaattggaactctttagtcagtgcgctaagatctctttgtagaggaaatgattggctattgtttctcaaggcttcaaagcgtatgagaaatgggaggacagcattgatagtatggtgggcgacgcctgtaccattcttctgcactttggttctgccaaggaatcatctagctagaaacaaacaattgcctagcggcacatatgcaagttttggactcttttcctcttgatagttgatgtacaatatgaaattgtacattttccccctttcccctcggagtggttctcttcccatcaacggtgacaataggctctagtaaagatcgaattggattatgattggactctatttctattcatttttgaactaaaatttatttagagtccaaagaaattgtgaagaaacatttggatcgcgatccattacca

SEQ ID NO: 211586 - DNA, 931 bp, Zea Mays
ggaccccccctctcctgcttctcttcctcgtagggcacctctggcgggttgttgcgctgcctgatatctccaccgcccacggcctcgccttgtcccaactacaaaagcgaacccaatccctcttgactcctctcatccgcctcgtctaaccaccaccacgagggagagttaaagtcgccagtacagaagagtgaaggggagagggttgctgggtccgattcggtgggctcatcgccgtcgggtccacgaattggtgcctaggagtctcgcgtgcttcggggacataatcgatggtctcgctgcggtgggttggtggctggagacctcagaattcgtcgtcatagtgcgagctcctccgcgtgtgcaccgtgcgccgtggccaggggtgtctgcgctgcaattgccaggcatacaagatgacgatggtatgaagactatctcatttccaaaaagctttgtgcagagcaactagtgcaatgcaagtgtttggtgcttttggttgatagaagctgctggatgcttttggtatttttgaaagatgcaagtcgtgcttctggttgatacttagaagttggtggttcaaaactgaaaaacctgtcaggctgtcacttgcttttggtttcttgtcaaactgctgggcgcctgaacactgctgtgcaccgtacgtcaggctgtcctcatgcatctgttaacagatcttttgtcctctgctgcttagactgctttatgaaatttgaaatgtgatgagacttatgccttatggtgactggtgatagcttattagattagagtatcatacttttggtcatggtcttatggaatatggaatgtgatgggatcattggaccgcatggtatgggtcatggatgtgtaaataaattataatttcattatttcatctctcgtctattaagtattaacagtttattac

SEQ ID NO: 211587 - DNA, 882 bp, Zea Mays
ccccccctctcctgcttctcttcctcgtagggcacctctggcgggttgttgcgctgcctgatatctccaccgcccacggcctcgccttgtcccaactacaaaagcgaacccaatccctcttgactcctctcatccgcctcgtctaaccaccaccacgagggagagttaaagtcgccagtacagaagagtgaaggggagagggttgctgggtccgattcggtgggctcatcgccgtcgggtccacgaattggtgcctaggagtctcgcgtgcttcggggacataatcgatggtctcgctgcggtgggttggtggctggagacctcagaattcgtcgtcatagtgcgagctcctccgcgtgtgcaccgtgcgccgtggccaggggtgtctgcgctgcaattgccaggcatacaagatgacgatggtgcaatgcaagtgtttggtgcttttggttgatagaagctgctggatgcttttggtatttttgaaagatgcaagtcgtgcttctggttgatacttagaagttggtggttcaaaactgaaaaacctgtcaggctgtcacttgcttttggtttcttgtcaaactgctgggcgcctgaacactgctgtgcaccgtacgtcaggctgtcctcatgcatctgttaacagatcttttgtcctctgctgcttagactgctttatgaaatttgaaatgtgatgagacttatgccttatggtgactggtgatagcttattagattagagtatcatacttttggtcatggtcttatggaatatggaatgtgatgggatcattggaccgcatggtatgggtcatggatgtgtaaataaattataatttcattatttcatctctcgtctattaagtattaacagtttattac

SEQ ID NO: 211588 - DNA, 964 bp, Zea Mays
cccctctcctgcttctcttcctcgtagggcacctctggcgggttgttgcgctgcctgatatctccaccgcccacggcctcgccttgtcccaactacaaaagcgaacccaatccctcttgactcctctcatccgcctcgtctaaccaccaccacgagggagagttaaagtcgccagtacagaagagtgaaggggagagggttgctgggtccgattcggtgggctcatcgccgtcgggtccacgaattggtgcctaggagtctcgcgtgcttcggggacataatcgatggtctcgctgcggtgggttggtggctggagacctcagaattcgtcgtcatagtgcgagctcctccgcgtgtgcaccgtgcgccgtggccaggggtgtctgcgctgcaattgccaggcatacaagatgacgatggtgcaatgcaagtgtttggtgcttttggttgatagaagctgctggatgcttttggtatttttgaaagatgcaagtcgtgcttctggttgatacttagaattcagcatgtttgctgcctgcctgcttgctgctcagctgcagcctggaggctggtgcttatctgagagtactaagttatctgatgtgatctgtaaaacttactcagttcttgtcaaacttaatctgttaacaggtttcttgtcaaactgctgggcgcctgaacactgctgtgcaccgtacgtcaggctgtcctcatgcatctgttaacagatcttttgtcctctgctgcttagactgctttatgaaatttgaaatgtgatgagacttatgccttatggtgactggtgatagcttattagattagagtatcatacttttggtcatggtcttatggaatatggaatgtgatgggatcattggaccgcatggtatgggtcatggatgtgtaaataaattataatttcattatttcatctctcgtctattaagtattaacagtttattac

SEQ ID NO: 211589 - DNA, 1326 bp, Zea Mays
gaggccaaccgttgaggagaagccaatcgccagaagcggcaagccttgcctcgcgcaccggtctggttctggtgggtgccctcttcgccggtggccggaaggcgagggggaagccggaggacgctgagggcgggcgaggccgccgtccccagatctcacttccgccgcccgcccgccccgcttttgggattgagagaggaaggaaggaaaggaggtgcttcaatatgaaggcgctcattcttgtcgggggtttcggaacccgccttcggcctttgactcttagcttcccgaagccccttgtggattttgcaaacaagcccatgattctgcatcagatcgaagctttgaaagaagttggggtcacagaggtggttttggccatcaactaccgcccagaggtaatgattaatttcttgaaggactttgaggataaacttggcatcacaattacatgctcccaagagactgagcccttaggaactgctggccctcttgctctagcaagggacaagcttgcggatggatctggcgagccattctttgtcctcaacagcgatgtcataagcgaatacccatttgctgaactcatcaaatttcacaagtctcatggtggtgaggcaacaattatggtcactaaggtggatgaaccatctaaatatggtgttgtggttatggaggaggcaactggcagggtggaaaggtttgttgagaagccaaaaatatttgtgggcaacaagatcaatgctgggatttacttgctgaacccatctgtccttgaccgcattgaactgaggccaacatcaattgagaaagaggtcttccctcaaattgcagctgatcaacagctctatgcaatggtccttcctggtttttggatggatgttggtcagccaagggactacattactggattgcgtctttatctagactcgcttaggaagaaatcggctgccaggctagctgctggagcgcatgttgttggcaacgtgctggtgcatgagagcgccaagatcggagaaggttgcctgatcggtcctgatgtcgcaattggacctggatgtgtcgtggaggatggcgtgaggctttcccgctgcactgtcatgcgtggtgtgcgtatcaagaagcatgcctgcatctcgaacagcattatcgggtggcactcaactgttggacaatgggcacggatagagaatatgaccatcctgggcgaggatgttcatgtgtgtgacgaggtatacagtaatggcggtgttgttctcccacacaaagagatcaagtcaagcattctgaagcctgagatcgtcatagaatgaagatatgcgtcga

SEQ ID NO: 211590 - DNA, 1535 bp, Zea Mays
ctgaattcttttctactagagctagagccaggcagccagccaacgccaagcggggtaggttgactcttctgtctacagcacctacctcttcacaccaactgccgcccctgctccgagaaccagaatggccgccgccgatgcatcttcgttgcctccgtccgccatcacctgccgaggcgcaacttgatctgttccccagagtcttcggccacgaggcatccggagtagtagagagtgtcggtgaaggtgtgaccgagttccaagtcggtgaccacgttctcactgtcttcattggggaatgcaagagctgcaagcactgcgtctcagggaagagcaacatgtgccagaagctcggtctggagaggaagggtgtcatgcacagcgatcagaagacacgcttctctgtcaaggggaaacctgtgtaccattactgtgcagtgtcaagcttcagcgagtacacggttgtccattccggatgtgcggtgaaggttggcctgaccgtgccaatggacagggtgtgcctgctgagctgcggtgtgtcttcagtctggaatgtagctaatgtatcaaagggctcaagtgtagctatatttggtcttgggaccgtaggactttctgtcgctcaaggtgctaagcttcgaggggcgtccaagattataggagttgatactaatcctgagaagcaagaaaaggggaaatcatttggtgtcacggactttattaacccagatgaattgagtgaacctgttcaacaggtaatcaaaaggattactgatggaggggtggattactcatttgaatgtgtgggtgattctggagtagtctccactgcacttcaatcatgttctgatggttggggagtaactgtaactcttggcttaccaaaaggaaaactagaagtgtctactcattatgcatttcttctatccggaagaacactgaagggatctatgtttggaggatggaaacctaaatctgatctaccttcattggtggataaatatgcagcaaaggaaatccaagttgatggcctagtcacgcatgatataccattcaatgaaatcaacaaagcgcttgagttgatgctagaaaacaagtgcttgagatgtgtgattcacatgccacggtaacagggtcgaacagctgcacataataatatgatatctaccatatgttgcatatctgctctttctaccttgatcatctttgtggctcaaccgttcaagtactcatcagtcatcaccacgccggagcttgagtttttgtccttttctagtcccctggtaaagttgttgtaaatccagctatccatcaagaattatcaggagaactacactgatttgcttttgtatcttcatactttttcttctagaattgtcttcttatattgaatctttaatgtctgttctgttattttaatgctccatgtacaaaccatcaagcaaatattgttcttccagccggtgccagttctgatgatagacgggggcatatgctgaagaacagaaggactaaggggtgtttgaatgtactag

SEQ ID NO: 211591 - DNA, 1021 bp, Zea Mays
tggctctgctgcaagcctgcaaatcactaggtcactgagaacatgttgggtggcaagaaagttacagttgtatttgtcctaggtggtcctggaagtggaaaaggcacacagtgtgccaacatcgtggagcactttggattcacccatcttagtgctggagatcttctgcgtgcagagattaaatctggctctgagaacggaaccatgattgagaacatgataaaggagggaaagattgttccatcggaggtgactataaagcttttgcaggaggcaatgataaaaagtgaaaatgacaaattcctgatcgatggatttccaaggaatgaggagaatcatatggagaaacgactcctggggcgcaatcagggaagggttgatgataacattgaaactatcaaaaaaaggttcaaaacctttgttgactcaactctgcctgtcattgagcattacaactcaaaggacaaggttaaaaagattgatgctgcaaaaccaatccccgaggtgtttgaagacgtcaaagccatttttgccccatattctctaaaggctgaatagagcaatctaagggacatgataaaggtgatacatggtgtctaggcaccacataaacatatctgtgattatgatggaccctttaatatagaacaaaagttttggctcatttgagctaccagcgtaccagtaggcaattcgatttgttaccagcaacaagtgatctgattcccagtggtcctgctagagtaacattttttaccactgtctgttgtctatgtatcctttgatattgtgttgtaccaatgtgcaatttactctatggactgatggaacattgtgccatcccatccaccagatttattgtggcgttatggaaagcatagaaccgctgccatattctttaatttgtacgctgaaatatactcgttggcaccgaacttttggttgatgacttcgtgatataataaccctaccggcagtaaatatctacgctcaacaatgttctcaaaagcctcctctaaat

SEQ ID NO: 211592 - DNA, 1142 bp, Zea Mays
ctttgcattactcatttacttgaagtttctgatcctctgcatattcaataattggctctgctgcaagcctgcaaatcactaggtcactgagaacatgttgggtggcaagaaagttacagttgtatttgtcctaggtggtcctggaagtggaaaaggcacacagtgtgccaacatcgtggagcactttggattcacccatcttagtgctggagatcttctgcgtgcagagattaaatctggctctgagaacggaaccatgattgagaacatgataaaggagggaaagattgttccatcggaggtgactataaagcttttgcaggaggcaatgataaaaagtgaaaatgacaaattcctgatcgatggatttccaaggaatgaggagaatcgtgcagcctttgagaatgttaccaaaatttctcctgcatttgtgctattctttgactgttctgaagaagatatggagaaacgactcctggggcgcaatcagggaagggttgatgataacattgaaactatcaaaaaaaggttcaaaacctttgttgactcaactctgcctgtcattgagcattacaactcaaaggacaaggttaaaaagattgatgctgcaaaaccaatccccgaggtgtttgaagacgtcaaagccatttttgccccatattctctaaaggctgaatagagcaatctaagggacatgataaaggtgatacatggtgtctaggcaccacataaacatatctgtgattatgatggaccctttaatatagaacaaaagttttggctcatttgagctaccagcgtaccagtaggcaattcgatttgttaccagcaacaagtgatctgattcccagtggtcctgctagagtaacattttttaccactgtctgttgtctatgtatcctttgatattgtgttgtaccaatgtgcaatttactctatggactgatggaacattgtgccatcccatccaccagatttattgtggcgttatggaaagcatagaaccgctgccatattctttaatttgtacgctgaaatatactcgttggcaccgaacttttggttgatgacttcgtgatataataaccctaccggcagtaaatatctacgctcaacaatgttctcaaaagcctcctctaaat

SEQ ID NO: 211593 - DNA, 1270 bp, Zea Mays
ggcgttttgagccggatctagggaagggtgcgccaggtgctcttgctgtgtgatctttgtcgccttgtgacgctggggaccgggttattggcgggagtttgtcagaataatacataaagaactggtgccacgagatcgggggacttcagatcagggaaaccttgagccatgggcacagttgtggatgccgctccagcagttgtggctgaggtcactgagaacatgttgggtggcaagaaagttacagttgtatttgtcctaggtggtcctggaagtggaaaaggcacacagtgtgccaacatcgtggagcactttggattcacccatcttagtgctggagatcttctgcgtgcagagattaaatctggctctgagaacggaaccatgattgagaacatgataaaggagggaaagattgttccatcggaggtgactataaagcttttgcaggaggcaatgataaaaagtgaaaatgacaaattcctgatcgatggatttccaaggaatgaggagaatcgtgcagcctttgagaatgttaccaaaatttctcctgcatttgtgctattctttgactgttctgaagaagatatggagaaacgactcctggggcgcaatcagggaagggttgatgataacattgaaactatcaaaaaaaggttcaaaacctttgttgactcaactctgcctgtcattgagcattacaactcaaaggacaaggttaaaaagattgatgctgcaaaaccaatccccgaggtgtttgaagacgtcaaagccatttttgccccatattctctaaaggctgaatagagcaatctaagggacatgataaaggtgatacatggtgtctaggcaccacataaacatatctgtgattatgatggaccctttaatatagaacaaaagttttggctcatttgagctaccagcgtaccagtaggcaattcgatttgttaccagcaacaagtgatctgattcccagtggtcctgctagagtaacattttttaccactgtctgttgtctatgtatcctttgatattgtgttgtaccaatgtgcaatttactctatggactgatggaacattgtgccatcccatccaccagatttattgtggcgttatggaaagcatagaaccgctgccatattctttaatttgtacgctgaaatatactcgttggcaccgaacttttggttgatgacttcgtgatataataaccctaccggcagtaaatatctacgctcaacaatgttctcaaaagcctcctctaaat

SEQ ID NO: 211594 - DNA, 1401 bp, Zea Mays
cttcctcccccgttcgctttcctttcaggcggtcaccacttcaccaacaggcgccaccacaccaccgacccatttgccgcgttggtgttgccggatcttcaagcaggcagcacaccccacccggacccgagaacccgcgcgcgcgcgtattaataacggcaacctcgctcgcggctcgccgagggaatcgcacgcacccagcgatcagcgcagattccttccacgccccccctcctttccaggtcccctcgcccgcgctctcagatctcgcgcgcctcccacaagggaaaccttgagccatgggcacagttgtggatgccgctccagcagttgtggctgaggtcactgagaacatgttgggtggcaagaaagttacagttgtatttgtcctaggtggtcctggaagtggaaaaggcacacagtgtgccaacatcgtggagcactttggattcacccatcttagtgctggagatcttctgcgtgcagagattaaatctggctctgagaacggaaccatgattgagaacatgataaaggagggaaagattgttccatcggaggtgactataaagcttttgcaggaggcaatgataaaaagtgaaaatgacaaattcctgatcgatggatttccaaggaatgaggagaatcgtgcagcctttgagaatgttaccaaaatttctcctgcatttgtgctattctttgactgttctgaagaagatatggagaaacgactcctggggcgcaatcagggaagggttgatgataacattgaaactatcaaaaaaaggttcaaaacctttgttgactcaactctgcctgtcattgagcattacaactcaaaggacaaggttaaaaagattgatgctgcaaaaccaatccccgaggtgtttgaagacgtcaaagccatttttgccccatattctctaaaggctgaatagagcaatctaagggacatgataaaggtgatacatggtgtctaggcaccacataaacatatctgtgattatgatggaccctttaatatagaacaaaagttttggctcatttgagctaccagcgtaccagtaggcaattcgatttgttaccagcaacaagtgatctgattcccagtggtcctgctagagtaacattttttaccactgtctgttgtctatgtatcctttgatattgtgttgtaccaatgtgcaatttactctatggactgatggaacattgtgccatcccatccaccagatttattgtggcgttatggaaagcatagaaccgctgccatattctttaatttgtacgctgaaatatactcgttggcaccgaacttttggttgatgacttcgtgatataataaccctaccggcagtaaatatctacgctcaacaatgttctcaaaagcctcctctaaat

SEQ ID NO: 211595 - DNA, 1465 bp, Zea Mays
agacgtaagtgtcacggagcggaacattccatctctccagtgatccagtcctaacactcccctccgcgccgacgcctctggtgtctggtcaggcggtcaccacttcaccaacaggcgccaccacaccaccgacccatttgccgcgttggtgttgccggatcttcaagcaggcagcacaccccacccggacccgagaacccgcgcgcgcgcgtattaataacggcaacctcgctcgcggctcgccgagggaatcgcacgcacccagcgatcagcgcagattccttccacgccccccctcctttccaggtcccctcgcccgcgctctcagatctcgcgcgcctcccacaagggaaaccttgagccatgggcacagttgtggatgccgctccagcagttgtggctgaggtcactgagaacatgttgggtggcaagaaagttacagttgtatttgtcctaggtggtcctggaagtggaaaaggcacacagtgtgccaacatcgtggagcactttggattcacccatcttagtgctggagatcttctgcgtgcagagattaaatctggctctgagaacggaaccatgattgagaacatgataaaggagggaaagattgttccatcggaggtgactataaagcttttgcaggaggcaatgataaaaagtgaaaatgacaaattcctgatcgatggatttccaaggaatgaggagaatcgtgcagcctttgagaatgttaccaaaatttctcctgcatttgtgctattctttgactgttctgaagaagatatggagaaacgactcctggggcgcaatcagggaagggttgatgataacattgaaactatcaaaaaaaggttcaaaacctttgttgactcaactctgcctgtcattgagcattacaactcaaaggacaaggttaaaaagattgatgctgcaaaaccaatccccgaggtgtttgaagacgtcaaagccatttttgccccatattctctaaaggctgaatagagcaatctaagggacatgataaaggtgatacatggtgtctaggcaccacataaacatatctgtgattatgatggaccctttaatatagaacaaaagttttggctcatttgagctaccagcgtaccagtaggcaattcgatttgttaccagcaacaagtgatctgattcccagtggtcctgctagagtaacattttttaccactgtctgttgtctatgtatcctttgatattgtgttgtaccaatgtgcaatttactctatggactgatggaacattgtgccatcccatccaccagatttattgtggcgttatggaaagcatagaaccgctgccatattctttaatttgtacgctgaaatatactcgttggcaccgaacttttggttgatgacttcgtgatataataaccctaccggcagtaaatatctacgctcaacaatgttctcaaaagcctcctctaaat

SEQ ID NO: 211596 - DNA, 2496 bp, Zea Mays
ctggtcctcaagggagggggagatgtcatgggcatcatagggagcggtcactcatgtggggtcgcacttatgtgcgccaaaagcgagaggccgcagggggcgctggcagcagcgcgcgcaaggaaggcacgggcgctggcagcagcgcacgcaaggaaggcatggcaaaggaaagcgcgcacaaggaaggcatggcaaaggaaggcatggcaaaggaaagcgcgcacaaggaaggcatggcaaaggaaagcgcgtgcaaggaaggcatggcaaaggaaggtgactgatttggtggctaaattgatagacctaaatttaggggagatgatttcaattagtcacttgcctaattagtggttgcctagtttgtcaaccggtggcctatatataggcctgtacgcaggagacaaatgaaggaggaatatattatcaaaccaatctctctctctcttgcaatgactctcaagcgcctagggctgctaccctagaaccaagcctgcggcagaggggtataacctcgccggagaagacagctatcctcatggaccgaaggtccatgacagacatgtaagactcgttttggaccaaaatctgatcatggaatggccacttcatctgcgggaagtatgactcctaggtctccaataacaactccaagatcaaatcatatagacatgcttttagccggtaaaaatgcaattaatgagagtgatgatcttccacagattgtcgaacttgctgatattgcacgatgcatagcaaatactcctctggatgaagaaagtgcattatctcaaatggttacctgcatagaagatctccaagaaattgtcaactgcaggaagcatgagtctctcacagtgcagacatttggaacacgaatagaaaaactacacagggagaagtatctgcagctctgtgactcggttgatatggacaaggttgattcagcaagcaccataatggatgaggaagacaacgttgttcgtagcttgcgcgcaagtcctgtccatccaatcaaggatcgcacttcaattgatgactttgaaatcatcaaacctattagccgtggagcatttggacgtgttttcttggccaagaaaagaactacgggagacctttttgctataaaggttcttaggaaggcagatatgattcggaaaaatgctgtcgagagtatattggctgaacgtgatatattgattacagtcaggaacccttttgtggtacggtttttctattcgtttacctcacgggacaatttgtatctggtcatggagtacctgaatggaggggacctttactcattactgaggaatttagggtgcctggatgaagacgttgttcgtgtatatcttgcagaagttgtactagctttggaatatttgcactctatgcacatagtccatagggatctaaagcctgacaacttgttgatagcccatgatggacatattaaggttttgggttgtccaaggttggtttgattaacaacacatatgatctgtctcgccctgttgttagtggggcttcactgtatggagatgatgagcctcagatgaatgaattcgagcaaatggatcaccgagcacggagacaaaatcgttctgctgttggaactcctgattatttagcaccagaaatcattttggggacaggacatggttgcagtgcagattggtggtccgttggtgtcattctatttgagctcattgttggcatacctccgttcaatgcagaacacccccagacaatttttgacaatattctgaattacaaaataccttggccgcatgtcccggaagagatgagttttgatgcacaagatttaattgacaaattattgaccgaagatcctcatcaacgactaggagcaaatggcgcctcagaggttaaacaacatccatttttcaaagacattagctgggatacccttgctaggcagaaggctgcctttgttccctcctcagataatgcatttgatactagctacttcaccagtcgctattcctggaatccatcagatggaaacatatatgaagcatacgagtttgaggattccagtgataatggaagccttagtggaagcagtagttgtctgagcaaccgccaagatgacatgacggaggacagcgatggcctcaatgagtttgaatctagtgcaaatgtcaattattctttcagcaacttctcgttcaagcgtgcagcggttggatcaccgtctaaaagttcagaatgcttgcttgcacgcttgcacctaagacctgcttgcacaatattcgttccctatttgtaaatatcaacatttgcaattgcaatgttatcgcaatagcaattgtagtactgctgtacctgtgagccagatcttgaatgctacaaaggcagtatcctttctttttagtatgatgatatatgcagctcctgcgtgtttgagacaaaaaaaaaatgttgccatccattgataacttccctagaaaattgtaccacaacattcct

SEQ ID NO: 211597 - DNA, 2422 bp, Zea Mays
aagactcgttttggaccaaaatctgatcatggaatggccacttcatctgcgggaagtatgactcctaggtctccaataacaactccaagatcaaatcatatagacatgcttttagccggtaaaaatgcaattaatgagagtgatgatcttccacagattgtcgaacttgctgatattgcacgatgcatagcaaatactcctctggatgaagaaagtgcattatctcaaatggttacctgcatagaagatctccaagaaattgtcaactgcaggaagcatgagtctctcacagtgcagacatttggaacacgaatagaaaaactacacagggagaagtatctgcagctctgtgactcggttgatatggacaaggttgattcagcaagcaccataatggatgaggaagacaacgttgttcgtagcttgcgcgcaagtcctgtccatccaatcaaggatcgcacttcaattgatgactttgaaatcatcaaacctattagccgtggagcatttggacgtgttttcttggccaagaaaagaactacgggagacctttttgctataaaggttcttaggaaggcagatatgattcggaaaaatgctgtcgagagtatattggctgaacgtgatatattgattacagtcaggaacccttttgtggtacggtttttctattcgtttacctcacgggacaatttgtatctggtcatggagtacctgaatggaggggacctttactcattactgaggaatttagggtgcctggatgaagacgttgttcgtgtatatcttgcagaagttgtactagctttggaatatttgcactctatgcacatagtccatagggatctaaagcctgacaacttgttgatagcccatgatggacatattaagttgacagattttgggttgtccaaggttggtttgattaacaacacatatgatctgtctcgtcctgttgttagtggggcttcactgtatggagatgatgagcctcagatgaatgaattcgagcaaatggatcaccgagcacggagacaaaatcgttctgctgttggaactcctgattatttagcaccagaaatccttttggggacaggacatggttgcagtgcagattggtggtccgttggtgtcattctatttgagctcattgttggcatacctccgttcaatgcagaacacccccagacaatttttgacaatattctgaattgcaaaataccttggccgcatgtcccagaagagatgagttttgatgcacaagatttaattgacaaattattgacagaagatcctcatcaacgactaggagcaaatggcgcctcagaggttaaacaacatccatttttcaaagacattagctgggatacccttgctaggcagaaggctgccttcgttccctcctcagatagtgcatttgatactagctacttcaccagtcgctattcttggaatccatcagatggaaacatatatgaagcatacgagtttgaggattccagtgataatggaagccttagtggaagcagtagttgtgtgagcaaccgccaagatgacatgggggaggacagcgatggcctcaatgagtttgaatctagtgcaaatgtcaattattctttcagcaacttctcgttcaagaatctatcacaacttgcttccatcaattatgatatgctcaccaaaggattgaaggatgatccaccgccaagaactgaaacgtagcaatcaatctaaatttggactctcatccgagtaatcaaacagtctacaaggtgttcgcgggatgtaggtcttgtacatatcaaagtgtgaggcatggtctgttccaattgaggctgttcctacatctcccggagccgagtacagttttgctgttaccttgttttcatgaccaattgacatgccatcatcagtgaatcacccttgaccgaattgggcagagcgctgtctttttgttcccctttgcttttttttttaaaaaaatcagtccattatgagccttgggtttgcggagattggcccaggttactgtattcagaatacaacccctgaagatgtaggtgggttttaggaaattgccattctggcatttatagttgacgatggtttgttaagctggtagcccgctggatttcctgcggccagaaatgttcacagcattttttatggccatgggatacatcattttgctaaatgtgtccagtgtcccacagaatctgggacattataagaataggaaccgattgaggctggtgctgtttgtttcaacagagagtacgggaacggtaaatgcaactagcaaacggtgataattgttgcaaaggaataaaaacgctctctgtttggttcagctttgggagcgcagcgtccaaatagttgccgctgagactgaaagtttggctactgtatttcaaaatactct

SEQ ID NO: 211598 - DNA, 1790 bp, Zea Mays
aactgatggaagcagtgaaattgaaaatttcggaagttcacagaattcaggacagaattatttgaaattgtcgaacttgctgatattgcacgatgcatagcaaatactcctctggatgaagaaagtgcattatctcaaatggttacctgcatagaagatctccaagaaattgtcaactgcaggaagcatgagtctctcacagtgcagacatttggaacacgaatagaaaaactacacagggagaagtatctgcagctctgtgactcggttgatatggacaaggttgattcagcaagcaccataatggatgaggaagacaacgttgttcgtagcttgcgcgcaagtcctgtccatccaatcaaggatcgcacttcaattgatgactttgaaatcatcaaacctattagccgtggagcatttggacgtgttttcttggccaagaaaagaactacgggagacctttttgctataaaggttcttaggaaggcagatatgattcggaaaaatgctgtcgagagtatattggctgaacgtgatatattgattacagtcaggaacccttttgtgtacctgaatggaggggacctttactcattactgaggaatttagggtgcctggatgaagacgttgttcgtgtgtatcttgcagaagttgtactagctttggaatatttgcactctatgcacatagtccatagggatctaaagcctgacaacttgttgatagcccatgatggacatattaagttgacaggttttgggttgtccaaggttggtttgattaacaacacatatgatctgtctcgccctgttgttagtggggcttcactgtatggagatgatgagcctcagatgaatgaattcgagcaaatggatcaccgagcacggagacaaaatcgttctgctgttggaactcctgattatttagcaccagaaatcattttggggacaggacatggttgcagtgcagattggtggtccgttggtgtcattctatttgagctcattgttggcatacctccgttcaatgcagaacacccccagacaatttttgacaatattctgaattacaaaataccttggccgcatgtcccggaagagatgagttttgatgcacaagatttaattgacaaattattgaccgaagatcctcatcaacgactaggagcaaatggcgcctcagaggttaaacaacatccatttttcaaagacattagctgggatacccttgctaggcagaaggctgcctttgttccctcctcagataatgcatttgatactagctacttcaccagtcgctattcctggaatccatcagatggaaacatatatgaagcatacgagtttgaggattccagtgataatggaagccttagtggaagcagtagttgtctgagcaaccgccaagatgacatgacggaggacagcgatggcctcaatgagtttgaatctagtgcaaatgtcaattattctttcagcaacttctcgttcaagcgtgcagcggttggatcaccgtctaaaagttcagaatgcttgcttgcacgcttgcacctaagacctgcttgcacaatattcgttccctatttgtaaatatcaacatttgcaattgcaatgttatcgcaatagcaattgtagtactgctgtacctgtgagccagatcttgaatgctacaaaggcagtatcctttctttttagtatgatgatatatgcagctcctgcgtgtttgagacaaaaaaaaaatgttgccatccattgataacttccctagaaaattgtaccacaacattcct

SEQ ID NO: 211599 - DNA, 1873 bp, Zea Mays
ccgccgccgcctcaaaaccctagctcgatggagacattgagggaggccacagcctgcaggtaggttcgttcgactagtcatgggccgcgaaccatctactgcaatttgcagcccatgagagacgatcgggctctccaagtgggcatggtgcagggtagctgggctccctgggctccaacaaggaacgaggcccatctataatgacggttagacaaagaagtggcgcagcggcactaggccatccgttgaagcgttatcccgcagcgggcaaccacggtcacgtacgcgaaatctctctctctcgtggtcgtgcgcttccttcccgagactccaatgcccctgcctcccctgctcccgcgcctttaccccacgccgcctccacttcgcgccggggacaggggtaacgccgtccctctctctcctggaagaagaaggccggcgcttctcgctgtcgtccgcgcaaagagaaaggacgaggcaagcttcaccgaccgcatccttgactacatcgagggagggccaaagttaaggagatggtatggagcacccgatttgcttcccaaggatggggctgcggaggatgaggaggacgagtctcaagatggtgatattagcactaattctgaaaagggctagaacaaaagcacttgttaaggataaacgaaccactgaagaagcttttggaacttatgtggagtgcatggttggtgatatcggagataagtccttcacaaagagagcactaaggggcgttcgtgctataatttgtccagctgatgatggttttttctctgaaccgatcgacctcaagggtgttcaacacattgttctgctatcacagaaatagtggtggtttgcaagctattatgaacagcaagctgaagacgctagcagagaaggatgaagaagtggttcttgcatctggcatcccatgtacaataatcagaacaggttctctgcaaagcactcctggtcgcgagagaggttttgattttactgagggcatagcaagcaagggaagaataagcaaagaggatgctgctaccatatgtgtggaagctctgaatagcattcccctaaagacacacatttttgaggttgcaaatggtaaggagaaggtgatagactggaaagcatggtttgaagagcagaccaaaagagaagaagaaatacagtaaaaaacaaattggaagtgtttttcgcttgttggtccatgagaaaggaaaatagaaaagagcaaaaaaaggagaggatttataaaaacttgatggctagtttggaaactcaaatgctcttcggaattgaaggggatgggagaggaaattagttcatttctacctcaatcctctccaattccgaacgagatttgaggttcccaaatagcctaaaggaaatgagctgaaggttacgtttgatcctctagccttgctggcaattgaatcatactagtatatccgatgaagaaacaaaagtgcgtggagaagtggaggcacgtctatgaactctacactctgcagttgggctgaagcccctgatccctcattgtttatcaactcattcattatcttatataaaatgcagttcaaattatttgattaaagactttaaccatccacgagtatttctgtacacatgtatctagcgtttctgccagtattgtttgttgttcaatttgaagattaggccatcaagttattacttcagggcaacagaagcctcaagtcaatgtcacatggtactggatttctgcagcaaacatgttaacatgctgccgtctttaagggtttgttcgctttcctctcaatccatatggattggttgggattgaattggtttaaatcccaaacaaatcaaaatcgttcatatttttttc

SEQ ID NO: 211600 - DNA, 1949 bp, Zea Mays
ccgccgccgcctcaaaaccctagctcgatggagacattgagggaggccacagcctgcaggtaggttcgttcgactagtcatgggccgcgaaccatctactgcaatttgcagcccatgagagacgatcgggctctccaagtgggcatggtgcagggtagctgggctccctgggctccaacaaggaacgaggcccatctataatgacggttagacaaagaagtggcgcagcggcactaggccatccgttgaagcgttatcccgcagcgggcaaccacggtcacgtacgcgaaatctctctctctcgtggtcgtgcgcttccttcccgagactccaatgcccctgcctcccctgctcccgcgcctttaccccacgccgcctccacttcgcgccggggacaggggtaacgccgtccctctctctcctggaagaagaaggccggcgcttctcgctgtcgtccgcgcaaagagaaaggacgaggcaagcttcaccgaccgcatccttgactacatcgagggagggccaaagttaaggagatggtatggagcacccgatttgcttcccaaggatggggctgcggaggatgaggaggacgagtctcaaggtacatagagaaagcactctgtaaatttgaactccttggcggctgtgtcttcttatttgttggcagatctggggtgacaaatagatattgaggagtctcgggacgctgtgctagtcaccaatggcgacagtgagattggacagatggtgatattagcactaattctgaaaagggctagaacaaaagcacttgttaaggataaacgaaccactgaagaagcttttggaacttatgtggaggatggttttttctctgaaccgatcgacctcaagggtgttcaacacattgttctgctatcacagctggctgtctacagaaatagtggtggtttgcaagctattatgaacagcaagctgaagacgctagcagagaaggatgaagaagtggttcttgcatctggcatcccatgtacaataatcagaacaggttctctgcaaagcactcctggtcgcgagagaggttttgattttactgagggcatagcaagcaagggaagaataagcaaagaggatgctgctaccatatgtgtggaagctctgaatagcattcccctaaagacacacatttttgaggttgcaaatggtaaggagaaggtgatagactggaaagcatggtttgaagagcagaccaaaagagaagaagaaatacagtaaaaaacaaattggaagtgtttttcgcttgttggtccatgagaaaggaaaatagaaaagagcaaaaaaaggagaggatttataaaaacttgatggctagtttggaaactcaaatgctcttcggaattgaaggggatgggagaggaaattagttcatttctacctcaatcctctccaattccgaacgagatttgaggttcccaaatagcctaaaggaaatgagctgaaggttacgtttgatcctctagccttgctggcaattgaatcatactagtatatccgatgaagaaacaaaagtgcgtggagaagtggaggcacgtctatgaactctacactctgcagttgggctgaagcccctgatccctcattgtttatcaactcattcattatcttatataaaatgcagttcaaattatttgattaaagactttaaccatccacgagtatttctgtacacatgtatctagcgtttctgccagtattgtttgttgttcaatttgaagattaggccatcaagttattacttcagggcaacagaagcctcaagtcaatgtcacatggtactggatttctgcagcaaacatgttaacatgctgccgtctttaagggtttgttcgctttcctctcaatccatatggattggttgggattgaattggtttaaatcccaaacaaatcaaaatcgttcatatttttttc

SEQ ID NO: 211601 - DNA, 3091 bp, Zea Mays
ctcctgcgtggatcacgttgtctcctctttctcttgcgctgtcccactatcgatgagcttggctgcttctccaaggttggctgcgcgctcaaaccgtcttcaacagttgcctcttggaccacctctcctaatattgtagttcgtttaggggatacagtcctcttcgctggcgatttcttctctcacactacaaggaggggaactctacgagctcgcgctcgttgcctgccatcccacttcctctctccacctcgtctttggaagtctccaaagcgattgtgcagtctggcaggacaacctggaggattcttcgccgaacgagttttccgagcgcggaggtcagtaccacgttcatcatcgtcaccgccgttcttcactttcctccggtgattcgttctcactcgtcgacggaagggtgcgcatcgatccacagcgtgacctctcctacccgatctggttctttggatctcaaactactcaggtacgaatgtacgatttggttgctttgtacttcgtgttcctttgtcccgggcaaatccgttgaagaactacaacgattttggcttgattcggttggaatctagttgatatgtgtgtagggaactagggattacagatcagtgtgttaggttcgcacgattcatcgattaggccataatagttgacatagtatatgtttattccatggcaacgatacaaatattagttagggttagggactgtgtgcaccttcagttcgtaaacataggaagaaaagtatgtcaaactgttgtaaattggtttacaatgttttcatatatttactgaacctcgaatgtaaagctagatagtgatatgtcacttaaccatgcattgagctaacaaacaactttatttatgcagtttgaaaccttattagatgtcttcaactaattgttgttatatattcttttgctcttatattctttgttgcgaattcatttcattatacttgtacccatgcttcttgtttgttgacacatgtaacaattacatagtctatcgaaaacatactacaaactgggtgaatgcattaaacccttttgcctgtcaatttatctagtatgaaatgattcggaattattgaactacttttaccacatccgcattacctcctccttatcattttgttaggtgaaatttgtttccttgagtacttgaaattgaaccatcagtccacctttgcacctaatactttgacatatgatctatgtctagccaaggagttactcccttaggataggaatcaagatgagcatccaagatgccaaactgctgcaaaccttggccctcaatcttagatccatagtggaaactagcgcatgcaaaattagaagtttgctagaagatgctttcatgcaattgggtgatgagcattaccttatcaatgttctacttgctatccaacaagaagtcgaggtgatggagcaggataggtctactagtgacgctgagatggaggggaccgaggaagaactgaaagctatggagctcgtcgacataaaatcttttagcaccccttcctcccatggattgtatgagcctagtgacgctaactcatacgactcggttaggtctaataggtataacatttggaacctgtaagtaagcctgttgttgtctctatgtagaagtcttcgtccaaataaagaggagaggctgctgcttccgtggcgtgatacgagagaacggggcgagatagcgcaatgggagggaattagagttagagcctagagttatgtgagagagcaagccagagtgatggaggtagagtagggatggggagacttggaccacatattgattacaaagaaatgtacagtatatattaaaaaagtgttggcgaacgacgatggtgtaaaggctagcaaattgccttataattactatttatgttgagtatagaatattaagaaaaagacatgtgtgccctattggtttgtttagcgtgaatataagtttagaaataataattatgattcgaatttttatttatatataattttaacttttttattatttaaatgtgaggaaaaacgttgcagcttatttttctattgacatggccttcttggaaactggaatgaacccccgagttttaatggccttcaatttttttgctactccgtagtctccgccactgcgccacaccaccgcgtcgcagcaatgccgccgccgcgacgaaagcggaaggcggcctcgtacgagccacggcggcgctcgccatcccgcctggagtttcgtgccacagtggacggcgcgtggtacgaggcacgcgtggctgtgcagtgcggcgcgctgcgggtcatgtacgaggagttcctcgaggagcaggacgagtggtacgaccccgccgggctcgcgacttcctccgcgtgggacgtagtcaagctccgcgccaggtttcgtgtgccgtccacacccctggaagacacccagtgccgcgatctccaagccggcgcacgactctgcgtctcctgctcgctcgacggcggtgacctcaagttctacgacgccatcctcgattccgtgtatccagcggctcacgagatcgttgacggcatggagcggtgcgcctgccgtttcgcggtgcagtggtcggatggaccgcgcgctgggagcatggaggaggtcggcattgagcgggtttgctgcgtgcagtcctcgccggtgcaagacccagtgcttatggagttcctggacggcgtgaccaagctggccggggatgccaacgtggaaacagtgtctcaggagatccacgtcgcgccggtagtcaaaggcggcgtccctgcaaacgccctgcaaacgcgtcaccgtgatttcaacggaaaatttggtccagcaagtaggcaagcggtttgatgtgcgtggttctgaggttggctatttggtgcctctgattttgtgttgctttaacaatctgatcatgcacataaatcttctcttccaaattctctatccacttggtttgagttcggccgttaaaatactaactaatgtttcgttcatggatcatggttaccctgtcaccctgaaaggcctggttatctgacgaacacaaactataggaaat

SEQ ID NO: 211602 - DNA, 1593 bp, Zea Mays
agtgcacaagaggcccctcaagctgccacatcagcaccctcatctgccaagtcagcacagcctgcccaatcgcctccaggcaacagatagccctgatgggcacccatccaatggcagctccgatggccaaatctctgctaggcccacagcatcctccgatcctcattttcatccatttaaactagctcgccttttcctccacaagcccccatcagccatcccctcccgcggcaagtctctctgaattgtgggtctccggcgatggcggctcttgctccatccaagattctgggcaccaagctcaacttcgccggctcctcccgctacgccaccgcagcgcccaccgcgggggctcagaagatcgtctccctcttcagcaagaagcctgcccagaagcccaagccctctgcggtgtcgtcctcttctccggacatcagcgacgagctcgccaagtggtacggtcctgacaggaggatctacctgccggatgggctcttggaccgctcggaggtaccggagtacctcaccggagaggtccctggagactatggctacgacccttttggcctgggcaagaagccagaggacttcgccaagcctacgagctgatccatgccagatgggccatgctcggtgccgctggcgctgtcatcccagaggcgtgcaacaagttcggcgctaactgcggccccgaggccgtctggttcaagaccggagccctgctcctcgacggaaacaccctcagctatttcggcaacagcatccccatcaacctggtggtcgccgtgatcgcggaggtcgtcctcgtcggcggcgccgagtactaccggatcatcaacggactggacctcgaggacaagctgcaccccggtggccccttcgaccccctgggcttggccagcgaccccgaccaggccgccatcctcaaggtgaaggagatcaagaacggccggctcgccatgttctccatgttcgccttcttcatccaggcctacgtcaccggcgaaggccccgtcgagaacctcgccaagcacctcagcgaccccttcggcaacaacctgctcaccgtcatctccggcgccgccgagaggacgcccagcctgtgaggacgcgccacaagccggcagcgatgccaagtcatgcgctgctgccgtccttgattttaccggggaaagagctgtgtgtgagggtctgaagtgaagaacgtgccatgcccatgcgtgtacattatcgagagggggaagaaaccttctcattctgatctctgatatgactgctgcttcagattgcgcctgagatatgctaagtttttgaaagctaattagttcgtgcacattaagggtgcgtttgagttggattatttgtgaatgctagcttattttaacttatttgtgattttaaagtgatattttacccctctagtataattcaacgtataggaggaaacaaacgtagcctaagttactttgtggtcaatctaatagagctcctgaattttacttcttaattctccaaaggagtgtttccagagacaagaattaatcgtgaaatgttttatactcagaaaatagtggcttgattttttttgagaga

SEQ ID NO: 211603 - DNA, 2541 bp, Zea Mays
cttggtttccttctcaaagcccgaaacacctgcagacccactgaatcattgcggttacggttttcttccttctggtgattgctttttatgcattcttcgcaatgtttctagggaagcaagtcctagagtatgttgtgatcggtgtctacactgccgtggtgttttctgtcgccatgctttacatccgctgcactagtataaaccctgctgatcctggaatcatgtcaaagttcgacaatgtcctcatcgatgcacctggaagtgctgccaacatacagggcacggatttgccagtgaaagctggtattggcgctggaacaatctccccatcggcaacatctacttgtaggaactctgtagatgggcattctaacgctggtgctttagctgctggagacacaaatctggatttaaggtctcagccgccaacaagtccatggagctgcttacttggagggcttgtttgttttttgtttgtgaaggaggattgtaggaaatacgatgattcagagaatcaagttgatggggaaggagccttgttctgcacgttatgtgacgccgaggttcgcaaattcagtaaacactgcagaagttgtgacaagtgtgtggatggatttgatcatcactgtcggtggctaaataactgtgttggacggaagaactatttcacgtttcttgctctgatggctaccagtcttctctggcttgctatcgaaattggagtaggcatcggtgttcttgttatatgctttgccaacaagaattcagagagaattattcaagacaggcttgggaatggtttgcctcggcctgcctttgctaccattgtagcgttttttactcttctttctctagtcgcttgcatacctttaggggagcttttcttcttccacatgatcttaatcagaaaggggatcacaacttatgaatatgtcgttgcaatgagagctatgagtgaaacacctcaagaggaggaagagcacgaggaggaggagggggtaaacattgtttattccccaacaaattcagccaccactgcgttcagtggtgctagttcactcagtcttcactacaagggctcatggtgcacacctccaaggatttttgttgatcaggatgaagtgatcccgcatttggagccagggatggtgccttcaaccatcgatcctgatgctgttggacgcgccgaaagagccaacaaagccaagaagcaggtcaaaatcagtgcctggaagcttgcaaagctggacagcaatgaggcgatgaaggccgctgctaaagtccgggcatcatcgtctgtcctccggcctattgattcccgccgggttccaggtgctagccctggctccagtggcaatgccagcatgagaagcagcatgagtgccggttacagcgccagtggcaccaaggaaaggggggctggtatgcttcagagtccctcgtatcctcagagccctgcaagccaggacgactacgagtcgggcacgcagagtggtagcagcaggaccagcccggtgcacattcacagacccgccgcaccgcacgctcagatcaacgtgccactgccacctcgtgtgccccaagcacctccaaggcctgcgccggcgttggcaccgaggccgcctgttccagccacgcagatgtccaagccaacgttccagtcggcaacatcttatgtccgtgagaaccggaaagtatcggttgtttgggatcaagaggctgctaggtacgtgtccgtggcaccggcgcccacaaggccagtaactggcaaccatggaagaactctcgcatccatgaatccttcgtcctcagcgttgccatctggacagccgtccgagaggttggcatacactgggcagtcgatattctttggtggaccgcttctgggtgctgctgctgctgaccctcggaggaatgaagctgtcgcgggagtgccgccggagacaaggaggaacgatggcactgggggagagaggagacgaactgcggagtccttcccggtgtttgctccaggatcccttgagaagaacccgccatccaacaggtgatctcgtggcggtatggcaccaccttttctgaccatcgtgaccaagacaatgggacgatcgttactcaacaaggagccctggagagtccaagggtgattactgtgagttcatcggcgatcgtcaccaattccacacgcagagaaggcgtcacagggacatgctacaagtctgaaatgggggcatcctagtactgagcctgaacccgaggttgagggatgtgagtgtctgagtgacaaatgaaccgtgcaggtgtcaagaaagctgaaacagggaggacacacacaaggcgtgagtgactgattggggtgtaaatgttttgctcgtttcgttggagtaacttttgggttagacgtgtgttttgtagagacaatataagttaggtcaagacaatggctattgattaggtgtatatggatttcatgtctctattgatggtattcaatttcgattttcaaaggatgaacgagaagcttaaagatcggttagttctaag

SEQ ID NO: 211604 - DNA, 1646 bp, Zea Mays
ctcctccctcgctcctgccttccctacaaaagccgcgacaaccggcggggacgaggaggagaccgcccgaccccgaccccccccgattgcgcttgcccccccccccccccccccccccatcccgttcggcgcattcgcgttccgccgcacccgcgtggaggccgggccggagcagccagccatgggcgtggatgaggcggggcgcgccgccggcaggaatctcacgctggcaagcatcggcttcgcggacgtccgcgtgggcgctgccgtgcccgggggcgccgggtacaaggacggcctgctcgtcgtggggctgcccgtgcccaaggacgacggcctcgacgccgccgcccgggtcgtccgggacctcgccaccaggctgcccgacgtaggcgccgccgctaggacttttctgaggaatagagaagttgcagaattcgtgagtggagcattggctggtgcaatgactaaggctgttcttgctcccttagaaactatcaggacaagaatggttgtaggggtaggatcaaaacatatttttggtagctttgtggagattgttgaacataatggctggcaaggactctgggcaggagtatggcctcggcacaagagaaatggaaagaggaaggatgcccaaagatacaactcggcgatttgaaaattcagttgccatttcacttactatcgccgattgcgattggaggtgcggcagctggaatagctagcactttggtgtgtcatcctcttgaggttcttaaggatcgcatgactgtcaaccgtgaggcttatcctagtattgccattgccttcagcaagatctaccgaactgatggcattggtggtctttatgctggcctctgcccaacgttggttggcatgcttccatatagcacatgctactatttcatgtacgagaccatcaagactaactactgccgtgcgcacaaaaagaaatctttgagccgtcctgagctgctggttatcggggctctttcaggtctaactgcaagcacgatcagcttccctcttgaagtggcaaggaagcgccttatggtaggatccctgcaagggaagtgcccaccccacatgatcgcggcgttagccgaggtgatccaagaggagggtgccaaggggcttttccgaggatgggcggcgagctccctgaaggtcatgccaacgtccggtgtcacctggatgttttacgaggcatggaaggaccttcttttgagttcacggctccatgcgtagcaggagcttgaagaagtcgggctcttgcattgtcacagaataaatttgttgcgctgtgtcggattttcaacatttttttcttcttaaaaagtcgcacacatgccaaccatttaggagagaagaaggccatcttgtgctggttgcacccttgattagcagcactagccaattggccttcgctgacctgggattatctaactactagcaactctgagcagactcaacctggactgggtatgcattggccccaggcatcgttgttgcgaaatttgtctactaatgaaaaacaaggactattcatgaaccttttgtcactgaatgttgcatgttttgtatgtgtggggcatttatccggttcttaatgagtctcaatgttacacaatattatacatcta

SEQ ID NO: 211605 - DNA, 3003 bp, Zea Mays
cgggcacgtgcgcacgcgccgcactagggtttccgcagcatacctacaagtactcgaaaccccgtctctctccccctcttttccggctgcgccttcccctcgcagccgccagccctcaacgttcctaccagctgccaccgcctgttacccgtgatgtctcccgcccttgccgctggcgtggagcccatggccgtcgacgattccgcctccaagaaggccaagcgcaagcagctcaaggccgccgccgccgccgcggaggcagaggcggaggccgcttcggtcaagaagaaagagaagaaagagaagaagcgaaaggtgaaggagccgtcccctccgctcccatcggccgcgtcctctgatgaggaagagaaaagcagcaccagctccgaggagacagcacccgcggcgaaaaaagcgaaggagaagacgaagaagaatgttgatgtctcgtcttcagcctcagatgacgatggcgagatcacagccagcagcgatgaggaccccgcggacccgaacgcgctgacgaacttcaggatatcggagtcgctgaggcagagcctcaggtccaaggggatcaagtcactgttccccattcaggccaccactttcgatctcgtactcgatggcagcgacttggttggccgagcgcgcaccggtcagggaaaaactttggcttttgtcttgcccatattggagtctttggttaatggggcaaacaaggcatctagacggactgaacatggcaggaccccaagtgttctcgttctactaccaacaagagagctggccaatcaggtgcacgctgactttgagttttatggtgcaacatttgggctctctgcatgttgtgtgtatgggggatcaccttatcgtcctcaagaaatggcattgagaagaggtgtggatattgttgttggaactcctggtcgtgtcaaggatttcattgttaaaggaactctcaatttgaaatgcttgaaattccgtgtccttgatgaagctgatgagatgctaaacatgggttttgttgatgatgtcgagctcattcttggcaaggtagaagatgctaccaaagtacagacgcttctgttcagtgccactctgccagagtgggtgaataagctctctatgaggtttctgaaagttgacaggaaaacagttgatcttgtcggtaatgagaaactgaaggccagtgcatctgttaagcaccttgctcttccttgtaacaaggcagcaagggcacaagttattccagacattatccgatgttatagccatggaggtcgaaccatcatcttcactgagacgaaggattctgcatcagagctttctggtttgattcatggatcccgtgccttgcatggagatgtagcgcaagcgcagcgtgaagtaattcttgctggattccgtagcgggaagttccaagttttggttgcgacaaatgtggcggcgcgtggtctggatattaatgatgtgcagcttatcattcagtgtgaacctccccgggatgttgaagcttacatacaccggtcaggtcggacagggagagcaggtaatactggtgttgctgtcatgctttatgagcccagatataagcacagtgtcagcagactagaaagggagtctggggttaaatttgagcatatctctgcgccacaacccactgatgtagcacaatctgctggcagtgaagctgcagatgcaattgcgagtgtgtcagacagtgttattcctatcttcaggcagcaagcagagcagttgctaagctcttccagtctgtctgcagctgacttgcttgccaaagcacttgcaaaggcagttggttacacggacataaagaaaagatcattgttatcttccttggaggattacagtacactacatcttcaaactggcagaccgatgtggtcacctgggtttgcttttactatattgaaaaggttcatgccagaagataaacttgcagatgtaaagggtgccaccctcaccgctgatggaacaggagttgtatttgatgttcctgcagcagatgttgaagattacattcaaggtataatggtccttcccttgttcgtgaaatagttatcaactagcataggcatgaaaatattttcctgatgtggcccctgaatccgttttcttgttatgcaattcaaataagcctgttaatgccttgtttggttatttctataccatatggattggatgagattggaaaaaattatgaaagattttgacttgtctgggatttaaacctacccaatctcacccaatccacatggaatgagagcaaaatgaataagccttaaagtgtctattattttctaaatgaaattcgactatgaaaaccttttggatatgtggcaccactcgaatcactacatcctgcagcttcggagagtgccgcacaggtgacaattgatgaagtcaagcaactgccacccttgcaagagaaggaccagtcgagaggcaactctgggggaggaagatttggccatggaggtggccggagattttctggtggtggtggcggcggcagagggttttctggccggggaggtggcggcagagggttttctggcagaggaggcggcggcagtagatttaacaggaggaattagaagctgcttcaatctttatggacatttcagaattcagagaactatgtttgtgttcgacgtagttttgatgaagagggagggaatcgtctcagttttggctgcaactgtatcgtgcttttgtttatttgttagccttcgtcaacgaaggcttattttgttagtgatataattgaggcatggggaagagggggaggtaacagtctcagttttggctgcaaattgtatcgtgctattgtttatttgttagtgttcgtcaacgaaggcttatttgttagtgcttttattgtggcgtggtgaagagggaggaaatagtctcaattttggctgcaaccgtgtcgtgcttttctttctaagagcatcatcacaagtgaagttagaaacccag

SEQ ID NO: 211606 - DNA, 2965 bp, Zea Mays
cgggcacgtgcgcacgcgccgcactagggtttccgcagcatacctacaagtactcgaaaccccgtctctctccccctcttttccggctgcgccttcccctcgcagccgccagccctcaacgttcctaccagctgccaccgcctgttacccgtgatgtctcccgcccttgccgctggcgtggagcccatggccgtcgacgattccgcctccaagaaggccaagcgcaagcagctcaaggccgccgccgccgccgcggaggcagaggcggaggccgcttcggtcaagaagaaagagaagaaagagaagaagcgaaaggtgaaggagccgtcccctccgctcccatcggccgcgtcctctgatgaggaagagaaaagcagcaccagctccgaggagacagcacccgcggcgaaaaaagcgaaggagaagacgaagaagaatgttgatgtctcgtcttcagcctcagatgacgatggcgagatcacagccagcagcgatgaggaccccgcggacccgaacgcgctgacgaacttcaggatatcggagtcgctgaggcagagcctcaggtccaaggggatcaagtcactgttccccattcaggccaccactttcgatctcgtactcgatggcagcgacttggttggccgagcgcgcaccggtcagggaaaaactttggcttttgtcttgcccatattggagtctttggttaatggggcaaacaaggcatctagacggactgaacatggcaggaccccaagtgttctcgttctactaccaacaagagagctggccaatcaggtgcacgctgactttgagttttatggtgcaacatttgggctctctgcatgttgtgtgtatgggggatcaccttatcgtcctcaagaaatggcattgagaagaggatttcattgttaaaggaactctcaatttgaaatgcttgaaattccgtgtccttgatgaagctgatgagatgctaaacatgggttttgttgatgatgtcgagctcattcttggcaaggtagaagatgctaccaaagtacagacgcttctgttcagtgccactctgccagagtgggtgaataagctctctatgaggtttctgaaagttgacaggaaaacagttgatcttgtcggtaatgagaaactgaaggccagtgcatctgttaagcaccttgctcttccttgtaacaaggcagcaagggcacaagttattccagacattatccgatgttatagccatggaggtcgaaccatcatcttcactgagacgaaggattctgcatcagagctttctggtttgattcatggatcccgtgccttgcatggagatgtagcgcaagcgcagcgtgaagtaattcttgctggattccgtagcgggaagttccaagttttggttgcgacaaatgtggcggcgcgtggtctggatattaatgatgtgcagcttatcattcagtgtgaacctccccgggatgttgaagcttacatacaccggtcaggtcggacagggagagcaggtaatactggtgttgctgtcatgctttatgagcccagatataagcacagtgtcagcagactagaaagggagtctggggttaaatttgagcatatctctgcgccacaacccactgatgtagcacaatctgctggcagtgaagctgcagatgcaattgcgagtgtgtcagacagtgttattcctatcttcaggcagcaagcagagcagttgctaagctcttccagtctgtctgcagctgacttgcttgccaaagcacttgcaaaggcagttggttacacggacataaagaaaagatcattgttatcttccttggaggattacagtacactacatcttcaaactggcagaccgatgtggtcacctgggtttgcttttactatattgaaaaggttcatgccagaagataaacttgcagatgtaaagggtgccaccctcaccgctgatggaacaggagttgtatttgatgttcctgcagcagatgttgaagattacattcaaggtataatggtccttcccttgttcgtgaaatagttatcaactagcataggcatgaaaatattttcctgatgtggcccctgaatccgttttcttgttatgcaattcaaataagcctgttaatgccttgtttggttatttctataccatatggattggatgagattggaaaaaattatgaaagattttgacttgtctgggatttaaacctacccaatctcacccaatccacatggaatgagagcaaaatgaataagccttaaagtgtctattattttctaaatgaaattcgactatgaaaaccttttggatatgtggcaccactcgaatcactacatcctgcagcttcggagagtgccgcacaggtgacaattgatgaagtcaagcaactgccacccttgcaagagaaggaccagtcgagaggcaactctgggggaggaagatttggccatggaggtggccggagattttctggtggtggtggcggcggcagagggttttctggccggggaggtggcggcagagggttttctggcagaggaggcggcggcagtagatttaacaggaggaattagaagctgcttcaatctttatggacatttcagaattcagagaactatgtttgtgttcgacgtagttttgatgaagagggagggaatcgtctcagttttggctgcaactgtatcgtgcttttgtttatttgttagccttcgtcaacgaaggcttattttgttagtgatataattgaggcatggggaagagggggaggtaacagtctcagttttggctgcaaattgtatcgtgctattgtttatttgttagtgttcgtcaacgaaggcttatttgttagtgcttttattgtggcgtggtgaagagggaggaaatagtctcaattttggctgcaaccgtgtcgtgcttttctttctaagagcatcatcacaagtgaagttagaaacccag

SEQ ID NO: 211607 - DNA, 2624 bp, Zea Mays
cgggcacgtgcgcacgcgccgcactagggtttccgcagcatacctacaagtactcgaaaccccgtctctctccccctcttttccggctgcgccttcccctcgcagccgccagccctcaacgttcctaccagctgccaccgcctgttacccgtgatgtctcccgcccttgccgctggcgtggagcccatggccgtcgacgattccgcctccaagaaggccaagcgcaagcagctcaaggccgccgccgccgccgcggaggcagaggcggaggccgcttcggtcaagaagaaagagaagaaagagaagaagcgaaaggtgaaggagccgtcccctccgctcccatcggccgcgtcctctgatgaggaagagaaaagcagcaccagctccgaggagacagcacccgcggcgaaaaaagcgaaggagaagacgaagaagaatgttgatgtctcgtcttcagcctcagatgacgatggcgagatcacagccagcagcgatgaggaccccgcggacccgaacgcgctgacgaacttcaggatatcggagtcgctgaggcagagcctcaggtccaaggggatcaagtcactgttccccattcaggccaccactttcgatctcgtactcgatggcagcgacttggttggccgagcgcgcaccggtcagggaaaaactttggcttttgtcttgcccatattggagtctttggttaatggggcaaacaaggcatctagacggactgaacatggcaggaccccaagtgttctcgttctactaccaacaagagagctggccaatcaggtgcacgctgactttgagttttatggtgcaacatttgggctctctgcatgttgtgtgtatgggggatcaccttatcgtcctcaagaaatggcattgagaagaggatttcattgttaaaggaactctcaatttgaaatgcttgaaattccgtgtccttgatgaagctgatgagatgctaaacatgggttttgttgatgatgtcgagctcattcttggcaaggtagaagatgctaccaaagtacagacgcttctgttcagtgccactctgccagagtgggtgaataagctctctatgaggtttctgaaagttgacaggaaaacagttgatcttgtcggtaatgagaaactgaaggccagtgcatctgttaagcaccttgctcttccttgtaacaaggcagcaagggcacaagttattccagacattatccgatgttatagccatggaggtcgaaccatcatcttcactgagacgaaggattctgcatcagagctttctggtttgattcatggatcccgtgccttgcatggagatgtagcgcaagcgcagcgtgaagtaattcttgctggattccgtagcgggaagttccaagttttggttgcgacaaatgtggcggcgcgtggtctggatattaatgatgtgcagcttatcattcagtgtgaacctccccgggatgttgaagcttacatacaccggtcaggtcggacagggagagcaggtaatactggtgttgctgtcatgctttatgagcccagatataagcacagtgtcagcagactagaaagggagtctggggttaaatttgagcatatctctgcgccacaacccactgatgtagcacaatctgctggcagtgaagctgcagatgcaattgcgagtgtgtcagacagtgttattcctatcttcaggcagcaagcagagcagttgctaagctcttccagtctgtctgcagctgacttgcttgccaaagcacttgcaaaggcagttggttacacggacataaagaaaagatcattgttatcttccttggaggattacagtacactacatcttcaaactggcagaccgatgtggtcacctgggtttgcttttactatattgaaaaggttcatgccagaagataaacttgcagatgtaaagggtgccaccctcaccgctgatggaacaggagttgtatttgatgttcctgcagcagatgttgaagattacattcaagcttcggagagtgccgcacaggtgacaattgatgaagtcaagcaactgccacccttgcaagagaaggaccagtcgagaggcaactctgggggaggaagatttggccatggaggtggccggagattttctggtggtggtggcggcggcagagggttttctggccggggaggtggcggcagagggttttctggcagaggaggcggcggcagtagatttaacaggaggaattagaagctgcttcaatctttatggacatttcagaattcagagaactatgtttgtgttcgacgtagttttgatgaagagggagggaatcgtctcagttttggctgcaactgtatcgtgcttttgtttatttgttagccttcgtcaacgaaggcttattttgttagtgatataattgaggcatggggaagagggggaggtaacagtctcagttttggctgcaaattgtatcgtgctattgtttatttgttagtgttcgtcaacgaaggcttatttgttagtgcttttattgtggcgtggtgaagagggaggaaatagtctcaattttggctgcaaccgtgtcgtgcttttctttctaagagcatcatcacaagtgaagttagaaacccag

SEQ ID NO: 211608 - DNA, 2891 bp, Zea Mays
cgggcacgtgcgcacgcgccgcactagggtttccgcagcatacctacaagtactcgaaaccccgtctctctccccctcttttccggctgcgccttcccctcgcagccgccagccctcaacgttcctaccagctgccaccgcctgttacccgtgatgtctcccgcccttgccgctggcgtggagcccatggccgtcgacgattccgcctccaagaaggccaagcgcaagcagctcaaggccgccgccgccgccgcggaggcagaggcggaggccgcttcggtcaagaagaaagagaagaaagagaagaagcgaaaggtgaaggagccgtcccctccgctcccatcggccgcgtcctctgatgaggaagagaaaagcagcaccagctccgaggagacagcacccgcggcgaaaaaagcgaaggagaagacgaagaagaatgttgatgtctcgtcttcagcctcagatgacgatggcgagatcacagccagcagcgatgaggaccccgcggacccgaacgcgctgacgaacttcaggatatcggagtcgctgaggcagagcctcaggtccaaggggatcaagtcactgttccccattcaggccaccactttcgatctcgtactcgatggcagcgacttggttggccgagcgcgcaccggtcagggaaaaactttggcttttgtcttgcccatattggagtctttggttaatggggcaaacaaggcatctagacggactgaacatggcaggaccccaagtgttctcgttctactaccaacaagagagctggccaatcaggtgcacgctgactttgagttttatggtgcaacatttgggctctctgcatgttgtgtgtatgggggatcaccttatcgtcctcaagaaatggcattgagaagaggtgtggatattgttgttggaactcctggtcgtgtcaaggatttcattgttaaaggaactctcaatttgaaatgcttgaaattccgtgtccttgatgaagctgatgagatgctaaacatgggttttgttgatgatgtcgagctcattcttggtatgctcatttgtcagtttctatgtattgtacattcttatacaaatttcttttttgacaatatagattagtatgcaggagccaattattatctttatacttctatttactaaccactttctgttttttttaaaatggatcaattaacatggtttttaaatggagtatctaacagcattcattagatttctgtttgattatttaattactcactctaatgtatgaaaaggcaaggtagaagatgctaccaaagtacagacgcttctgttcagtgccactctgccagagtgggtgaataagctctctatgaggtttctgaaagttgacaggaaaacagttgatcttgtcggtaatgagaaactgaaggccagtgcatctgttaagcaccttgctcttccttgtaacaaggcagcaagggcacaagttattccagacattatccgatgttatagccatggaggtcgaaccatcatcttcactgagacgaaggattctgcatcagagctttctggtttgattcatggatcccgtgccttgcatggagatgtagcgcaagcgcagcgtgaagtaattcttgctggattccgtagcgggaagttccaagttttggttgcgacaaatgtggcggcgcgtggtctggatattaatgatgtgcagcttatcattcagtgtgaacctccccgggatgttgaagcttacatacaccggtcaggtcggacagggagagcaggtaatactggtgttgctgtcatgctttatgagcccagatataagcacagtgtcagcagactagaaagggagtctggggttaaatttgagcatatctctgcgccacaacccactgatgtagcacaatctgctggcagtgaagctgcagatgcaattgcgagtgtgtcagacagtgttattcctatcttcaggcagcaagcagagcagttgctaagctcttccagtctgtctgcagctgacttgcttgccaaagcacttgcaaaggcagttggttacacggacataaagaaaagatcattgttatcttccttggaggattacagtacactacatcttcaaactggcagaccgatgtggtcacctgggtttgcttttactatattgaaaaggttcatgccagaagataaacttgcagatgtaaagggtgccaccctcaccgctgatggaacaggagttgtatttgatgttcctgcagcagatgttgaagattacattcaagcttcggagagtgccgcacaggtgacaattgatgaagtcaagcaactgccacccttgcaagagaaggaccagtcgagaggcaactctgggggaggaagatttggccatggaggtggccggagattttctggtggtggtggcggcggcagagggttttctggccggggaggtggcggcagagggttttctggcagaggaggcggcggcagtagatttaacaggaggaattagaagctgcttcaatctttatggacatttcagaattcagagaactatgtttgtgttcgacgtagttttgatgaagagggagggaatcgtctcagttttggctgcaactgtatcgtgcttttgtttatttgttagccttcgtcaacgaaggcttattttgttagtgatataattgaggcatggggaagagggggaggtaacagtctcagttttggctgcaaattgtatcgtgctattgtttatttgttagtgttcgtcaacgaaggcttatttgttagtgcttttattgtggcgtggtgaagagggaggaaatagtctcaattttggctgcaaccgtgtcgtgcttttctttctaagagcatcatcacaagtgaagttagaaacccag

SEQ ID NO: 211609 - DNA, 2672 bp, Zea Mays
cgggcacgtgcgcacgcgccgcactagggtttccgcagcatacctacaagtactcgaaaccccgtctctctccccctcttttccggctgcgccttcccctcgcagccgccagccctcaacgttcctaccagctgccaccgcctgttacccgtgatgtctcccgcccttgccgctggcgtggagcccatggccgtcgacgattccgcctccaagaaggccaagcgcaagcagctcaaggccgccgccgccgccgcggaggcagaggcggaggccgcttcggtcaagaagaaagagaagaaagagaagaagcgaaaggtgaaggagccgtcccctccgctcccatcggccgcgtcctctgatgaggaagagaaaagcagcaccagctccgaggagacagcacccgcggcgaaaaaagcgaaggagaagacgaagaagaatgttgatgtctcgtcttcagcctcagatgacgatggcgagatcacagccagcagcgatgaggaccccgcggacccgaacgcgctgacgaacttcaggatatcggagtcgctgaggcagagcctcaggtccaaggggatcaagtcactgttccccattcaggccaccactttcgatctcgtactcgatggcagcgacttggttggccgagcgcgcaccggtcagggaaaaactttggcttttgtcttgcccatattggagtctttggttaatggggcaaacaaggcatctagacggactgaacatggcaggaccccaagtgttctcgttctactaccaacaagagagctggccaatcaggtgcacgctgactttgagttttatggtgcaacatttgggctctctgcatgttgtgtgtatgggggatcaccttatcgtcctcaagaaatggcattgagaagaggtgtggatattgttgttggaactcctggtcgtgtcaaggatttcattgttaaaggaactctcaatttgaaatgcttgaaattccgtgtccttgatgaagctgatgagatgctaaacatgggttttgttgatgatgtcgagctcattcttggtatgctcatttgtcagtttctatgtattgtacattcttatacaaatttcttttttgacaatatagattagtatgcaggagccaattattatctttatacttctatttactaaccactttctgttttttttaaaatggatcaattaacatggtttttaaatggagtatctaacagcattcattagatttctgtttgattatttaattactcactctaatgtatgaaaaggcaaggtagaagatgctaccaaagtacagacgcttctgttcagtgccactctgccagagtgggtgaataagctctctatgaggtttctgaaagttgacaggaaaacagttgatcttgtcggtaatgagaaactgaaggccagtgcatctgttaagcaccttgctcttccttgtaacaaggcagcaagggcacaagttattccagacattatccgatgttatagccatggaggtcgaaccatcatcttcactgagacgaaggattctgcatcagagctttctggtaatactggtgttgctgtcatgctttatgagcccagatataagcacagtgtcagcagactagaaagggagtctggggttaaatttgagcatatctctgcgccacaacccactgatgtagcacaatctgctggcagtgaagctgcagatgcaattgcgagtgtgtcagacagtgttattcctatcttcaggcagcaagcagagcagttgctaagctcttccagtctgtctgcagctgacttgcttgccaaagcacttgcaaaggcagttggttacacggacataaagaaaagatcattgttatcttccttggaggattacagtacactacatcttcaaactggcagaccgatgtggtcacctgggtttgcttttactatattgaaaaggttcatgccagaagataaacttgcagatgtaaagggtgccaccctcaccgctgatggaacaggagttgtatttgatgttcctgcagcagatgttgaagattacattcaagcttcggagagtgccgcacaggtgacaattgatgaagtcaagcaactgccacccttgcaagagaaggaccagtcgagaggcaactctgggggaggaagatttggccatggaggtggccggagattttctggtggtggtggcggcggcagagggttttctggccggggaggtggcggcagagggttttctggcagaggaggcggcggcagtagatttaacaggaggaattagaagctgcttcaatctttatggacatttcagaattcagagaactatgtttgtgttcgacgtagttttgatgaagagggagggaatcgtctcagttttggctgcaactgtatcgtgcttttgtttatttgttagccttcgtcaacgaaggcttattttgttagtgatataattgaggcatggggaagagggggaggtaacagtctcagttttggctgcaaattgtatcgtgctattgtttatttgttagtgttcgtcaacgaaggcttatttgttagtgcttttattgtggcgtggtgaagagggaggaaatagtctcaattttggctgcaaccgtgtcgtgcttttctttctaagagcatcatcacaagtgaagttagaaacccag

SEQ ID NO: 211610 - DNA, 2542 bp, Zea Mays
cgggcacgtgcgcacgcgccgcactagggtttccgcagcatacctacaagtactcgaaaccccgtctctctccccctcttttccggctgcgccttcccctcgcagccgccagccctcaacgttcctaccagctgccaccgcctgttacccgtgatgtctcccgcccttgccgctggcgtggagcccatggccgtcgacgattccgcctccaagaaggccaagcgcaagcagctcaaggccgccgccgccgccgcggaggcagaggcggaggccgcttcggtcaagaagaaagagaagaaagagaagaagcgaaaggtgaaggagccgtcccctccgctcccatcggccgcgtcctctgatgaggaagagaaaagcagcaccagctccgaggagacagcacccgcggcgaaaaaagcgaaggagaagacgaagaagaatgttgatgtctcgtcttcagcctcagatgacgatggcgagatcacagccagcagcgatgaggaccccgcggacccgaacgcgctgacgaacttcaggatatcggagtcgctgaggcagagcctcaggtccaaggggatcaagtcactgttccccattcaggccaccactttcgatctcgtactcgatggcagcgacttggttggccgagcgcgcaccggtcagggaaaaactttggcttttgtcttgcccatattggagtctttggttaatggggcaaacaaggcatctagacggactgaacatggcaggaccccaagtgttctcgttctactaccaacaagagagctggccaatcaggtgcacgctgactttgagttttatggtgcaacatttgggctctctgcatgttgtgtgtatgggggatcaccttatcgtcctcaagaaatggcattgagaagaggtgtggatattgttgttggaactcctggtcgtgtcaaggatttcattgttaaaggaactctcaatttgaaatgcttgaaattccgtgtccttgatgaagctgatgagatgctaaacatgggttttgttgatgatgtcgagctcattcttggcaaggtagaagatgctaccaaagtacagacgcttctgttcagtgccactctgccagagtgggtgaataagctctctatgaggtttctgaaagttgacaggaaaacagttgatcttgtcggtaatgagaaactgaaggccagtgcatctgttaagcaccttgctcttccttgtaacaaggcagcaagggcacaagttattccagacattatccgatgttatagccatggaggtcgaaccatcatcttcactgagacgaaggattctgcatcagagctttctggtttgattcatggatcccgtgccttgcatggagatgtagcgcaagcgcagcgtgaagtaattcttgctggattccgtagcgggaagttccaagttttggttgcgacaaatgtggcggcgcgtggtctggatattaatgatgtgcagcttatcattcagtgtgaacctccccgggatgttgaagcttacatacaccggtcaggtcggacagggagagcaggtaatactggtgttgctgtcatgctttatgagcccagatataagcacagtgtcagcagactagaaagggagtctggggttaaatttgagcatatctctgcgccacaacccactgatgtagcacaatctgctggcagtgaagctgcagatgcaattgcgagtgtgtcagacagtgttattcctatcttcaggcagcaagcagagcagttgctaagctcttccagtctgtctgcagctgacttgcttgccaaagcacttgcaaaggcagttggttacacggacataaagaaaagatcattgttatcttccttggaggattacagtacactacatcttcaaactggcagaccgatgtggtcacctgggtttgcttttactatattgaaaaggttcatgccagaagataaacttgcagatgtaaagggtgccaccctcaccgctgatggaacaggagttgtatttgatgttcctgcagcagatgttgaagattacattcaagcttcggagagtgccgcacaggtgacaattgatgaagtcaagcaactgccacccttgcaagagaaggaccagtcgagaggcggcggcagtagatttaacaggaggaattagaagctgcttcaatctttatggacatttcagaattcagagaactatgtttgtgttcgacgtagttttgatgaagagggagggaatcgtctcagttttggctgcaactgtatcgtgcttttgtttatttgttagccttcgtcaacgaaggcttattttgttagtgatataattgaggcatggggaagagggggaggtaacagtctcagttttggctgcaaattgtatcgtgctattgtttatttgttagtgttcgtcaacgaaggcttatttgttagtgcttttattgtggcgtggtgaagagggaggaaatagtctcaattttggctgcaaccgtgtcgtgcttttctttctaagagcatcatcacaagtgaagttagaaacccag

SEQ ID NO: 211611 - DNA, 1066 bp, Zea Mays
atcctctcctgggtcctggcttctccttccactccggagatcgacggctgcttgccgcactcgcgctcgctcccacggccggcaaccatggccgccgccgctgccgcggtgccagccaccttcctctcgggcctcccctctccacggaccccgtctcctgtgctccactcgcccgtacagagagcccatcccgtcgccgctcctctcttcctctccgccaagcgccgcgcctatgcctgcgccgccacggcctccggctccttctattcctccaactcaggaaatcaaacctcactgatgccgtcgttcagctttgcatttgacgaaggttcttctagttccaaaaggctatatagatggaagagggtattgcttaaagtaagtggagaagctcttgccggcgaccacacagaaaacatcgacccaaagattacaatggctattgcaagagaggttgcttctgtcaccaagctaggtgtagaggttgctattgttgttggcggtggcaatatctttcgtggggcctcttgggctggatgtagtggtcttgaccgctcatctgcagattacatcggcatgttggccactgtgatgaatgctatatttcttcaagcaacaatggagagcatcggaataccgacccgtgtccaaactgccttccgtatgtcagaagttgcagaaccgtacatacgccgaagagctgtaaggcatttagagaaaggaagagttgtcatatttgctgctggaacagggaacccattcttcacgacggatacagctgctgctctccgttgtgccgaaatcaacgcagaggtaatgctgaaagcaacaaatgttgacggtgtgtacgattcagaccccaggcagaacccaaatgcccgccttcttgagactgtgagctaccatgaagttacggcaagagatctctctgtcatggatatgactgctattacactatgccaagaaaacaacatccccatcgtcgtgtttaacttgcaagagcctggaaacattgcaaaggctattgtcggtaagaagcgaaatatgaagaagagctcgtcgtgca

SEQ ID NO: 211612 - DNA, 1440 bp, Zea Mays
atcctctcctgggtcctggcttctccttccactccggagatcgacggctgcttgccgcactcgcgctcgctcccacggccggcaaccatggccgccgccgctgccgcggtgccagccaccttcctctcgggcctcccctctccacggaccccgtctcctgtgctccactcgcccgtacagagagcccatcccgtcgccgctcctctcttcctctccgccaagcgccgcgcctatgcctgcgccgccacggcctccggctccttctattcctccaactcaggctttgcatttgacgaaggttcttctagttccaaaaggctatatagatggaagagggtattgcttaaagtaagtggagaagctcttgccggcgaccacacagaaaacatcgacccaaagattacaatggctattgcaagagaggttgcttctgtcaccaagctaggtgtagaggttgctattgttgttggcggtggcaatatctttcgtggggcctcttgggctggatgtagtggtcttgaccgctcatctgcagattacatcggcatgttggccactgtgatgaatgctatatttcttcaagcaacaatggagagcatcggaataccgacccgtgtccaaactgccttccgtatgtcagaagttgcagaaccgtacatacgccgaagagctgtaaggcatttagagaaaggaagagttgtcatatttgctgctggaacagggaacccattcttcacgacggatacagctgctgctctccgttgtgccgaaatcaacgcagaggtaatgctgaaagcaacaaatgttgacggtgtgtacgattcagaccccaggcagaacccaaatgcccgccttcttgagactgtgagctaccatgaagttacggcaagagatctctctgtcatggatatgactgctattacactatgccaagaaaacaacatccccatcgtcgtgtttaacttgcaagagcctggaaacattgcaaaggctattgtcggtaagaaggttggtaccttcgtcggatgcaaaagaaatcagaaacgaaatgaaaacacactggttgaagaaagaagattggtcaatgaggtgtgagctccagagctgaaagagttggggctctctctcttgtcttatttagtttatgtatatgcatagaaggttttaggttggattagggttaggtgttggtgctggaattacattagattagctatcaattcttgcagtcgtcatgtttctcttttctttcgaggagaacatctctattatatagagtattaggtttagagggtgtttgaatgcactagaactaatagtcggtgactaaaattagttgagatattcaaacaccccagctaatagttcagctattagctatttttggtaaattagttaatagttaggtagctatttgttagctagctaatttcactgagg

SEQ ID NO: 211613 - DNA, 1413 bp, Zea Mays
atcctctcctgggtcctggcttctccttccactccggagatcgacggctgcttgccgcactcgcgctcgctcccacggccggcaaccatggccgccgccgctgccgcggtgccagccaccttcctctcgggcctcccctctccacggaccccgtctcctgtgctccactcgcccgtacagagagcccatcccgtcgccgctcctctcttcctctccgccaagcgccgcgcctatgcctgcgccgccacggcctccggctccttctattcctccaactcaggttccaaaaggctatatagatggaagagggtattgcttaaagtaagtggagaagctcttgccggcgaccacacagaaaacatcgacccaaagattacaatggctattgcaagagaggttgcttctgtcaccaagctaggtgtagaggttgctattgttgttggcggtggcaatatctttcgtggggcctcttgggctggatgtagtggtcttgaccgctcatctgcagattacatcggcatgttggccactgtgatgaatgctatatttcttcaagcaacaatggagagcatcggaataccgacccgtgtccaaactgccttccgtatgtcagaagttgcagaaccgtacatacgccgaagagctgtaaggcatttagagaaaggaagagttgtcatatttgctgctggaacagggaacccattcttcacgacggatacagctgctgctctccgttgtgccgaaatcaacgcagaggtaatgctgaaagcaacaaatgttgacggtgtgtacgattcagaccccaggcagaacccaaatgcccgccttcttgagactgtgagctaccatgaagttacggcaagagatctctctgtcatggatatgactgctattacactatgccaagaaaacaacatccccatcgtcgtgtttaacttgcaagagcctggaaacattgcaaaggctattgtcggtaagaaggttggtaccttcgtcggatgcaaaagaaatcagaaacgaaatgaaaacacactggttgaagaaagaagattggtcaatgaggtgtgagctccagagctgaaagagttggggctctctctcttgtcttatttagtttatgtatatgcatagaaggttttaggttggattagggttaggtgttggtgctggaattacattagattagctatcaattcttgcagtcgtcatgtttctcttttctttcgaggagaacatctctattatatagagtattaggtttagagggtgtttgaatgcactagaactaatagtcggtgactaaaattagttgagatattcaaacaccccagctaatagttcagctattagctatttttggtaaattagttaatagttaggtagctatttgttagctagctaatttcactgagg

SEQ ID NO: 211614 - DNA, 2202 bp, Zea Mays
aaatgtgtttgtccagtattgtatcgatagaacaaacgacgaattcgtccttggattactaggcagatgggttatccaccgataacggatagacgacttcaccaattttttttataaacacacccttaaacatcccaagacatcactgtacatgccgtgaggtggtacaatcctgagtcctaggtcaattggtcaaatccccgctcgagcttgataaaacacgcaaggctgtctgcctgtctctgctcccatctagaaatccacttcgattcgccctggacgctcctgcctcctgctagtcgacgcgcaatccttggcaatctggcagacaggtgaggcgctgagcctgctactactaactaggagccgcggcgggaaatgagggatgcggaggcggcgtcgcgccggcggtggacgctggtgctggtgaacatggcgtcggtgctggagaaggcagacgaggtgttgctgcccgccgtgtacaaggaggtgggcacggcgctgggcgcttctccgaccgcgctgggctccctcaccctctgccgcgcgctcgtccaggccgcctgctacccgctcgccgcctacgcctccgcgcgccacgatcgggcccgtgtcgtcgccgtgggagccttcctctgggccgccgccaccttcctcgtcgccgtctccggcagcttcctccagcaacctgtggctcgcgcgctcgcatacgcatacgcatacgcactgcgcagatggcgatctcgcggggcctcaacggcatcggtctcgcgctggtcctcccggcgatcagctcgctcgtcgccgactacaccgatgaccacacccgtggcgcggccttcgggtggctgcagatgacctgcaacctcggctccatcctggggggctctttcggcgtgctgctcgcgccagtcaccttcctcggcgtcgcagggtggcggctcgccttccactccgtggccgtgatcagcgtcgcgctgggcgtgctcatgtggctcttcgccgcggacccgagcccggccgccaagtgcaagaccgcggcctccgcgggggaggaggccaaagagctgctccagcacgccaggcgcgtcctcggggtgaccacgttccagatcatcgtggcgcaggggatcgccggctccatcccgtggtccgcgctcaacttctccgccatgtggctggagctcgtcgggttcacgaattggcagaccagcgtcatcacggggctgtacctgttcgccaccgctctcggcgcgctctttgggggcctcgtcggagaccctgtcgccagacggttccccaacactggtaggatcgccctggcgcagataagctcagcgtccgcgctcccactcggcgccatcctgctgctggcgttgcccaatgacccgtccaccggtgtggcgcacgccgttacattcttcgtcatggggttcgccatctcctggaacgcatcgtcgaccaacaatcccatcttcgcggagattgtgccggagaaggcgaggacgacggtctacgcactggacaagtgtttcgaagcagtgttcgcgtcgtttgcgtctcccatcgtcggtgttcttgcagagcgcgtgttcggctataagccggtctcgtccgacacgagcgtggacacggacagggagaatgctgccgcattggcaaaggctgtctacacggagatcgccgtgcccatggccatctgttgcctgacctacaccttcctgtactacacgtacccccgagacagggagcgtgctcgaaaggaccttctgatggcatcggatgaccacctcggtggagaagccaatgacaatgagtcaagtgcggttcatacactggtagacgaagaatcttctgtcagctccttaaatcagaggctaatatcttgaggaggctagctgcaggtggagatggggaagtccaccatcgtttcctggactctgtctctctcattcatgtgtggctccacggtttcagattcgccgaaaccgtcattaccggttaccacgcatggaaatgcgaaatctacagaccatatttgcatctaaactcttaggcctactttggaaactcaacccccttcggaattgaaggatgttcagagaaaaataaactaatttctctctcaataagaaacgcaactctttagacatgataaaaaagagcgtttgagttttcaacctaacccttattaaatttgat

SEQ ID NO: 211615 - DNA, 1294 bp, Zea Mays
cttaaacatcccaagacatcactgtacatgccgtgaggtggtacaatcctgagtcctaggtcaattggtcaaatccccgctcgagcttgataaaacacgcaaggctgtctgcctgtctctgctcccatctagaaatccacttcgattcgccctggacgctcctgcctcctgctagtcgacgcgcaatccttggcaatctggcagacaggtgaggcgctgagcctgctactactaactaggagccgcggcgggaaatgagggatgcggaggcggcgtcgcgccggcggtggacgctggtgctggtgaacatggcgtcggtgctggagaaggcagacgaggtgttgctgcccgccgtgtacaaggaggtgggcacggcgctgggcgcttctccgaccgcgctgggctccctcaccctctgccgcgcgctcgtccaggccgcctgctacccgctcgccgcctacgcctccgcgcgccacgatcgggcccgtgtcgtcgccgtgggagccttcctctgggccgccgccaccttcctcgtcgccgtctccggcagcttcctccagtcccatcttcgcggagattgtgccggagaaggcgaggacgacggtctacgcactggacaagtgtttcgaagcagtgttcgcgtcgtttgcgtctcccatcgtcggtgttcttgcagagcgcgtgttcggctataagccggtctcgtccgacacgagcgtggacacggacagggagaatgctgccgcattggcaaaggctgtctacacggagatcgccgtgcccatggccatctgttgcctgacctacaccttcctgtactacacgtacccccgagacagggagcgtgctcgaaaggaccttctgatggcatcggatgaccacctcggtggagaagccaatgacaatgagtcaagtgcggttcatacactggtagacgaagaatcttctgtcagctccttaaatcagaggctaatatcttgaggaggctagctgcaggtggagatggggaagtccaccatcgtttcctggactctgtctctctcattcatgtgtggctccacggtttcagattcgccgaaaccgtcattaccggttaccacgcatggaaatgcgaaatctacagaccatatttgcatctaaactcttaggcctactttggaaactcaacccccttcggaattgaaggatgttcagagaaaaataaactaatttctctctcaataagaaacgcaactctttagacatgataaaaaagagcgtttgagttttcaacctaacccttattaaatttgat

SEQ ID NO: 211616 - DNA, 3613 bp, Zea Mays
acccgagcccgaccggcgaagaacgcccagcgcggtggcgtgcggtcggagcggtggaatcgaagccctcctctgaaaaatccctttcttcgcctatcgcaccgcatcgcgtttccgatcatctgtccccgcaccggttcccccatcctccccaccttccttgcgtgccgctgccgcttccacttcctcagttccctctcccactccactcgattctcgatcccaagcagcggcgcacggcgcaactaaccgatatatttttctatattcgattgcgtgccgctttacatccacgccttgaagaaggtaggagaagcatataattgaaagaagcatacaatcatacaccgaactgatcgaagaggggaaaaggggacaatcgggcgatggaggcgtgctgctgctcgtcctcatcggcgccgtcggcgtccatcctcgccgccgcgccggacgtagccctccgccgtcgtatccccgcggcggcgggagggaggacgccggcgcgcccgctgcgcgtctccgcggtgatgctggccaccgcggtcccgcggcggcgcggaccgggcgtcatcagggcggtgttcgagcggttcacggagcgggcggtgaaggcggtggtgttctcgcagcgggaggcgcgcgggatgggggacgacactgttgcgccgcaccacctgctgctgggcctcattgccgaggaccggaccctcgtggggttcctcggttccggcctccgcgtcgagcgcgcgcgagaggcgtgccgcgacgccctgggtaaggccgggcctgcgcaagcggccaccgggctggccacggacgtgccattctcggctgcaagcaagcgggtcttcgaggccgccgtcgagttctccaggaacattggctgcaacttcatctcgccggagcacattgctctcggcctcttcgacctggacgatcccaccaccaacagaatcctcaagaggagcagatccaagtcagctagcaaaacaggcacttaaacgtgtccaaggagagcttgccaaagatggcagagagccagtggggttatcttctttcaaagtacgtgagaggtctgccgcgggagctggcaagtctgcaattgtcaagtattcaaataaaaagaaagagaagagtgcactagctcagttttgtgtggatttgactatgcgagcaagtggaggattaattgatcctgttattggtcgcaaggaggagatcgaaagagtagttcagattatatgccggcgaacaaagaacaatcctattctgttgggtgaagcaggtgttggtaaaacagctattgctgagggcttagctctcaaaattgctaatggtgatgttcctatcttccttgtgggaaaacgtatattatcattggatgttgctctacttatggctggtgcaaaagaaaggggtgaactggaagccaggattactagtttacttcgtgaagtacgcaaagcaggtgatgttatgctattcatcgatgaggtccatactcttattggatctggaattgctgggagagggagtaaaggagctggccttgatattgccaatttgctgaagcctgcactctctagaggtgaattgcagtgcattgcgtcgacaactctagatgaacaccgtttgcattttgagaaggataaggctttggctcgcagattccagccagtattggtgaatgagcctagccaggaggacgctgtcaagatattacttggtctgcgtgagaaatatgagacttaccataaatgcaaatacactttagaagggatcaatgcagcagtttacttgtcagcaagatacatccctgacaggcatcttcctgataaggcgattgatctgattgatgaagctggcagtagagctcggatggaatcatttaaaaggaagaaggaagaacaatgctccattctctccaagtcaccagacgaatattggcaagagattagagctgttcagagtacacatgaagtggcactggctaacaggttgaagtattctcttgatgagaatgacaaagatgatggtgttaatattgaagtcataggggacaacaagattgcttcgccatcgatgcctccaacttcagtcgatgaacctattctggttggttcagaggaaattgcaagagttacatcattgtggtcagggataccagtccagaagttgactgcagatgaaacaaaacttctagttggactagatgatgaacttagaaagcgtgtcataggtcaagacgatgctgttgtggccatatctagagctgtgaagcgatctcgtgttggcctgaatgatcctgacagacctattgcaacactactattctgtggtccaactggagttggaaaaactgaactcacaaaagcactagcagcgagttattttggatctgtgggttatgccttccttcttgcatcattctcgcgttctgaaaagacatgttgcatggatcatgtcttgaaaaagttatttattcgatttgcaggaatcagctatgattaggttagatatgagcgaatatatggagaggcatgctgtgagcaagcttataggctctcctccggggtacatgggatttggtgaaggtggaactttgactgaagcagtccggagaacaccattcactgtagtcttgcttgatgaaatagagaaagctcatccagatattttcaacattcttctccaagtatttgaagatggacacctgacagactcacaaggacgcagagtttccttcaaaaatacgttgattgtcatgacatcaaatgttggttcaacatcaatctcaagcggaaggaggagtataggtttctcaacacaaagggatacagaggagaccacctatgctgcgatgaaatcacttgtgatggaagagctgaaggcattttttcggcctgaattgctcaatagattggatgaagtggttgtattccaccctcttgaaaagacccagatgatggctattctcaacctaattctacaagaagtcaagagtagacttctagcccttgggattggcctagaggtatcagaatcaatgaagatcctgatttctcagcaagggtatgacagaagctatggggcacggccacttcgaagagccgttactcagctggttgaggatgttatcagtgaagcaattctctttggacagttcaagcctggtgacacgatattgatgggcactgatgccacagggaagccttgcttgagccgactcaatgatcagaccgtccaattgtccgacactgctccaacaatatgaacatcccagcaccctgtgtatatagttgcagattacacatttattctgtacatagaatccccatctcagcgtggacataatcttccagatgttggtttgtctccacaacattataatgtaaatcttatccttaaatccaattgtacatatttttattattaatgttagaccgtgttgcgtgtataggcctgaggtctagttcatgtgtagtgtatatattgtactctttttaatatttagctattctcatttatcatggtatgagactagctccaataaagatctctaaagagtcttgtaccctaaatttagaggatgaggtcgtcctctactcccttc

SEQ ID NO: 211617 - DNA, 3598 bp, Zea Mays
gacgcagccacggaacgcgtctcagtccacacacgcagacacccgttcggataggccccgcgctggcaggcgcgccgcgcgctccggacccgagcccgaccggcgaagaacgcccagcgcggtggcgtgcggtcggagcggtggaatcgaagccctcctctgaaaaatccctttcttcgcctatcgcaccgcatcgcgtttccgatcatctgtccccgcaccggttcccccatcctccccaccttccttgcgtgccgctgccgcttccacttcctcagttccctctcccactccactcgattctcgatcccaagcagcggcgcacggcgcaactaaccgatatatttttctatattcgattgcgtgccgctttacatccacgccttgaagaaggtaggagaagcatataattgaaagaagcatacaatcatacaccgaactgatcgaagaggggaaaaggggacaatcgggcgatggaggcgtgctgctgctcgtcctcatcggcgccgtcggcgtccatcctcgccgccgcgccggacgtagccctccgccgtcgtatccccgcggcggcgggagggaggacgccggcgcgcccgctgcgcgtctccgcggtgatgctggccaccgcggtcccgcggcggcgcggaccgggcgtcatcagggcggtgttcgagcggttcacggagcgggcggtgaaggcggtggtgttctcgcagcgggaggcgcgcgggatgggggacgacactgttgcgccgcaccacctgctgctgggcctcattgccgaggaccggaccctcgtggggttcctcggttccggcctccgcgtcgagcgcgcgcgagaggcgtgccgcgacgccctgggtaaggccgggcctgcgcaagcggccaccgggctggccacggacgtgccattctcggctgcaagcaagcgggtcttcgaggccgccgtcgagttctccaggaacattggctgcaacttcatctcgccggagcacattgctctcggcctcttcgacctggacgatcccaccaccaacagaatcctcaagagcttaggagcagatccaagtcagctagcaaaacaggcacttaaacgtgtccaaggagagcttgccaaagatggcagagagccagtggggttatcttctttcaaagtacgtgagaggtctgccgcgggagctggcaagtctgcaattgtcaagtattcaaataaaaagaaagagaagagtgcactagctcagttttgtgtggatttgactatgcgagcaagtggaggattaattgatcctgttattggtcgcaaggaggagatcgaaagagtagttcagattatatgccggcgaacaaagaacaatcctattctgttgggtgaagcaggtgttggtaaaacagctattgctgagggcttagctctcaaaattgctaatggtgatgttcctatcttccttgtgggaaaacgtatattatcattggatgttgctctacttatggctggtgcaaaagaaaggggtgaactggaagccaggattactagtttacttcgtgaagtgatgttatgctattcatcgatgaggtccatactcttattggatctggaattgctgggagagggagtaaaggagctggccttgatattgccaatttgctgaagcctgcactctctagaggtgaattgcagtgcattgcgtcgacaactctagatgaacaccgtttgcattttgagaaggataaggctttggctcgcagattccagccagtattggtgaatgagcctagccaggaggacgctgtcaagatattacttggtctgcgtgagaaatatgagacttaccataaatgcaaatacactttagaagggatcaatgcagcagtttacttgtcagcaagatacatccctgacaggcatcttcctgataaggcgattgatctgattgatgaagctggcagtagagctcggatggaatcatttaaaaggaagaaggaagaacaatgctccattctctccaagtcaccagacgaatattggcaagagattagagctgttcagagtacacatgaagtggcactggctaacaggttgaagtattctcttgatgagaatgacaaagatgatggtgttaatattgaagtcataggggacaacaagattgcttcgccatcgatgcctccaacttcagtcgatgaacctattctggttggttcagaggaaattgcaagagttacatcattgtggtcagggataccagtccagaagttgactgcagatgaaacaaaacttctagttggactagatgatgaacttagaaagcgtgtcataggtcaagacgatgctgttgtggccatatctagagctgtgaagcgatctcgtgttggcctgaatgatcctgacagacctattgcaacactactattctgtggtccaactggagttggaaaaactgaactcacaaaagcactagcagcgagttattttggatctgaatcagctatgattaggttagatatgagcgaatatatggagaggcatgctgtgagcaagcttataggctctcctccggggtacatgggatttggtgaaggtggaactttgactgaagcagtccggagaacaccattcactgtagtcttgcttgatgaaatagagaaagctcatccagatattttcaacattcttctccaagtatttgaagatggacacctgacagactcacaaggacgcagagtttccttcaaaaatacgttgattgtcatgacatcaaatgttggttcaacatcaatctcaagcggaaggaggagtataggtttctcaacacaaagggatacagaggagaccacctatgctgcgatgaaatcacttgtgatggaagagctgaaggcattttttcggcctgaattgctcaatagattggatgaagtggttgtattccaccctcttgaaaagacccagatgatggctattctcaacctaattctacaagaagtcaagagtagacttctagcccttgggattggcctagaggtatcagaatcaatgaagatcctgatttctcagcaagggtatgacagaagctatggggcacggccacttcgaagagccgttactcagctggttgaggatgttatcagtgaagcaattctctttggacagttcaagcctggtgacacgatattgatgggcactgatgccacagggaagccttgcttgagccgactcaatgatcagaccgtccaattgtccgacactgctccaacaatatgaacatcccagcaccctgtgtatatagttgcagattacacatttattctgtacatagaatccccatctcagcgtggacataatcttccagatgttggtttgtctccacaacattataatgtaaatcttatccttaaatccaattgtacatatttttattattaatgttagaccgtgttgcgtgtataggcctgaggtctagttcatgtgtagtgtatatattgtactctttttaatatttagctattctcatttatcatggtatgagactagctccaataaagatctctaaagagtcttgtaccctaaatttagaggatgaggtcgtcctctactcccttc

SEQ ID NO: 211618 - DNA, 1012 bp, Zea Mays
ctactattcacactatatggccaaatagtattttatttttcattgggcaatcctagattttggaatgaataccttgcactgtgtaacttgagctaccgtgcatttaccatgtgagagagtttggtcaatctgataaagccctgttgattcatcagtggtggcaagtgcaacagcaacattcgtgatgatgttctcctcctccctctctgtggtggagttttacttcctgcacagattccccctgccttttgctggctacctcatcttcatttccatattggctggattctggggccagtgtttggttaggaagatcgtgcatgtgctcaagagagcatcgcttattgtcttcatcctctcctctgttatcttcgtcagtgctcttacgatgggtgtcgttggaacccagaagagcatttcgatgatcaacaatcacgaatatatggggttcctcaacttctgcgagtaactcaaacaccatcagactgtcgatccgtccgggagaatccaggccaatgcctaattgacctcatctccctcaaaatctagaagaataaagtcgccgagtatgtgcacaagttagctcctcgccaacatgtgcgcatttagaccgacagagtcgctgtagtgaattcagctcgtgttagctcctggctaacgagctgaccatacggctttagttttgtgaagtgggcgcgatttcgtcatgtcatgcatgtgttagctcctggctaacctgcaaatgcgtgtgttggtgcaggtttttgtcacgtctgcgtcagctcctggctgaccagcagttgtttgtcgttcattctctgcgtcagctcctggctgaccagcagttatttgttgttcattcttgcgctagcaccaggctaggctgcaaaactgcaaatatttgttgcatggaacattgtaaatatcagtcaattcccattctgtttgtgcaagccgagtgcgtttcaagccgtatttccgtgaaaatcagaacatgttcgctgcggcttcc

SEQ ID NO: 211619 - DNA, 901 bp, Zea Mays
cattgggcagcccaagattttgtaatggatacctttcttgcattgtgtggcaagtgcaacagcaacattcgtgatgatgttctcctcctccctctctgtggtggagttttacttcctgcacagattccccctgccttttgctggctacctcatcttcatttccatattggctggattctggggccagtgtttggttaggaagatcgtgcatgtgctcaagagagcatcgcttattgtcttcatcctctcctctgttatcttcgtcagtgctcttacgatgggtgtcgttggaacccagaagagcatttcgatgatcaacaatcacgaatatatggggttcctcaacttctgcgagtaactcaaacaccatcagactgtcgatccgtccgggagaatccaggccaatgcctaattgacctcatctccctcaaaatctagaagaataaagtcgccgagtatgtgcacaagttagctcctcgccaacatgtgcgcatttagaccgacagagtcgctgtagtgaattcagctcgtgttagctcctggctaacgagctgaccatacggctttagttttgtgaagtgggcgcgatttcgtcatgtcatgcatgtgttagctcctggctaacctgcaaatgcgtgtgttggtgcaggtttttgtcacgtctgcgtcagctcctggctgaccagcagttgtttgtcgttcattctctgcgtcagctcctggctgaccagcagttatttgttgttcattcttgcgctagcaccaggctaggctgcaaaactgcaaatatttgttgcatggaacattgtaaatatcagtcaattcccattctgtttgtgcaagccgagtgcgtttcaagccgtatttccgtgaaaatcagaacatgttcgctgcggcttcc

SEQ ID NO: 211620 - DNA, 2164 bp, Zea Mays
gtctggctccccgtgaccgatctcgtaatctcatccgcacccgcctggccgccttgcctagccttgcctgctctcctcatgccctggccgccgcctataaaagagcgaggcggaggggcaggcgccggccgttcttctctctccttcttcctcggtcctctcctctccgcatttcgggcggccacttgtggcggcgtagctagcgtactacagctccctgcatggtgatggaggggcgcacgggctcactctacggccgcctcaacaagagcagcacgcgggggttcctcgcctacaccgccgccggggctgcctgcgcggctgtcctcgcctgcttcgtgctctccgccgcggactcgccggcatctgcggcgcgcaacgatggcgagcgcctccgcctgtcctcgcgctcaccgcgcgtctggcccgacctcgcgttcaactggcgggtggtggtcgccaccgtcgtcgggttcctcggttccgcgtttggcaccgtcggcggcgtcggcggaggcgggatcttcgtgcccatgctcaacctcgtcgtcggcttcgacaccaaatccgccgccgcgctctccaaatgcatgatcatgggggcctcggcgtcatcagtttggtacaacctccaggtgtcgcacccgaccaaggaggcgcccgtcatcgactacaagctcgcgttgctcttccagcccatgcttatgctcggcataaccatcggcgtagagctcagcgtcatcttcccatactggctaatcactgtcctcattataatcctcttcgtaggcacctcgtcgagatccttctacaagggcattctgatgtggagggaggagtccaggattctgatggagacacgcgggcgagaagagcaatccaagtctacctgcgctgcaagtgatgtggtcattgatcccagttatggggagcccctcctgactcaacctcagcccaagaagtctgcatgggagactttcatgttcaatctgaggtggaagaatatccttgtgttaatgtctgtctggtcattgttcttggtgctgcaagttctcaagaataattcaaaatcatgcagctctttctactgggtgataaacgttctacaggttccagttgcggtaagtgtgttcttgtgggaggccatgcagttatgtagggagagtcatgcacgacgtatgaatgggaacctggaatgtgtgtgtgaggcctctattgagtggtcaccagcacaactgatcttttgtgccttttgtggccttctcggtgggactgttggtggccttcttggatctggtggtgggttcatccttggcccacttcttcttgagcttgggtgcataccgcaggtggcaagtgcaacagcaacattcgtgatgatgttctcctcctccctctctgtgctggctacctcatcttcatttccatattggctggattctggggccagtgtttggttaggaagatcgtgcatgtgctcaagagagcatcgcttattgtcttcatcctctcctctgttatcttcgtcagtgctcttacgatgggtgtcgttggaacccagaagagcatttcgatgatcaacaatcacgaatatatggggttcctcaacttctgcgagtaactcaaacaccatcagactgtcgatccgtccgggagaatccaggccaatgcctaattgacctcatctccctcaaaatctagaagaataaagtcgccgagtatgtgcacaagttagctcctcgccaacatgtgcgcatttagaccgacagagtcgctgtagtgaattcagctcgtgttagctcctggctaacgagctgaccatacggctttagttttgtgaagtgggcgcgatttcgtcatgtcatgcatgtgttagctcctggctaacctgcaaatgcgtgtgttggtgcaggtttttgtcacgtctgcgtcagctcctggctgaccagcagttgtttgtcgttcattctctgcgtcagctcctggctgaccagcagttatttgttgttcattcttgcgctagcaccaggctaggctgcaaaactgcaaatatttgttgcatggaacattgtaaatatcagtcaattcccattctgtttgtgcaagccgagtgcgtttcaagccgtatttccgtgaaaatcagaacatgttcgctgcggcttcc

SEQ ID NO: 211621 - DNA, 2242 bp, Zea Mays
caaaatcgaaacacgcctccccctcctcgtctggctccccgtgaccgatctcgtaatctcatccgcacccgcctggccgccttgcctagccttgcctgctctcctcatgccctggccgccgcctataaaagagcgaggcggaggggcaggcgccggccgttcttctctctccttcttcctcggtcctctcctctccgcatttcgggcggccacttgtggcggcgtagctagcgtactacagctccctgcatggtgatggaggggcgcacgggctcactctacggccgcctcaacaagagcagcacgcgggggttcctcgcctacaccgccgccggggctgcctgcgcggctgtcctcgcctgcttcgtgctctccgccgcggactcgccggcatctgcggcgcgcaacgatggcgagcgcctccgcctgtcctcgcgctcaccgcgcgtctggcccgacctcgcgttcaactggcgggtggtggtcgccaccgtcgtcgggttcctcggttccgcgtttggcaccgtcggcggcgtcggcggaggcgggatcttcgtgcccatgctcaacctcgtcgtcggcttcgacaccaaatccgccgccgcgctctccaaatgcatgatcatgggggcctcggcgtcatcagtttggtacaacctccaggtgtcgcacccgaccaaggaggcgcccgtcatcgactacaagctcgcgttgctcttccagcccatgcttatgctcggcataaccatcggcgtagagctcagcgtcatcttcccatactggctaatcactgtcctcattataatcctcttcgtaggcacctcgtcgagatccttctacaagggcattctgatgtggagggaggagtccaggattctgatggagacacgcgggcgagaagagcaatccaagtctacctgcgctgcaagtgatgtggtcattgatcccagttatggggagcccctcctgactcaacctcagcccaagaagtctgcatgggagactttcatgttcaatctgaggtggaagaatatccttgtgttaatgtctgtctggtcattgttcttggtgctgcaagttctcaagaataattcaaaatcatgcagctctttctactgggtgataaacgttctacaggttccagttgcggtaagtgtgttcttgtgggaggccatgcagttatgtagggagagtcatgcacgacgtatgaatgggaacctggaatgtgtgtgtgaggcctctattgagtggtcaccagcacaactgatcttttgtgccttttgtggccttctcggtgggactgttggtggccttcttggatctggtggtgggttcatccttggcccacttcttcttgagcttgggtgcataccgcaggtggcaagtgcaacagcaacattcgtgatgatgttctcctcctccctctctgtggtggagttttacttcctgcacagattccccctgccttttggtaaatccatctggctacctcatcttcatttccatattggctggattctggggccagtgtttggttaggaagatcgtgcatgtgctcaagagagcatcgcttattgtcttcatcctctcctctgttatcttcgtcagtgctcttacgatgggtgtcgttggaacccagaagagcatttcgatgatcaacaatcacgaatatatggggttcctcaacttctgcgagtaactcaaacaccatcagactgtcgatccgtccgggagaatccaggccaatgcctaattgacctcatctccctcaaaatctagaagaataaagtcgccgagtatgtgcacaagttagctcctcgccaacatgtgcgcatttagaccgacagagtcgctgtagtgaattcagctcgtgttagctcctggctaacgagctgaccatacggctttagttttgtgaagtgggcgcgatttcgtcatgtcatgcatgtgttagctcctggctaacctgcaaatgcgtgtgttggtgcaggtttttgtcacgtctgcgtcagctcctggctgaccagcagttgtttgtcgttcattctctgcgtcagctcctggctgaccagcagttatttgttgttcattcttgcgctagcaccaggctaggctgcaaaactgcaaatatttgttgcatggaacattgtaaatatcagtcaattcccattctgtttgtgcaagccgagtgcgtttcaagccgtatttccgtgaaaatcagaacatgttcgctgcggcttcc

SEQ ID NO: 211622 - DNA, 2226 bp, Zea Mays
ccaaaatcgaaacacgcctccccctcctcgtctggctccccgtgaccgatctcgtaatctcatccgcacccgcctggccgccttgcctagccttgcctgctctcctcatgccctggccgccgcctataaaagagcgaggcggaggggcaggcgccggccgttcttctctctccttcttcctcggtcctctcctctccgcatttcgggcggccacttgtggcggcgtagctagcgtactacagctccctgcatggtgatggaggggcgcacgggctcactctacggccgcctcaacaagagcagcacgcgggggttcctcgcctacaccgccgccggggctgcctgcgcggctgtcctcgcctgcttcgtgctctccgccgcggactcgccggcatctgcggcgcgcaacgatggcgagcgcctccgcctgtcctcgcgctcaccgcgcgtctggcccgacctcgcgttcaactggcgggtggtggtcgccaccgtcgtcgggttcctcggttccgcgtttggcaccgtcggcggcgtcggcggaggcgggatcttcgtgcccatgctcaacctcgtcgtcggcttcgacaccaaatccgccgccgcgctctccaaatgcatgatcatgggggcctcggcgtcatcagtttggtacaacctccaggtgtcgcacccgaccaaggaggcgcccgtcatcgactacaagctcgcgttgctcttccagcccatgcttatgctcggcataaccatcggcgtagagctcagcgtcatcttcccatactggctaatcactgtcctcattataatcctcttcgtaggcacctcgtcgagatccttctacaagggcattctgatgtggagggaggagtccaggattctgatggagacacgcgggcgagaagagcaatccaagtctacctgcgctgcaagtgatgtggtcattgatcccagttatggggagcccctcctgactcaacctcagcccaagaagtctgcatgggagactttcatgttcaatctgaggtggaagaatatccttgtgttaatgtctgtctggtcattgttcttggtgctgcaagttctcaagaataattcaaaatcatgcagctctttctactgggtgataaacgttctacagttgcggtaagtgtgttcttgtgggaggccatgcagttatgtagggagagtcatgcacgacgtatgaatgggaacctggaatgtgtgtgtgaggcctctattgagtggtcaccagcacaactgatcttttgtgccttttgtggccttctcggtgggactgttggtggccttcttggatctggtggtgggttcatccttggcccacttcttcttgagcttgggtgcataccgcaggtggcaagtgcaacagcaacattcgtgatgatgttctcctcctccctctctgtggtggagttttacttcctgcacagattccccctgccttttgctggctacctcatcttcatttccatattggctggattctggggccagtgtttggttaggaagatcgtgcatgtgctcaagagagcatcgcttattgtcttcatcctctcctctgttatcttcgtcagtgctcttacgatgggtgtcgttggaacccagaagagcatttcgatgatcaacaatcacgaatatatggggttcctcaacttctgcgagtaactcaaacaccatcagactgtcgatccgtccgggagaatccaggccaatgcctaattgacctcatctccctcaaaatctagaagaataaagtcgccgagtatgtgcacaagttagctcctcgccaacatgtgcgcatttagaccgacagagtcgctgtagtgaattcagctcgtgttagctcctggctaacgagctgaccatacggctttagttttgtgaagtgggcgcgatttcgtcatgtcatgcatgtgttagctcctggctaacctgcaaatgcgtgtgttggtgcaggtttttgtcacgtctgcgtcagctcctggctgaccagcagttgtttgtcgttcattctctgcgtcagctcctggctgaccagcagttatttgttgttcattcttgcgctagcaccaggctaggctgcaaaactgcaaatatttgttgcatggaacattgtaaatatcagtcaattcccattctgtttgtgcaagccgagtgcgtttcaagccgtatttccgtgaaaatcagaacatgttcgctgcggcttcc

SEQ ID NO: 211623 - DNA, 2253 bp, Zea Mays
gcggttgcggcctgcggggcgatgccaaaatcgaaacacgcctccccctcctcgtctggctccccgtgaccgatctcgtaatctcatccgcacccgcctggccgccttgcctagccttgcctgctctcctcatgccctggccgccgcctataaaagagcgaggcggaggggcaggcgccggccgttcttctctctccttcttcctcggtcctctcctctccgcatttcgggcggccacttgtggcggcgtagctagcgtactacagctccctgcatggtgatggaggggcgcacgggctcactctacggccgcctcaacaagagcagcacgcgggggttcctcgcctacaccgccgccggggctgcctgcgcggctgtcctcgcctgcttcgtgctctccgccgcggactcgccggcatctgcggcgcgcaacgatggcgagcgcctccgcctgtcctcgcgctcaccgcgcgtctggcccgacctcgcgttcaactggcgggtggtggtcgccaccgtcgtcgggttcctcggttccgcgtttggcaccgtcggcggcgtcggcggaggcgggatcttcgtgcccatgctcaacctcgtcgtcggcttcgacaccaaatccgccgccgcgctctccaaatgcatgatcatgggggcctcggcgtcatcagtttggtacaacctccaggtgtcgcacccgaccaaggaggcgcccgtcatcgactacaagctcgcgttgctcttccagcccatgcttatgctcggcataaccatcggcgtagagctcagcgtcatcttcccatactggctaatcactgtcctcattataatcctcttcgcacctcgtcgagatccttctacaagggcattctgatgtggagggaggagtccaggattctgatggagacacgcgggcgagaagagcaatccaagtctacctgcgctgcaagtgatgtggtcattgatcccagttatggggagcccctcctgactcaacctcagcccaagaagtctgcatgggagactttcatgttcaatctgaggtggaagaatatccttgtgttaatgtctgtctggtcattgttcttggtgctgcaagttctcaagaataattcaaaatcatgcagctctttctactgggtgataaacgttctacaggttccagttgcggtaagtgtgttcttgtgggaggccatgcagttatgtagggagagtcatgcacgacgtatgaatgggaacctggaatgtgtgtgtgaggcctctattgagtggtcaccagcacaactgatcttttgtgccttttgtggccttctcggtgggactgttggtggccttcttggatctggtggtgggttcatccttggcccacttcttcttgagcttgggtgcataccgcaggtggcaagtgcaacagcaacattcgtgatgatgttctcctcctccctctctgtggtggagttttacttcctgcacagattccccctgccttttgctggctacctcatcttcatttccatattggctggattctggggccagtgtttggttaggaagatcgtgcatgtgctcaagagagcatcgcttattgtcttcatcctctcctctgttatcttcgtcagtgctcttacgatgggtgtcgttggaacccagaagagcatttcgatgatcaacaatcacgaatatatggggttcctcaacttctgcgagtaactcaaacaccatcagactgtcgatccgtccgggagaatccaggccaatgcctaattgacctcatctccctcaaaatctagaagaataaagtcgccgagtatgtgcacaagttagctcctcgccaacatgtgcgcatttagaccgacagagtcgctgtagtgaattcagctcgtgttagctcctggctaacgagctgaccatacggctttagttttgtgaagtgggcgcgatttcgtcatgtcatgcatgtgttagctcctggctaacctgcaaatgcgtgtgttggtgcaggtttttgtcacgtctgcgtcagctcctggctgaccagcagttgtttgtcgttcattctctgcgtcagctcctggctgaccagcagttatttgttgttcattcttgcgctagcaccaggctaggctgcaaaactgcaaatatttgttgcatggaacattgtaaatatcagtcaattcccattctgtttgtgcaagccgagtgcgtttcaagccgtatttccgtgaaaatcagaacatgttcgctgcggcttcc

SEQ ID NO: 211624 - DNA, 1089 bp, Zea Mays
ccagcaatccggccgcggccaggcagccaccagcagcgacaagaaatcgagaatcctcgtttcccattttgtggctggcgcgagcgtgcagcgtcacaggtttccggacggacgctttctatcgcaatcctatctatatatttatcccaaggcttcgtggtttttgttgctgctgctgctgtcacggccgccttccactcccacaagcttcagctagccttcttactcccgccgtcacccccgatccgagagcgagcatggcgcactctctcgccgcctccttctcgccggccgccgcccggcgccaggtcacaaatgtgattccaagctggacctcggtttccttccagagccacaggatgacttctgtatccatccgctcaagacaaaggctaagaaagagacagtggacaaggtttgcagtatagtgaaggagcagctggctcttcccgatgggaccgccatcactgccgaatcaaaattcgctgaacttggcgctgattcgctggatacggtcgagattgtgatgggcctcgaggaggcgttcaacataacagtcgacgaaacaagcgcacaggacatcgcaacagtgcaggacgctgcggaccttatcgagaagctcatgctggaggcacctccaaaggtcgtctagatccagcaaccttgcgatcgacgaccttgtgtttgatctatgttgtgtgttaatttgttcgtgttgccccatttgttctttcttgatgattcaagatgaggttttgtattggtgttgctgaggtgaattagatagccccaaaggccacatgaagcagatgaggacagttcattccactttgaatttgtatgttgtaacttgtagtgctgctatagagaaaccaatggactgttatgaagagtcaatgcaactgttgcttttttagttttgggaagtcacacacatgaaagtctgaatcagatgcagtactaattgttgagcttggggtgcagatatatgcaaataccaggatgtcaggtgcttccccatggtattgttaatgttaaccacaagtccagaaccacaagcgttaatgaattttcagctttgtggttgct

SEQ ID NO: 211625 - DNA, 1461 bp, Zea Mays
ccagcaatccggccgcggccaggcagccaccagcagcgacaagaaatcgagaatcctcgtttcccattttgtggctggcgcgagcgtgcagcgtcacaggtttccggacggacgctttctatcgcaatcctatctatatatttatcccaaggcttcgtggtttttgttgctgctgctgctgtcacggccgccttccactcccacaagcttcagctagccttcttactcccgccgtcacccccgatccgagagcgagcatggcgcactctctcgccgcctccttctcgccggccgccgcccggcgccaggtcacaaatgtgattccaagctggacctcggtttccttccagagccacaggatgacttctgtatccatccgctcaagacaaaggtctcttgggtttaagatttgctgttcggtatgcatcatttcatcctttgttgctagcaacagttgtttggtggatgaagcaacagcctatttgtagtagcttttcgtattgacagttatctttatttgctaacatcatacgggatactataattaacttgaattctttgtatagttagcaaaaaaaagatggaattatttagctatttgtatagaaagtacaaaccactagatggtgtgaagagtgtgacctggttcttgacagccatattgcctgtttctgagattgtcaacatgcgcttactcctgatgtgaagcagtcacatctttttgaagacctgaaatatcatcattctcatgtttattgattaggctaagaaagagacagtggacaaggtttgcagtatagtgaaggagcagctggctcttcccgatgggaccgccatcactgccgaatcaaaattcgctgaacttggcgctgattcgctggatacggtcgagattgtgatgggcctcgaggaggcgttcaacataacagtcgacgaaacaagcgcacaggacatcgcaacagtgcaggacgctgcggaccttatcgagaagctcatgctggaggcacctccaaaggtcgtctagatccagcaaccttgcgatcgacgaccttgtgtttgatctatgttgtgtgttaatttgttcgtgttgccccatttgttctttcttgatgattcaagatgaggttttgtattggtgttgctgaggtgaattagatagccccaaaggccacatgaagcagatgaggacagttcattccactttgaatttgtatgttgtaacttgtagtgctgctatagagaaaccaatggactgttatgaagagtcaatgcaactgttgcttttttagttttgggaagtcacacacatgaaagtctgaatcagatgcagtactaattgttgagcttggggtgcagatatatgcaaataccaggatgtcaggtgcttccccatggtattgttaatgttaaccacaagtccagaaccacaagcgttaatgaattttcagctttgtggttgct

SEQ ID NO: 211626 - DNA, 836 bp, Zea Mays
cagctttgaagttttttttagaaaagggtcacaaatgtgattccaagctggacctcggtttccttccagagccacaggatgacttctgtatccatccgctcaagacaaaggtctcttgggtttaagatttgctgttcggctaagaaagagacagtggacaaggtttgcagtatagtgaaggagcagctggctcttcccgatgggaccgccatcactgccgaatcaaaattcgctgaacttggcgctgattcgctggatacggtcgagattgtgatgggcctcgaggaggcgttcaacataacagtcgacgaaacaagcgcacaggacatcgcaacagtgcaggacgctgcggaccttatcgagaagctcatgctggaggcacctccaaaggtcgtctagatccagcaaccttgcgatcgacgaccttgtgtttgatctatgttgtgtgttaatttgttcgtgttgccccatttgttctttcttgatgattcaagatgaggttttgtattggtgttgctgaggtgaattagatagccccaaaggccacatgaagcagatgaggacagttcattccactttgaatttgtatgttgtaacttgtagtgctgctatagagaaaccaatggactgttatgaagagtcaatgcaactgttgcttttttagttttgggaagtcacacacatgaaagtctgaatcagatgcagtactaattgttgagcttggggtgcagatatatgcaaataccaggatgtcaggtgcttccccatggtattgttaatgttaaccacaagtccagaaccacaagcgttaatgaattttcagctttgtggttgct

SEQ ID NO: 211627 - DNA, 1501 bp, Zea Mays
cactccgtcagtctcccctccggcctcacgccgcgctcgcggtgctgcctcccgggctcccgttccagcattccaggctcgcatcgcacggcctggccccgcccgctccgacccttctcggcgacactcctcgtaggctcgtactggcacgtccccgctctgtcttctgcccaccaggcactagcgggtgcgggtccacgcttccaagggttccaaactctcggcggcgcaagcaatggcggcgcggggccgggagcactggtagtttcgcatatcgcggcggcttgttgccacctcgccatcgcagattatggggatcaacggcgaggagtgggaggagacggtactgggcgacggcgttgggaggcggaagggtggtgctgaggcttccggtttggtcgcatcctcctcctttgctgaggggatgggggaattcgtgctgaggtctatggacgccaggttctccggatcggtcgacgacgatgaatatgtctcgtctcggcagccagtatttggccatagtaaatcgacagctactacttctggtaccattaaagggcaagataacgtttttgtaaggtcatactctgataggttgctgaagtgtgacctcactttggatatgctatcagaaaatgagaagataaagataaccgagagattggtaaagatccagaatgatggtacagtggaggtagatgtgacgcgcagtgctcttgttgcctcagaactctcggagattgatgcttttggttgtgtaccacacgatattgaagaagttacacctggaatcaccaaatcagtcccaaagctgaagattgctatacttgtagttggaacccgaggggatgtacagccttttatagcattagctaaacgactgcaggaattcggtcattatgttagattggcaactcatgtcaattttcgtacttttgtgaagtcagctggcattgatttttacccattgggtggtgatcctcgggttatggctcagtatatgacaaaaaacaaagggtttttcctggcggcaccgacagagattgccattcaaagaaagcagcttaaggaaatcatcttctcacttctacctgcatgcacagaacctgatttggatactggaacacctttcagagctcaggcaataatcgcgaatcctcctgcttatggtcatctacacatagcagaagcacttggagcacctctgcatatcttcttcacttttccatggacgccaactaatgaattcccacatccattggcacgaatgcctcaaagtgcaacttataggctatcgtatcttattctggatttaatagtttggtggggctccaggggattcataaatgatttcaggaagaaattaaatttgccccctattgcttacttcagcacataccatggatctatatcacacttacctactggatacatgtggagcccgcaacttatgccaaagccaaaagggcataaaatatttcttgtgcatatgcaaagctag

SEQ ID NO: 211628 - DNA, 1338 bp, Zea Mays
catacatcggtgtgttgcggtgagagccggaatatacccggttgctcccccttggatccttgtttgcttcctgctgcctggccttctctcctccccaaaatcaatcgcccacaaaggagagccaggcagccagccaaatcttccacctcctccatttccagccccgtccccacaccagctcgcgtaacctcctgcccatggctggaggcggcggcgcaggcgcgggctcgtcgtccggcggcggcggagggggcggcagggagggcgactgggactgcggcagctgcggcaaccgcaactacgccttccgctcgctctgcaaccgctgcaagcagccgcgcctcctcgtcgaccccaacaccccgcgcgactccaagtggctaccccgcgccggggactggatctgcaccggttgcagtaacaataattatgcatccagaaagaactgcaaaaagtgtggcttgcccaaggaggaagcagcaatgccagcattgcaaatggcagggatgactatgccaacttatgcaacttatattgcaagactacaaagccttgctgcttctgcttctgcctataagatgaactttgggatggctgccaattcacctttgcagcagcaactacttgcaaatgcaaactggccctatgggatggctggtagatatgggatgcaatcttctggttggccatttggcaacggcaacccaaatcagtttttaggtgttccaaaggattggcgtaatggagattggctctgcagctgtggatttcataactattcatctcgtactcagtgcaaagagtgtggtgcacctgtaccatcgggcattccctccacaacaatgaaagctacatctgatgcctcttccagtgcaaaactcagaaagaatctgcagttcaccctggtgtgttatagcttgctgttggattattttgttccaggatatgttgctgcctgttctagctccttcctcaagactgcggtttgagttttttcgattctgcagtgtttttgctgctctcaaatgtttgtctcgatatttcattagtgcttgttgaagttcccccatttgtttatggtataagcgcttgaataaaatgtttctggaaagtaccggcctacaatctggattttggcaaaataattgaattagttgttgtacaatgaagcaaattgtcttacgttgtactttatgaactctggagtattatcactcgtcgggttgaaaaggggaactatacaatgtaatttcagtacagattattattttttcctgagactccagttgtgctgttatgcgagttttgcccattcagaatacttttgatgcattcatc

SEQ ID NO: 211629 - DNA, 805 bp, Zea Mays
caatgtgagaggttcatatctctgcattaggaactaagcggttggcttcagaggacctggccaatgactgggataataaaaggctaaatccaggaaatgacaattatccactttcaacaggagctgcaaataatttatttttgggtattgagcaaggagctggaagcagcaatggccagtctgcctttcccaagtttgacaacgggagctcaatggcattaccatctgggcagggaatgtctggtcttatgggaaaaggggcaaaatggcgtgacggggactggttgtgcaacaactgcaacaatcacaactatgcatctcgtgcgttttgcaacaggtgcaaaactcagaaagaatctgcagttcaccctggtgtgttatagcttgctgttggattattttgttccaggatatgttgctgcctgttctagctccttcctcaagactgcggtttgagttttttcgattctgcagtgtttttgctgctctcaaatgtttgtctcgatatttcattagtgcttgttgaagttcccccatttgtttatggtataagcgcttgaataaaatgtttctggaaagtaccggcctacaatctggattttggcaaaataattgaattagttgttgtacaatgaagcaaattgtcttacgttgtactttatgaactctggagtattatcactcgtcgggttgaaaaggggaactatacaatgtaatttcagtacagattattattttttcctgagactccagttgtgctgttatgcgagttttgcccattcagaatacttttgatgcattcatc

SEQ ID NO: 211630 - DNA, 1455 bp, Zea Mays
tcgagtatagcgcaagccgcataggtcccactccaatggatgtaagtacaactgttcaggagatatctaacactgatgttactgttttggaaggacacagttcagaggtttttgcttgtgcgtggagtccaactagttctcttctagcttctggatcaggagactcaactgctagaatctggacaattccatatggtccatgtggttccgacatgcaaccatattctcctggtgttcatgttttgaaacattttaaaggtcggaccaatgaaaagagcaaggatgtcaccacgcttgactggaatggtgaaggtacactactcgctacgggctcctacgatggacaggcaagaatatggagtagagatggagacctgaagcagacactgttcaaacataagggacccatattttcattgaaatggaataagaaaggagattttctcctaagtggaagtgttgataaaactgctattgtttgggatacaaagacatgggaatgcaagcagcagtttgaatttcattcagctccaacactagatgttgattggagaaataataactcctttgcaacatgttcaaccgataacatgatctatgtttgcaagattggggaacagcgtccaattaaagcattcagtggtcatcagagtgaagttaatgctataaagtgggatccgactggttcttttttggcttcatgttctgatgattggacagcaaagatatggagtatgaaacaagacaaatgtatatttgatttcaaggagcataccaaggaaatatacactattcggtggagcccaacaggcccaggaacaaacaatcctaatcagcagttgcttttggctagcgcatcttttgattcaaccatcaagctttgggaagttgagcagggacgccttctgtacagcttgtccggtcataggcaaccagtgtattctgttgcatttagccctgacggcgagtacttagcgagtgggtccctggatcagtgcctacacatctggtctgtgaaagaaggcagggtcctgaagacctacagaggtactgggggcatattcgaagtgtgctggaacatagaaggcaccaagattgctgcctgtttctccaacaacaccgtctgcgtcatggatttccggatgtagcccaaccagtaggggtagcgacgtagtgcagatcaagcctaaaacaagtctggatcacaagcccttcccatggaaacgtgtgaagagagcggaattgttagcagaatgcagatcttaggtggtggtttttttttttgcccatgtacagttcttttttcctaggttatactgtagcgatgcgttagtagcatggaaatgttttggtggcaatcctcctaatttctgaatgcaatcttaccatatttaaactcttaagtattccatcgttttatatagtcgagaaatacaaatttccattattgacact

SEQ ID NO: 211631 - DNA, 2232 bp, Zea Mays
atcgaagaacttttaacggcctttattgatttccgtcaaacggttttagtcttttaacaactcacggtacacaacagtttttttacagctcacaacccacaacagttttttcacagccacgacccaactaaatagacccttactcaccatttgcctgctccagtcttagccgtccaaaaagtatcagatgaggtgttttagcacagaagtggagcgacctagttttacaaacgcaacaacacgactcactttagagagcggtaatgttgagggagacaaatctctctccaccatcgcaccgcgccgtcctcgccctcgccgctgcgcccctcccgcgtcttccgcctgctccggcggcgctctcgcctgcgccgcctgctatggggctgctcacgtcggcggagctcaactacctcgtcttccgctacctccaggagtcaggttttattcatgctgcatttactctaggttatgaagctgggatccataagtgtggcattgatggtaatgcagtcccacctggtgctcttatcactattgtgcagaaaggcctccaatacattgaactggaagcaagtagcgatgagaattatgatgaagttgagagggattttgcgcttttggagccacttgaaatcatcacaaaagatgttgaagagttgcaacagattgtgaaaaggaggaaaattgagagatctcaaactgaacttgagaaggataagggaaaagagaaagaacgtaacgaggagcatgaacgacgtccttgtggcgaaagggagagggaacaacatgaaaaagaaaaagagcaagtcagggacaaggacaaatctgaaaaagatagggaccatgataaagagaaggagaaagagagagaaaggcagcatgcagagcgtactgataaggttaaacacgaggatgattctcttgttggtgcaggagactcaactgctagaatctggacaattccatatggtccatgtggttccgacatgcaaccatattctcctggtgttcatgttttgaaacattttaaaggtcggaccaatgaaaagagcaaggatgtcaccacgcttgactggaatggtgaaggtacactactcgctacgggctcctacgatggacaggcaagaatatggagtagagatggagacctgaagcagacactgttcaaacataagggacccatattttcattgaaatggaataagaaaggagattttctcctaagtggaagtgttgataaaactgctattgtttgggatacaaagacatgggaatgcaagcagcagtttgaatttcattcagctccaacactagatgttgattggagaaataataactcctttgcaacatgttcaaccgataacatgatctatgtttgcaagattggggaacagcgtccaattaaagcattcagtggtcatcagagtgaagttaatgctataaagtgggatccgactggttcttttttggcttcatgttctgatgattggacagcaaagatatggagtatgaaacaagacaaatgtatatttgatttcaaggagcataccaaggaaatatacactattcggtggagcccaacaggcccaggaacaaacaatcctaatcagcagttgcttttggctagcgcatcttttgattcaaccatcaagctttgggaagttgagcagggacgccttctgtacagcttgtccggtcataggcaaccagtgtattctgttgcatttagccctgacggcgagtacttagcgagtgggtccctggatcagtgcctacacatctggtctgtgaaagaaggcagggtcctgaagacctacagaggtactgggggcatattcgaagtgtgctggaacatagaaggcaccaagattgctgcctgtttctccaacaacaccgtctgcgtcatggatttccggatgtagcccaaccagtaggggtagcgacgtagtgcagatcaagcctaaaacaagtctggatcacaagcccttcccatggaaacgtgtgaagagagcggaattgttagcagaatgcagatcttaggtggtggtttttttttttgcccatgtacagttcttttttcctaggttatactgtagcgatgcgttagtagcatggaaatgttttggtggcaatcctcctaatttctgaatgcaatcttaccatatttaaactcttaagtattccatcgttttatatagtcgagaaatacaaatttccattattgacact

SEQ ID NO: 211632 - DNA, 983 bp, Zea Mays
cgaagaacttttaacggcctttattgatttccgtcaaacggttttagtcttttaacaactcacggtacacaacagtttttttacagctcacaacccacaacagttttttcacagccacgacccaactaaatagacccttactcaccatttgcctgctccagtcttagccgtccaaaaagtatcagatgaggtgttttagcacagaagtggagcgacctagttttacaaacgcaacaacacgactcactttagagagcggtaatgttgagggagacaaatctctctccaccatcgcaccgcgccgtcctcgccctcgccgctgcgcccctcccgcgtcttccgcctgctccggcggcgctctcgcctgcgccgcctgctatggggctgctcacgtcggcggagctcaactacctcgtcttccgctacctccaggagtcaggttttattcatgctgcatttactctaggttatgaagctgggatccataagtgtggcattgatggtaatgcagtcccacctggtgctcttatcactattgtgcagaaaggcctccaatacattgaactggaagcaagtagcgatgagaattatgatgaagttgagagggattttgcgcttttggagccacttgaaatcatcacaaaagatgttgaagagttgcaacagattgtgaaaaggaggaaaattgagagatctcaaactgaacttgagaaggataagggaaaagagaaagaacgtaacgaggagcatgaacgacgtccttgtggcgaaagggagagggaacaacatgaaaaagaaaaagagcaagtcagggacaaggacaaatctgaaaaagatagggaccatgataaagagaaggagaaagagagagaaaggcagcatgcagagcgtactgataaggttaaacacgaggatgattctcttgttggtgcaggagctgtttggttcatttgttctactccatgatcggataagaacgcaac

SEQ ID NO: 211633 - DNA, 1906 bp, Zea Mays
aatatttggaccaacctagcaaccaaacgctgtcgacgtcgatactggaaggaagatcttaccgtctccaaacaccatgggttggtgttgttaatcgatcccaacaagacatcaacaagaatgtggacatgattgctgctaggcgtagagagcgagagtattttgcatctacaccagaatataagcacatggcttctaggatgggatctgaatatttaggaaagatgctttcaaagcatttggaacaagtgatcaaatcaaggattccggggatccaatctcttataacaaagacaattgcagagctggaaactgaacttaatcgtcttggaaaacccattgctaatgatgctggggggaagctgtacacgatcatggaaatatgccgtatgtttgatggtatttacaaagagcatctggatggagtgcgccctggcggagagaaagtttaccatgtcttcgacaatcaatttcctgtagctattaaacgattgcagtttgataaacaactctctatggaaaatgtgaggaagcttataacagaggctgatggataccagcctcacttgatagctccagaacaaggatatagacgccttatagaatcttgtcttattagtatcagaggtcctgctgaggcggctgttgacgcggtccatgcaattctcaaggaccttgtccgcaaggctatcaatgaaacacatgaactgaagcagtttcccacccttcgtgtggaagtaggcaatgcagcttttgagtcattggatagaatgagggatgaaagcaagaaaaatacattaaagctagttgacatggaatgcagctacttgacagtagatttcttcaggaagcttcctcaggatgttgagaagggtggaaatccaagccactctatttttgatagatataatgactcttatcttagacgaattggacaaactgttctgtcatatgttaatatggtgtgttcgaccttgaggaactccatcccaaaatctattgtttattgtcaagtgcgagaggccaagcgctcgctgctcgatcacttcttcactgaactgggagcaagagagatgaagcagctttccaaacttcttgacgaagacccagcagtcatggaacgcagaactaaccttgcaaagaggctcgagctgtaccggagtgcccaatccgaaattgatgccgttgcatggtccaaatagtcctgatggccaagatatctgttcttaccccttgtctggcgattctctctcctattctggggcatatatagctgattttttgtgttgtaggtcaggtcattttatatatcaccggagctgtacggtgtcatgttccttgtgcttgaggatctaggggggcacttgtatctcgaacaagttcgtacatcgcgctttcgttccatctatgtgcagctgcatgaaaaccatgtttttctgtcacgcaaaaagtttgtcctattaaaaccctagtcctgggggtttcaaccaaaacacactaatgctgtgcagtaatcataagaaatgcggcgggaacctctgataactccagaaaacgactgttctgcaggatgtatattagattagcatctaaacattagcttcttagtcgtagtagtatacgtaaattcacccaaagcaataggcgtgatacattactgtgcgctgtattcgattcgatgatcgactatattttgtacagagttatgatcaaagctaaaaatgaatacacaagaacacacttgatggtacgaacgtatggacggtagcttttcttgaggtatgctctacgttgttgtctggtaatacttgtctaccagcctttctgagtactccccgaaagtcagcgttccgtttggtggaatcaactggtcaaggtcaacacaagcttaatcatttggggggag

SEQ ID NO: 211634 - DNA, 1292 bp, Zea Mays
agccgcacaagcacagcgactcgagcactgagcaaagcactctaaacctagcagtagcgacggcggtggcggctgctgctcatctccggccgacggtggtggcggctgctgctcatctccggccattcgtcggcctggtcgtcggcctgaagcccgcctggagcttgtctgcctacccgaccagagtacccggtgctgctgccgatccagcgcccttactgaggtcaacggcatctataaatgaaaaagaactaggtgaagatgacaacaccaatgtgaatgcaagtgagaacgtagaggctaataaagaagcaagtggtgcagctaatgatgtgactggatctcataccccaataggagaaacttcatccaccaaactcgggcgtacaaagaagagaacttcaggagtttaggatcactacaatgatatagttgttgaagaaaaggtgggtgacatggttgtcaagaagccaatggcagcatgcaagtactgtacagatgttctttgcgctgcaagcaagcaaggtaccacacgcctttggaaccactattattcatatcatgatgaaaacaaggtgaaacctagcataaggagactgagttcagatgatttgatttataatgaggaggctagtgttagaaaatattatcttgcaattattatgcatgagtatccaatcaacttttgtgagcatgagtatacaaatgacttcattagatctttgcgtccaaattatccattaatgggtcgcaagggcagtaggaccaagatcatggatatcttttacaatgagaagaaaagtatttttgactacttttgcactcttgactgtcgatttagctgtaccatgtgatttgcacaaaggattggataagggccgaaagaaaagatccatataatgtaacttcacttcttgatgatttatctaatattattgacaccgtgagtgatgataatgttgatcatgatggagatgcttccgatgttgttgaccacaacgtcgatgataatgacattgttcaagtggaggaagattaggattatcttttttttatagacaagctgagctgcttcagtcaatcattattggtgcttgttattcagcaatatgcactttatgttgttctgcacttttgtcaatttatgttgaatgtatcatgtatgggtgtgctagtgaacttaacggtgaactgaatgtatggcctgggtgtgctggtgaaatcaatggaccaatttatgtcatattttttttgttgttatagattatatatactactaaatatgctcataa

SEQ ID NO: 211635 - DNA, 1132 bp, Zea Mays
agccgcacaagcacagcgactcgagcactgagcaaagcactctaaacctagcagtagcgacggcggtggcggctgctgctcatctccggccgacggtggtggcggctgctgctcatctccggccattcgtcggcctggtcgtcggcctgaagcccgcctggagcttgtctgcctacccgaccagagtacccggtgctgctgccgatccagcgcccttactgcaataaaggaaaaaggtgaagtagattaataacaccatggttccaagaaacataaggtcatcaagaaacaagcagaggtcaacggcatctataaatgaaaaagaactaggtgaagatgacaacaccaatgtgaatgcaagtgagaacgtagaggctaataaagaagcaagtggtgcagctaatgatgtgactggatctcataccccaataggagaaacttcatccaccaaactcgggcgtacaaagaagagaacttcaggagtttaggatcactacaatgatatagttgttgaagaaaaggtgggtgacatggttgtcaagaagccaatggcagcatgcaagtactgtacagatgttctttgcgctgcaagcaagcaagtaggaccaagatcatggatatcttttacaatgagaagaaaagtatttttgactacttttgcactcttgactgtcgatttagctgtaccatgtgatttgcacaaaggattggataagggccgaaagaaaagatccatataatgtaacttcacttcttgatgatttatctaatattattgacaccgtgagtgatgataatgttgatcatgatggagatgcttccgatgttgttgaccacaacgtcgatgataatgacattgttcaagtggaggaagattaggattatcttttttttatagacaagctgagctgcttcagtcaatcattattggtgcttgttattcagcaatatgcactttatgttgttctgcacttttgtcaatttatgttgaatgtatcatgtatgggtgtgctagtgaacttaacggtgaactgaatgtatggcctgggtgtgctggtgaaatcaatggaccaatttatgtcatattttttttgttgttatagattatatatactactaaatatgctcataa

SEQ ID NO: 211636 - DNA, 1299 bp, Zea Mays
cgccacggtaccacccgccgctaacctctatcgcgttcaccatcagggcaccaccgcctccattacccccgccccctgctgccacgtccaccaccacggcaccaccgccgcccccagcgcgcgcggcccaccactaacagccagcttgggtggccgctccttccctcccttgcctcaaaggacttcttcccacgcgatgttaggagcagacatgaggcggcgagagtccagcatcggagatctccgccgccatgtaggcactgcccagcaccttgcggcccgaaaaccgtcgatctaatgccctgccctccttctccgatgccttcgccctcgcctcaggcagggtccctctcccgccttgcctggctctacgtggtcggtcggttgtggcgggatgtgcagacaggacgatcgtgtccggcctcctcgagaagagctccagcaacatctagaaggtgctcttgatggaggacaagcttaggaaccttggatgcaaggtgattggaaagaaaactattgaggtggagatggacctgaccaaggccaagagcgagaggtacctatgggggaacaacactgcagctatgaactccgacaagaagcagcagtttacactgggtttggctccagtctcaaaagaaacgtctgtttcagtaagctgatggtgcctcgaagaagccaatcaaagtactaattactaaaggtcacttgcaggatagcaaactcatacagtaatactgttgtttgtcgatcttaacaaatttcattcaagaatcaggccatgatgatgttcaaaagagttgtcagcagttcatgacatctggtatttattatatcttcttttgtagagggcttgtgtgttctgcttagcagtaggtaattttgctattgaaagattaatctattactgtaagcttggttctatgtgaatggatacatataattactcaggtagcacgacaactagcaatgtatggatgaattgaaggaaataaagaaggcagacaatcttatagaaactctgcatcttgaaactaccatggtttagaaagaagctggatgcatcctttatgttggtgtcttcttatcaccaagcagtaatgtgaagcaaggtcatttgttgactaagaacggttgaacacaaattagtgaagagttcattgcactagagatggaggatggaaaggtggtagatttcaatatggctttgatactatttcccccccttacaatcttgtacggaacaaacaatgtatgtggatactattgtaattcaagaatttatttctaaataataaa

SEQ ID NO: 211637 - DNA, 1862 bp, Zea Mays
cgccacggtaccacccgccgctaacctctatcgcgttcaccatcagggcaccaccgcctccattacccccgccccctgctgccacgtccaccaccacggcaccaccgccgcccccagcgcgcgcggcccaccactaacagccagcttgggtggccgctccttccctcccttgcctcaaaggacttcttcccacgcgatgttaggagcagacatgaggcggcgagagtccagcatcggagatctccgccgccatgtaggcactgcccagcaccttgcggcccgaaaaccgtcgatctaatgccctgccctccttctccgatgccttcgccctcgcctcaggcagggtccctctcccgccttgcctggctctacgtggtcggtcggttgtggcgggatgtgcagacaggacgatcgtgtccggcctcctcgagaagagctccagcaacatctagaaggtgctcttgatggaggacaagcttaggaaccttggatgcaaggtgattggaaagaaaactattgaggtggagatggacctgaccaaggccaagagcgagaggtacctatgggggaacaacactgcagctatgaactccgacaagaagcagcagtttacactgggtttggctccagtctcaaaagaaacgtctgtttcagtaagctgatggtcggtcacccaaaggacccattatctatttttattaatgttaatatattaaaaactggttagagtaaacatacatattatgctatcatgtacatatatgcctctatgagacataaatatatgtgtcatgtttcaactttcatgaatttttttcctcaacgagtaacatactagtgataataacaaaattatttaaaataataaccattatatataacttataaattatcatgatagatttggttatatattttaacttaaatatttgacatatggtataactataagttcataagtgcatatataaattctttgacatgaaaaacaagaaatattgatacatggggggcaattggtgtcgattgcagatggctacatctttctagaattcatatttctttgtagcaaatagtcattataataacaagtattaatatcctctccaggttagcaatactaaccattatagatctctgtttatttatattgtcccttcatacatattaatgtacatacacatcctttctttctcgttattccaatccctcctggacatagatacaacaaatatgatttgttccgtagaatcacaaactcttttgtacaggttgcaacttttaccagatcagaatttgtaggtgcctcgaagaagccaatcaaagtactaattactaaaggtcacttgcaggatagcaaactcatacagtaatactgttgtttgtcgatcttaacaaatttcattcaagaatcaggccatgatgatgttcaaaagagttgtcagcagttcatgacatctggtatttattatatcttcttttgtagagggcttgtgtgttctgcttagcagtaggtagcacgacaactagcaatgtatggatgaattgaaggaaataaagaaggcagacaatcttatagaaactctgcatcttgaaactaccatggtttagaaagaagctggatgcatcctttatgttggtgtcttcttatcaccaagcagtaatgtgaagcaaggtcatttgttgactaagaacggttgaacacaaattagtgaagagttcattgcactagagatggaggatggaaaggtggtagatttcaatatggctttgatactatttcccccccttacaatcttgtacggaacaaacaatgtatgtggatactattgtaattcaagaatttatttctaaataataaa

SEQ ID NO: 211638 - DNA, 1205 bp, Zea Mays
cgccacggtaccacccgccgctaacctctatcgcgttcaccatcagggcaccaccgcctccattacccccgccccctgctgccacgtccaccaccacggcaccaccgccgcccccagcgcgcgcggcccaccactaacagccagcttgggtggccgctccttccctcccttgcctcaaaggacttcttcccacgcgatgttaggagcagacatgaggcggcgagagtccagcatcggagatctccgccgccatgtaggcactgcccagcaccttgcggcccgaaaaccgtcgatctaatgccctgccctccttctccgatgccttcgccctcgcctcaggcagggtccctctcccgccttgcctggctctacgtggtcggtcggttgtggcgggatgtgcagacaggacgatcgtgtccggcctcctcgagaagagctccagcaacgtatctagaaggtgctcttgatggaggacaagcttaggaaccttggatgcaaggtgattggaaagaaaactattgaggtggagatggacctgaccaaggccaagagcgagaggtacctatgggggaacaacactgcagctatgaactccgacaagaagcagcagtttacactgggtttggctccagtctcaaaagaaacgtctgtttcagtaagctgatggttgcaacttttaccagatcaggaatttgtaggtgcctcgaagaagccaatcaaagtactaattactaaaggtcacttgcaggatagcaaactcatacagtaatactgttgtttgtcgatcttaacaaatttcattcaagaatcaggccatgatgatgttcaaaagagttgtcagcagttcatgacatctggtagcacgacaactagcaatgtatggatgaattgaaggaaataaagaaggcagacaatcttatagaaactctgcatcttgaaactaccatggtttagaaagaagctggatgcatcctttatgttggtgtcttcttatcaccaagcagtaatgtgaagcaaggtcatttgttgactaagaacggttgaacacaaattagtgaagagttcattgcactagagatggaggatggaaaggtggtagatttcaatatggctttgatactatttcccccccttacaatcttgtacggaacaaacaatgtatgtggatactattgtaattcaagaatttatttctaaataataaa

SEQ ID NO: 211639 - DNA, 1681 bp, Zea Mays
cgccacggtaccacccgccgctaacctctatcgcgttcaccatcagggcaccaccgcctccattacccccgccccctgctgccacgtccaccaccacggcaccaccgccgcccccagcgcgcgcggcccaccactaacagccagcttgggtggccgctccttccctcccttgcctcaaaggacttcttcccacgcgatgttaggagcagacatgaggcggcgagagtccagcatcggagatctccgccgccatgtaggcactgcccagcaccttgcggcccgaaaaccgtcgatctaatgccctgccctccttctccgatgccttcgccctcgcctcaggcagggtccctctcccgccttgcctggctctacgtggttgtggcgggatgtgcagacaggacgatcgtgtccggcctcctcgagaagagctccaatctagaaggtgctcttgatggaggacaagcttaggaaccttggatgcaaggtgattggaaagaaaactattgaggtggagatggacctgaccaaggccaagagcgagaggtacctatgggggaacaacactgcagctatgaactccgacaagaagcagcagtttacactgggtttggctccagtctcaaaagaaacgtctgtttcagtaagctgatggtcggtcacccaaaggacccattatctatttttattaatgttaatatattaaaaactggttagagtaaacatacatattatgctatcatgtacatatatgcctctatgagacataaatatatgtgtcatgtttcaactttcatgaatttttttcctcaacgagtaacatactagtgataataacaaaattatttaaaataataaccattatatataacttataaattatcatgatagatttggttatatattttaacttaaatatttgacatatggtataactataagttcataagtgcatatataaattctttgacatgaaaaacaagaaatattgatacatggggggcaattggtgtcgattgcagatggctacatctttctagaattcatatttctttgtagcaaatagtcattataataacaagtattaatatcctctccaggttagcaatactaaccattatagatctctgtttatttatattgtcccttcatacatattaatgtacatacacatcctttctttctcgttattccaatccctcctggacatagatacaacaaatatgatttgttccgtagaatcacaaactcttttgtacaggttgcaacttttaccagatcaggtatgatttcccacaaaaaatgaaccctgcttttttatagtccttgtcaatgcactcaacttaatagtttttcccatagcgccccttaattgggcagagaaaaagtagaatccatcactatgttttattaaacactatgtacgtatccatgtatgttgttgtgtaaacatttgcatatgtatataaccatacacacagacataatgtgttagtacacataatgcatgcacatggatcttattagttgtctcctagcctgcagcatcgcataatatgacttcaaattattttcattgcatttcaattaatagtatacttcattatcatttttccctttttcacatttttaataatctgtatattgggttgttcattttctagaaccaggctgagtattgatg

SEQ ID NO: 211640 - DNA, 1692 bp, Zea Mays
cgccacggtaccacccgccgctaacctctatcgcgttcaccatcagggcaccaccgcctccattacccccgccccctgctgccacgtccaccaccacggcaccaccgccgcccccagcgcgcgcggcccaccactaacagccagcttgggtggccgctccttccctcccttgcctcaaaggacttcttcccacgcgatgttaggagcagacatgaggcggcgagagtccagcatcggagatctccgccgccatgtaggcactgcccagcaccttgcggcccgaaaaccgtcgatctaatgccctgccctccttctccgatgccttcgccctcgcctcaggcagggtccctctcccgccttgcctggctctacgtggtcggttgtggcgggatgtgcagacaggacgatcgtgtccggcctcctcgagaagagctccagcaacgtatctagaaggtgctcttgatggaggacaagcttaggaaccttggatgcaaggtgattggaaagaaaactattgaggtggagatggacctgaccaaggccaagagcgagaggtacctatgggggaacaacactgcagctatgaactccgacaagaagcagcagtttacactgggtttggctccagtctcaaaagaaacgtctgtttcagtaagctgatggtcggtcacccaaaggacccattatctatttttattaatgttaatatattaaaaactggttagagtaaacatacatattatgctatcatgtacatatatgcctctatgagacataaatatatgtgtcatgtttcaactttcatgaatttttttcctcaacgagtaacatactagtgataataacaaaattatttaaaataataaccattatatataacttataaattatcatgatagatttggttatatattttaacttaaatatttgacatatggtataactataagttcataagtgcatatataaattctttgacatgaaaaacaagaaatattgatacatggggggcaattggtgtcgattgcagatggctacatctttctagaattcatatttctttgtagcaaatagtcattataataacaagtattaatatcctctccaggttagcaatactaaccattatagatctctgtttatttatattgtcccttcatacatattaatgtacatacacatcctttctttctcgttattccaatccctcctggacatagatacaacaaatatgatttgttccgtagaatcacaaactcttttgtacaggttgcaacttttaccagatcaggtatgatttcccacaaaaaatgaaccctgcttttttatagtccttgtcaatgcactcaacttaatagtttttcccatagcgccccttaattgggcagagaaaaagtagaatccatcactatgttttattaaacactatgtacgtatccatgtatgttgttgtgtaaacatttgcatatgtatataaccatacacacagacataatgtgttagtacacataatgcatgcacatggatcttattagttgtctcctagcctgcagcatcgcataatatgacttcaaattattttcattgcatttcaattaatagtatacttcattatcatttttccctttttcacatttttaataatctgtatattgggttgttcattttctagaaccaggctgagtattgatg

SEQ ID NO: 211641 - DNA, 1686 bp, Zea Mays
cgccacggtaccacccgccgctaacctctatcgcgttcaccatcagggcaccaccgcctccattacccccgccccctgctgccacgtccaccaccacggcaccaccgccgcccccagcgcgcgcggcccaccactaacagccagcttgggtggccgctccttccctcccttgcctcaaaggacttcttcccacgcgatgttaggagcagacatgaggcggcgagagtccagcatcggagatctccgccgccatgtaggcactgcccagcaccttgcggcccgaaaaccgtcgatctaatgccctgccctccttctccgatgccttcgccctcgcctcaggcagggtccctctcccgccttgcctggctctacgtggttgtggcgggatgtgcagacaggacgatcgtgtccggcctcctcgagaagagctccagcaacatctagaaggtgctcttgatggaggacaagcttaggaaccttggatgcaaggtgattggaaagaaaactattgaggtggagatggacctgaccaaggccaagagcgagaggtacctatgggggaacaacactgcagctatgaactccgacaagaagcagcagtttacactgggtttggctccagtctcaaaagaaacgtctgtttcagtaagctgatggtcggtcacccaaaggacccattatctatttttattaatgttaatatattaaaaactggttagagtaaacatacatattatgctatcatgtacatatatgcctctatgagacataaatatatgtgtcatgtttcaactttcatgaatttttttcctcaacgagtaacatactagtgataataacaaaattatttaaaataataaccattatatataacttataaattatcatgatagatttggttatatattttaacttaaatatttgacatatggtataactataagttcataagtgcatatataaattctttgacatgaaaaacaagaaatattgatacatggggggcaattggtgtcgattgcagatggctacatctttctagaattcatatttctttgtagcaaatagtcattataataacaagtattaatatcctctccaggttagcaatactaaccattatagatctctgtttatttatattgtcccttcatacatattaatgtacatacacatcctttctttctcgttattccaatccctcctggacatagatacaacaaatatgatttgttccgtagaatcacaaactcttttgtacaggttgcaacttttaccagatcaggtatgatttcccacaaaaaatgaaccctgcttttttatagtccttgtcaatgcactcaacttaatagtttttcccatagcgccccttaattgggcagagaaaaagtagaatccatcactatgttttattaaacactatgtacgtatccatgtatgttgttgtgtaaacatttgcatatgtatataaccatacacacagacataatgtgttagtacacataatgcatgcacatggatcttattagttgtctcctagcctgcagcatcgcataatatgacttcaaattattttcattgcatttcaattaatagtatacttcattatcatttttccctttttcacatttttaataatctgtatattgggttgttcattttctagaaccaggctgagtattgatg

SEQ ID NO: 211642 - DNA, 1690 bp, Zea Mays
cgccacggtaccacccgccgctaacctctatcgcgttcaccatcagggcaccaccgcctccattacccccgccccctgctgccacgtccaccaccacggcaccaccgccgcccccagcgcgcgcggcccaccactaacagccagcttgggtggccgctccttccctcccttgcctcaaaggacttcttcccacgcgatgttaggagcagacatgaggcggcgagagtccagcatcggagatctccgccgccatgtaggcactgcccagcaccttgcggcccgaaaaccgtcgatctaatgccctgccctccttctccgatgccttcgccctcgcctcaggcagggtccctctcccgccttgcctggctctacgtggtcggttgtggcgggatgtgcagacaggacgatcgtgtccggcctcctcgagaagagctccagcaacatctagaaggtgctcttgatggaggacaagcttaggaaccttggatgcaaggtgattggaaagaaaactattgaggtggagatggacctgaccaaggccaagagcgagaggtacctatgggggaacaacactgcagctatgaactccgacaagaagcagcagtttacactgggtttggctccagtctcaaaagaaacgtctgtttcagtaagctgatggtcggtcacccaaaggacccattatctatttttattaatgttaatatattaaaaactggttagagtaaacatacatattatgctatcatgtacatatatgcctctatgagacataaatatatgtgtcatgtttcaactttcatgaatttttttcctcaacgagtaacatactagtgataataacaaaattatttaaaataataaccattatatataacttataaattatcatgatagatttggttatatattttaacttaaatatttgacatatggtataactataagttcataagtgcatatataaattctttgacatgaaaaacaagaaatattgatacatggggggcaattggtgtcgattgcagatggctacatctttctagaattcatatttctttgtagcaaatagtcattataataacaagtattaatatcctctccaggttagcaatactaaccattatagatctctgtttatttatattgtcccttcatacatattaatgtacatacacatcctttctttctcgttattccaatccctcctggacatagatacaacaaatatgatttgttccgtagaatcacaaactcttttgtacaggttgcaacttttaccagatcaggtatgatttcccacaaaaaatgaaccctgcttttttatagtccttgtcaatgcactcaacttaatagtttttcccatagcgccccttaattgggcagagaaaaagtagaatccatcactatgttttattaaacactatgtacgtatccatgtatgttgttgtgtaaacatttgcatatgtatataaccatacacacagacataatgtgttagtacacataatgcatgcacatggatcttattagttgtctcctagcctgcagcatcgcataatatgacttcaaattattttcattgcatttcaattaatagtatacttcattatcatttttccctttttcacatttttaataatctgtatattgggttgttcattttctagaaccaggctgagtattgatg

SEQ ID NO: 211643 - DNA, 1702 bp, Zea Mays
gcgctaaccgccacggtaccacccgccgctaacctctatcgcgttcaccatcagggcaccaccgcctccattacccccgccccctgctgccacgtccaccaccacggcaccaccgccgcccccagcgcgcgcggcccaccactaacagccagcttgggtggccgctccttccctcccttgcctcaaaggacttcttcccacgcgatgttaggagcagacatgaggcggcgagagtccagcatcggagatctccgccgccatgtaggcactgcccagcaccttgcggcccgaaaaccgtcgatctaatgccctgccctccttctccgatgccttcgccctcgcctcaggcagggtccctctcccgccttgcctggctctacgtggtcggtcggttgtggcgggatgtgcagacaggacgatcgtgtccggcctcctcgagaagagctccagcaacatctagaaggtgctcttgatggaggacaagcttaggaaccttggatgcaaggtgattggaaagaaaactattgaggtggagatggacctgaccaaggccaagagcgagaggtacctatgggggaacaacactgcagctatgaactccgacaagaagcagcagtttacactgggtttggctccagtctcaaaagaaacgtctgtttcagtaagctgatggtcggtcacccaaaggacccattatctatttttattaatgttaatatattaaaaactggttagagtaaacatacatattatgctatcatgtacatatatgcctctatgagacataaatatatgtgtcatgtttcaactttcatgaatttttttcctcaacgagtaacatactagtgataataacaaaattatttaaaataataaccattatatataacttataaattatcatgatagatttggttatatattttaacttaaatatttgacatatggtataactataagttcataagtgcatatataaattctttgacatgaaaaacaagaaatattgatacatggggggcaattggtgtcgattgcagatggctacatctttctagaattcatatttctttgtagcaaatagtcattataataacaagtattaatatcctctccaggttagcaatactaaccattatagatctctgtttatttatattgtcccttcatacatattaatgtacatacacatcctttctttctcgttattccaatccctcctggacatagatacaacaaatatgatttgttccgtagaatcacaaactcttttgtacaggttgcaacttttaccagatcaggtatgatttcccacaaaaaatgaaccctgcttttttatagtccttgtcaatgcactcaacttaatagtttttcccatagcgccccttaattgggcagagaaaaagtagaatccatcactatgttttattaaacactatgtacgtatccatgtatgttgttgtgtaaacatttgcatatgtatataaccatacacacagacataatgtgttagtacacataatgcatgcacatggatcttattagttgtctcctagcctgcagcatcgcataatatgacttcaaattattttcattgcatttcaattaatagtatacttcattatcatttttccctttttcacatttttaataatctgtatattgggttgttcattttctagaaccaggctgagtattgatg

SEQ ID NO: 211644 - DNA, 3695 bp, Zea Mays
atctcaccaaccacctcaccacaccccaccccacccccaaaaccacacgaacccagagagtggattataaataagccctcccaaaccccttccatttcccgtgctcctctcctcctcctcacctatcatcgccgctgcgccgtctcctccgctcccgtcgtccggaaagatggcgtcccacattgttggataccctcgcatgggccccaagagggagctcaagtttgcacttgagtctttctgggatgggaagagcaccgctgaggatctggagaaggttgctaccgacctcagggccagtatctggaagcagatggctgatgctgggatcaagtacatccccagcaacactttctcgtactatgaccaggggcaacgccactgttcctgctatggagatgaccaagtggtttgacaccaactaccactttattgtccctgaattgggcccaaacaccaagttctcctatgcttctcacaaggctgttaacgaatataaggaggctaaggcgctcggtgttgataccgtgccagtacttgttggaccagtctcgtacctgttgctctcaaagcctgccaagggtgtggagaagggattccctcttctttcccttcttagcagcatcctcccagtctacaaggaggtcattgctgagttgaaggcagctggggcttcatggattcagtttgatgagcccactcttgtcctcgaccttgattctgacaaattggctgcattctctgctgcatacgcagaacttgaatctgtactttctggattgaatgtgcttgttgagacttactttgctgatgttcctgctgagtcctacaagaccctaacatccctgagcagtgtgactgcttatggttttgatcttgtccgtggaacccaaactcttgggcttgtcacgagtgctggtttccctgctggaaagtacctctttgctggtgttgtggatggacgcaacatctgggctgatgatcttgctacatctctcagcactctccagtctcttgaggctgttgttgggaaggacaagcttgtcgtatcaacttcctgctcgctcatgcacaccgctgtggatcttgtgaacgagactaagcttgacagcgagattaagtcttggcttgcttttgctgcccagaaggttgttgaggttgatgctcttgctaaggcattggctggtcaaaaggatgaggcttacttcgcagcaaatgctgctgctcaggcctcgaggaaatcctcaccccgtgtgaccaatgaagaagtccagaaggctgctgctgctctcaagggctctgaccaccgccgtgggaccaacgttagtgctagattggatgcccagcagaagaagcttaacctccccatccttcccaccactacaatcggttcgttcccacaaaccgttgagctcaggagggtccgccgtgagtacaaggcaaaaaagatctctgaggaggaatacgtcactgccatcaaggaggaaatcaacaaggtcgttaagcttcaagaagagcttgacattgatgtgcttgtgcatggcgagcctgagagaaacgatatggttgagtacttcggtgagcagctctccggttttgcgttcactgccaatggctgggtgcagtcttatgggtcaaggtgcgtcaagcctccgatcatctacggtgacgtgagccgccccaaccccatgaccgttttctggtcgaagacggcacagagcatgacgtctcgcccaatgaaggggatgctgactggcccagtcacaatcctcaactggtccttcgtccggaatgaccagccgaggtttgagacttgctaccagatcgctcttgcgatcaagaaggaagtcgaggatcttgaggctggtggtattcaggttatccaaatcgacgaggctgcactgagagaagggctgccgctccgcaaggctgagcatgcattctacttggactgggctgtccactccttcagaattaccaactgcgagatccaggacaccacccagatccacacccacatgtgctactccaacttcaacgacatcatccactcccccaggatcccgtcggctgaggagatcgccgaccgcatcgacaagatgctggcggtgctggacaccaacatcctctgggtgaaccccgactgcggcctcaagacccgcaagtacacggaggtcaagcccgccctgaccaacatggtctccgccgctaagctcatccgcacccagctcgccagcgccaacggttgcggttgcttctgcctcttcttcggctgttcctctgcaccatgaggcggcgccggcgccggagaaggaggcgagacagggaccggcggctgccacgaccacgggggaggagtcttcggcccaggagcagcacccggcgtctggtgtggcggtggtgctggggccggcggggatggaggccgacgcgacggtggcttaggataagtacgtggcggctgtggcggggacggagagcgacgcggtggtggcggcggggacggaagccgacgcgacggtggcttaggataagtacgtggcggctgtggcggggacggagagcgacgcggtggtggcggcggggacggaagccgacgcgacggtggcttaggataagtacgtggcggctgtggcggggacggagagcgacgcgacggtggcggcggggacggagagcgacgcgacggtggcttaggataagtacggggcggctgtggcggggacggagaccgacgcggtggtggctgcggggacggaggccgacgcgacggtgacttaggataagtacggggcggctgtggcggggacggagaccgacgcggtggtggcggcggggacggaggccgacgcgacggtggcttatgataagtacggggcggctgtggcggggacggagagcgacgcggtggtggcggcggggacggaagccgacgcgacggtggcttagtataagtacgtggcggctgctgggacggagagcgacgcgacggtggcggctgggacggaggccgacgcgacggtggcttaggataagtacggggtggctgtggcggggacggagaccgacgcggtggggacggagaccgatgcggcggtggcttagggtaagtacgtggttgtggtggcggcggttcaggagcaggaatggaaggttctgggcgcgatgggtgccgacgtggttgaggtggtagaggaggcgcctgcgttggcgatgggttctggcgtgtcagcggcggcggttcaggagcaggaacggacggctctggcggcgatggacgccggcgtggttgttgttgtggaggaggaggaggtggcgacggcgacggagtcggcgagtgcgacagcgcggcgacgatggggagcgtgatgatgagcttctcgccctcgaacctggcgcggacgccgtcggagtcgcagttgtcggggaggcggaggtccttcttgaacctggcccaccggccgcccctggcgggtcgctcgccggtggcgcgcagcacgccgtggttgtccacctgcaccctcacctggtccttgcggaaccccggcagcgcgatctccaccacgtcctgctcctcccctgccagcttccactccacctccgggtcgaagtcctcgaacacccgcgccgccgcgcgctgccgccggtccatgcctgcctatttcctcgccgccggagaccgaagctgctcgccc

SEQ ID NO: 211645 - DNA, 1827 bp, Zea Mays
agattgggctggtccggccactccgacacccttatataaagtcccgaaccctagaggccagcaccttcctccccaactcgccgtctgccttctgcgcctccatttcggcctctgtcccttgcaagttcaatctcacctccaaccatgggtaaagagaagtcccacatcaacattgtggttattggccatgtcgactctggcaagtcgaccaccacaggacaccttatctacaagcttggaggcattgacaagcgtgtgatcgagaggttcgagaaggaggctgctgaaatgaacaagcggtccttcaagtacgcgtgggtgctcgacaagctcaaggctgagcgtgagagaggtatcaccattgatatcgctctgtggaagtttgagaccaccaagtactactgcacggtcattgatgcccctggacaccgtgacttcatcaagaacatgatcactggtacctcccaggctgactgtgctgtccttatcattgactccaccactggtggttttgaggctggtatctccaaggatggccagacccgtgaacatgctctccttgcgttcacccttggagtgaagcagatgatttgctgctgcaacaagatggatgcaaccactcccaaatactccaaggcacgttatgaagagattgtgaaggaagtctcatcctacctcaagaaagttgggtacaaccctgataagattgcctttgttcccatttctggttttgagggcgacaacatgattgagaggtccaccaaccttgactggtacaaaggcccaaccctgcttgagaggtccaccaaccttgactggtacaaaggcccaaccctgcttgaggctcttgaccagatcaccgagcccaagaggccttcggacaagcccctgcgtctgcccctccaggatgtgtacaagattggtggtattggaactgtaccggttggtcgtgtggagactggtgtcatcaagcctggtatggtagtcacctttggtccaactggcctgactactgaggtgaagtctgttgagatgcaccacgaggcgcttcaggaggctcttccgggcgacaatgttggcttcaacgtgaagaacgttgctgtcaaggatctcaagcgtgggttcgtggcctccaactccaaggatgaccctgccaaggaggctgccagcttcacctcccaggtcatcatcatgaaccaccctgggcagattggcaacggctatgccccagtgctggactgccacacctcccacatcgccgtcaagtttgctgagctcattaccaagatcgacaggcgatctggcaaggagctcgagaaggagcccaagttcctgaagaacggtgatgctggtatggtgaagatgattcccaccaagcctatggtggtggagacattctccgcgtatcctcccctgggtaggtttgccgtccgcgacatgaggcagacggttgctgttggagtcatcaagagtgtggagaagaaggacccaaccggcgccaaggtgaccaaggcggccgccaagaagaaatgatgcgatcccgtgtctgcttttgcagtgcctggataacttgccactaaagttgtgtatgcggttgttgctgttattgcgtggactgtttgctgcggtgtctcctgtttgtttgggtagcgcagcgtcggcctcttcaggtgtctgttgtctgttgtctttactatcagtaatgctcctgagacttgtatttctccttttggcgccgctaaatggaattttcgaacaatgattttcgtgttattattttacaaccttttcgaacaatatttacacgtctgatgtgttttgctgaga

SEQ ID NO: 211646 - DNA, 2127 bp, Zea Mays
agattgggctggtccggccactccgacacccttatataaagtcccgaaccctagaggccagcaccttcctccccaactcgccgtctgccttctgcgcctccatttcggcctctgtcccttgcaagttcaatctcacctccaaccatgggtaaagagaagtcccacatcaacattgtggttattggccatgtcgactctggcaagtcgaccaccacaggacaccttatctacaagcttggaggcattgacaagcgtgtgatcgagaggttcgagaaggaggctgctgaaatgaacaagcggtccttcaagtacgcgtgggtgctcgacaagctcaaggctgagcgtgagagaggtatcaccattgatatcgctctgtggaagtttgagaccaccaagtactactgcacggtcattgatgcccctggacaccgtgacttcatcaagaacatgatcactggtacctcccaggctgactgtgctgtccttatcattgactccaccactggtggttttgaggctggtatctccaaggatggccagacccgtgaacatgctctccttgcgttcacccttggagtgaagcagatgatttgctgctgcaacaagatggatgcaaccactcccaaatactccaaggcacgttatgaagagattgtgaaggaagtctcatcctacctcaagaaagttgggtacaaccctgataagattgcctttgttcccatttctggttttgagggcgacaacatgattgagaggtccaccaaccttgactggtacaaaggcccaaccctgcttgaggctcttgaccagatcaccgagcccaagaggccttcagacaagcccctgcgtctgcccctccaggatgtgtacaagattggtggtattggaactgtaccggttggtcgtgtggagactggtgtcatcaagcctggtatggtagtcacctttggtccaactggcctgactaccgaggtgaagtctgttgagatgcaccacgaggcacttcaggaggctcttccgggtgacaatgttggcttcaacgtgaagaatgttgctgtcaaggacctcaagcgtgggtttgtggcctccaactccaaggatgaccctgccaaggaggctgccagcttcacctcccaggtcatcatcatgaaccaccctgggcagattggcaacggctatgcccctgtgctggactgccacacctcccacatcgctgtcaagtttgctgagctcattaccaagatcgacaggcgctctggcaaggagcttgagaaggagccaaagttcctgaagaacggtgatgctggtatggtgaagatgatacccaccaagcccatggtggtggagacattctcagcgtatcctccccttggtaggtttgctgtccgtgacatgaggcagacggttgctgttggagttatcaagagtgtggagaagaaggacccaaccggcgccaaggaggctgccagcttcacctcccaggtcatcatcatgaaccaccctgggcagattggcaacggctatgccccagtgctggactgccacacctcccacatcgccgtcaagtttgctgagctcattaccaagatcgacaggcgatctggcaaggagctcgagaaggagcccaagttcctgaagaacggtgatgctggtatggtgaagatgattcccaccaagcctatggtggtggagacattctccgcgtatcctcccctgggtaggtttgccgtccgcgacatgaggcagacggttgctgttggagtcatcaagagtgtggagaagaaggacccaaccggcgccaaggtgaccaaggcggccgccaagaagaaatgatgcgatcccgtgtctgcttttgcagtgcctggataacttgccactaaagttgtgtatgcggttgttgctgttattgcgtggactgtttgctgcggtgtctcctgtttgtttgggtagcgcagcgtcggcctcttcaggtgtctgttgtctgttgtctttactatcagtaatgctcctgagacttgtatttctccttttggcgccgctaaatggaattttcgaacaatgattttcgtgttattattttacaaccttttcgaacaatatttacacgtctgatgtgttttgctgaga

SEQ ID NO: 211647 - DNA, 2282 bp, Zea Mays
agattgggctggtccggccactccgacacccttatataaagtcccgaaccctagaggccagcaccttcctccccaactcgccgtctgccttctgcgcctccatttcggcctctgtcccttgcaagttcaatctcacctccaaccatgggtaaagagaagtcccacatcaacattgtggttattggccatgtcgactctggcaagtcgaccaccacaggacaccttatctacaagcttggaggcattgacaagcgtgtgatcgagaggttcgagaaggaggctgctgaaatgaacaagcggtccttcaagtacgcgtgggtgctcgacaagctcaaggctgagcgtgagagaggtatcaccattgatatcgctctgtggaagtttgagaccaccaagtactactgcacggtcattgatgcccctggacaccgtgacttcatcaagaacatgatcactggtacctcccaggctgactgtgctgtccttatcattgactccaccactggtggttttgaggctggtatctccaaggatggccagacccgtgaacatgctctccttgcgttcacccttggagtgaagcagatgatttgctgctgcaacaaatggatgcaaccactcccaaatactccaaggcacgttatgaagagattgtgaaggaagtctcatcctacctcaagaaagttgggtacaaccctgataagattgcctttgttcccatttctggttttgagggcgacaacatgattgagaggtccaccaaccttgactggtacaaaggcccaaccctgcttgaggctcttgaccagatcaccgagcccaagaggccttcagacaagcccctgcgtctgcccctccaggatgtgtacaagattggtggtattggaactgtaccggttggtcgtgtggagactggtgtcatcaagcctggtatggtagtcacctttggtccaactggcctgactaccgaggtgaagtctgttgagatgcaccacgaggcacttcaggaggctcttccgggtgacaatgttggcttcaacgtgaagaatgttgctgtcaaggacctcaagcgtgggtttgtggcctccaactccaaggatgaccctgccaaggaggctgccagcttcacctcccaggtcatcatcatgaaccaccctgggcagattggcaacggctatgcccctgtgctggactgccacacctcccacatcgctgtcaagtttgctgagctcattaccaagatcgacaggcgctctggcaaggagcttgagaaggagccaaagttcctgaagaacggtgatgctggtatggtgaagatgatacccaccaagcccatggtggtggagacattctcagcgtatcctccccttggtaggtttgctgtccgtgacatgaggcagacggttgctgttggagttatcaagagtgtggagaagaaggacccaaccggcgccaaggtgaccaaggctgctgccaagaagaaatgatgcgatcctgcgcctgctttagcaatacctagttttcatcattacaagttttgtttgtggtcgttgctgttattgtgtgaactgttgagctctgttagcctgtgcacttttatctatttatttggtaccttgttgctatttcaccttctgcaatacaagaatgctgtaagagctatatgttaaccttttggcattgttaatttgattttaggaagtcgtatagttatcttcagtatcggcatgattggtttctgggttcgtgggcgcccggctcgcagcgcctggacggctagcgaagctctgtccttgcacggctcgcagcggccttgacgaatgacggctagctagctccgtcctcgcgtctctacgcatgcaggtctacgcggtgggcttggacgtttagcgaaactcctggtgtattcggttgagcaaccaattacgcagtatgtttctttttatccccttaaggctttgtttgggtactctagtattgacctcaatccacatgtattgatctggattggggtgtaaattagtttaagttacacctcaatacaagtggattgaggtcaatactagagtacccaaactaggcctaagagcatgttcggttataccaatccaagtcaaaaatgaataggaggggatttaaatccctccaattctcttctggattggtataaccaaacaagccaaagttttggaagttttgcagggtcgtttggattggtttctgaatcctttatctgctacaattttctctatccattatatctgtccactcttctttttttc

SEQ ID NO: 211648 - DNA, 1048 bp, Zea Mays
gacagggttgaccaaatttgagttttcgtgagggcgtggacggagtgagtaaacatgtccccacgctgtcatgctcccaaattacggcgcctactctgttttctgattcactgaaccgagcgagttctcgtcgcatcgtatgcgcctccttctctgattccccaaaaatattccctgttttgctgttcttttcttcctcgtaatccgctcggcttccattgttgccgccgctaccgacggcgacggcagacatcaagtgtcagtcctccttccgccgaagtcttcttttggttggactccgactctccgacaggagttgcgctcctcctccccctctactctactggattacactagcgtggagatccatctctatttgtttttggtctcttctttgcttgtaagtaaccctagctcgttcggacggatccccccataaaattcttatgttcccgccacagttttttcctgcagcaactataataagcaatcaaatccgtgtcgttttctccctatggccgtatccatactgtttgttgcgaatttttatactgcgtggacctttcactaaactggtttatcttggttcttgccgtttatccagggggcaaggtcaatcacagttgataagataccacttgtactctaatctgtcagtctccacgtgcggctgcatatatactgtttcaaaatttcggagtaaggtctgaagtctgaaccctcatgctgcttcagagggattgaggctggttgttggtcgcacttgcacatggcgcagccacagcagcgggtgtaccaagcttggaagggggataacgtctaaacagaatgctagccaacaagtttgtaactttgccaatagtggaattgagctaaacctccataggccagcttcttggccatgtcagtttccttttcttctttaattatctcagcagtcataaagccagtgtttgtctcatttactgagatttgtatgatgataattgtacgagatcgttattgggatgtgctacatgatcagcctggcttgtttttgagatatgat

SEQ ID NO: 211649 - DNA, 1484 bp, Zea Mays
caaaacgaggtcggcacccacaggccacaacccaacccaacccaacccaactgaatccaacgggacacgagagcgacgtcatggtgctggaggtgggcaccgccgtgggaatacgaaccacctccacttgggctgcaggtccagccgcccggcgcagatcacggggccaggtcgtctccttcgccctcgctcccgcgtcgtcccgccgggtccggcaccgttgccgcgcgatgcaacagcacgaggaggagcaggagcggccgccgaccgtccgcgcggtcaccatccccttcgccgacctcagggtgccggacagggaccttggcgacaagatcgaggaaggtctgggtccccatgggctcggcatcgtcaccattgccgatgtacctgagtttccagagctaagaaaaaggctgctgcgcttggcacccaggattgcaaaccttcctgaagaggtgaagaaacagcttgaagatccagatagcagatataactttgggtggagtcatgggaaggagaaactcgagtccgggaaacttgacacatttaaaggttccttttatgcgaaccctgttttggatgtccctactactgatgatgtgcttgtaagtaggtatccatcatattgccgaccaaatatatggccaaacgataatcttcctgagcttgagatagcatttaaagatcttgggaagctgatgatggaagttggtttgatgttggctcatcattgtgatcgctatgtaatgaggcaaggagtagggtcatatgatggtgacagtcttgagcagacaattgctcgttcaaggtgtcacaagggtcgtctgttgtactatttcccacgacagtttagcaagcagacagacttcgactcggtttcatcatggtgtggatggcacactgatcatggatctctaacaggttgtgttcgacgaggatcagctagcttaccaaatcggggaaactactgaaatactgtcaagaggttatctatgtgcaaccccacactgtgtgcaggcacccagcagcgaaaatgcttcaaatgttgaccgctctacttttgccttgttcatgcaaccagattggaatgagaagctgaagtttccaagcgaaatcccctatcaccaagagttgattccaccaaacggaacgctgactttcggggagtactcagaaaggctggtagacaagtattaccagacaacaacgtagagcatacctcaagaaaagctaccgtccatacgttcgtaccatcaagtgtgttcttgtgtattcatttttagctttgatcataactctgtacaaaatatagtcgatcatcgaatcgaatacagcgcacagtaatgtatcacgcctattgctttgggtgaatttacgtatactactacgactaagaagctaatgtttagatgctaatctaatatacatcctgcagaacagtcgttttctggagttatcagaggttcccgccgcatttcttatga

SEQ ID NO: 211650 - DNA, 1558 bp, Zea Mays
cacaggccacaacccaacccaacccaacccaactgaatccaacgggacacgagagcgacgtcatggtgctggaggtgggcaccgccgtgggaatacgaaccacctccacttgggctgcaggtccagccgcccggcgcagatcacggggccaggtcgtctccttcgccctcgctcccgcgtcgtcccgccgggtccggcaccgttgccgcgcgatgcaacagcacgaggaggagcaggagcggccgccgaccgtccgcgcggtcaccatccccttcgccgacctcagggtgccggacagggaccttggcgacaagatcgaggaaggtctgggtccccatgggctcggcatcgtcaccattgccgatgtacctgagtttccagagctaagaaaaaggctgctgcgcttggcacccaggattgcaaaccttcctgaagaggtgaagaaacagcttgaagatccagatagcagatataactttgggtggagtcatgggaaggagaaactcgagtccgggaaacttgacacatttaaaggttccttttatgcgaaccctgttttggatgtccctactactgatgatgtgcttgtaagtaggtatccatcatattgccgaccaaatatatggccaaacgataatcttcctgagcttgagatagatcttgggaagctgatgatggaagttggtttgatgttggctcatcattgtgatcgctatgtaatgaggcaaggagtagggtcatatgatggtgacagtcttgagcagacaattgctcgttcaaggtgtcacaagggtcgtctgttgtactatttcccacgacagtttagcaagcagacagacttcgactcggtttcatcatggtgtggatggcacactgatcatggatctctaacagggcttacatgtggcttgtttacgaagaattctatggaggtaccatgtccagacagtgcagctggactatacattcggactcgtgataaccaagttgttaaggttgtgttcgacgaggatcagctagcttaccaaatcggggaaactactgaaatactgtcaagaggttatctatgtgcaaccccacactgtgtgcaggcacccagcagcgaaaatgcttcaaatgttgaccgctctacttttgccttgttcatgcaaccagattggaatgagaagctgaagtttccaagcgaaatcccctatcaccaagagttgattccaccaaacggaacgctgactttcggggagtactcagaaaggctggtagacaagtattaccagacaacaacgtagagcatacctcaagaaaagctaccgtccatacgttcgtaccatcaagtgtgttcttgtgtattcatttttagctttgatcataactctgtacaaaatatagtcgatcatcgaatcgaatacagcgcacagtaatgtatcacgcctattgctttgggtgaatttacgtatactactacgactaagaagctaatgtttagatgctaatctaatatacatcctgcagaacagtcgttttctggagttatcagaggttcccgccgcatttcttatga

SEQ ID NO: 211651 - DNA, 1563 bp, Zea Mays
cacaacccaacccaacccaacccaactgaatccaacgggacacgagagcgacgtcatggtgctggaggtgggcaccgccgtgggaatacgaaccacctccacttgggctgcaggtccagccgcccggcgcagatcacggggccaggtcgtctccttcgccctcgctcccgcgtcgtcccgccgggtccggcaccgttgccgcgcgatgcaacagcacgaggaggagcaggagcggccgccgaccgtccgcgcggtcaccatccccttcgccgacctcagggtgccggacagggaccttggcgacaagatcgaggaaggtctgggtccccatgggctcggcatcgtcaccattgccgatgtacctgagtttccagagctaagaaaaaggctgctgcgcttggcacccaggattgcaaaccttcctgaagaggtgaagaaacagcttgaagatccagatagcaggtcatataactttgggtggagtcatgggaaggagaaactcgagtccgggaaacttgacacatttaaaggttccttttatgcgaaccctgttttggatgtccctactactgatgatgtgcttgtaagtaggtatccatcatattgccgaccaaatatatggccaaacgataatcttcctgagcttgagatagcatttaaagatcttgggaagctgatgatggaagttggtttgatgttggctcatcattgtgatcgctatgtaatgaggcaaggagtagggtcatatgatggtgacagtcttgagcagacaattgctcgttcaaggtgtcacaagggtcgtctgttgtactatttcccacgacagtttagcaagcagacagacttcgactcggtttcatcatggtgtggatggcacactgatcatggatctctaacagggcttacatgtggcttgtttacgaagaattctatggaggtaccatgtccagacagtgcagctggactatacattcggactcgtgataaccaagttgttaaggttgtgttcgacgaggatcagctagcttaccaaatcggggaaactactgaaatactgtcaagaggttatctatgtgcaaccccacactgtgtgcaggcacccagcagcgaaaatgcttcaaatgttgaccgctctacttttgccttgttcatgcaaccagattggaatgagaagctgaagtttccaagcgaaatcccctatcaccaagagttgattccaccaaacggaacgctgactttcggggagtactcagaaaggctggtagacaagtattaccagacaacaacgtagagcatacctcaagaaaagctaccgtccatacgttcgtaccatcaagtgtgttcttgtgtattcatttttagctttgatcataactctgtacaaaatatagtcgatcatcgaatcgaatacagcgcacagtaatgtatcacgcctattgctttgggtgaatttacgtatactactacgactaagaagctaatgtttagatgctaatctaatatacatcctgcagaacagtcgttttctggagttatcagaggttcccgccgcatttcttatga

SEQ ID NO: 211652 - DNA, 1435 bp, Zea Mays
cccaactgaatccaacgggacacgagagcgacgtcatggtgctggaggtgggcaccgccgtgggaatacgaaccacctccacttgggctgcaggtccagccgcccggcgcagatcacggggccaggtcgtctccttcgccctcgctcccgcgtcgtcccgccgggtccggcaccgttgccgcgcgatgcaacagcacgaggaggagcaggagcggccgccgaccgtccgcgcggtcaccatccccttcgccgacctcagggtgccggacagggaccttggcgacaagatcgaggaaggtctgggtccccatgggctcggcatcgtcaccattgccgatgtacctgagtttccagagctaagaaaaaggctgctgcgcttggcacccaggattgcaaaccttcctgaagaggtgaagaaacagcttgaagatccagatagcagatataactttgggtggagtcatgggaaggagaaactcgagtccgggaaacttgacacatttaaaggttccttttatgcgaaccctgttttggatgtccctactactgatgatgtgcttgtaagtatccatcatattgccgaccaaatatatggccaaacgataatcttcctgagcttgagatagcatttaaagatcttgggaagctgatgatggaagttggtttgatgttggctcatcattgtgatcgctatgtaatgaggcaaggagtagggtcatatgatggtgacagtcttgagcagacaattgctcgttcaaggtgtcacaagggtcgtctgttgtactatttcccacgacagtttagcaagcagacagacttcgactcggtttcatcatggtgtggatggcacactgatcatggatctctaacaggttgtgttcgacgaggatcagctagcttaccaaatcggggaaactactgaaatactgtcaagaggttatctatgtgcaaccccacactgtgtgcaggcacccagcagcgaaaatgcttcaaatgttgaccgctctacttttgccttgttcatgcaaccagattggaatgagaagctgaagtttccaagcgaaatcccctatcaccaagagttgattccaccaaacggaacgctgactttcggggagtactcagaaaggctggtagacaagtattaccagacaacaacgtagagcatacctcaagaaaagctaccgtccatacgttcgtaccatcaagtgtgttcttgtgtattcatttttagctttgatcataactctgtacaaaatatagtcgatcatcgaatcgaatacagcgcacagtaatgtatcacgcctattgctttgggtgaatttacgtatactactacgactaagaagctaatgtttagatgctaatctaatatacatcctgcagaacagtcgttttctggagttatcagaggttcccgccgcatttcttatga

SEQ ID NO: 211653 - DNA, 1426 bp, Zea Mays
ctgaatccaacgggacacgagagcgacgtcatggtgctggaggtgggcaccgccgtgggaatacgaaccacctccacttgggctgcaggtccagccgcccggcgcagatcacggggccaggtcgtctccttcgccctcgctcccgcgtcgtcccgccgggtccggcaccgttgccgcgcgatgcaacagcacgaggaggagcaggagcggccgccgaccgtccgcgcggtcaccatccccttcgccgacctcagggtgccggacagggaccttggcgacaagatcgaggaaggtctgggtccccatgggctcggcatcgtcaccattgccgatgtacctgagtttccagagctaagaaaaaggctgctgcgcttggcacccaggattgcaaaccttcctgaagaggtgaagaaacagcttgaagatccagatagcagatataactttgggtggagtcatgggaaggagaaactcgagtccgggaaacttgacacatttaaaggttccttttatgcgaaccctgttttggatgtccctactactgatgatgtgcttgtaagtaggtatccatcatattgccgaccaaatatatggccaaacgataatcttcctgagcttgagatagcatttaaagatcttgggaagctgatgatggaagttggtttgatgttggctcatcattgtgatcgctatgcaagcagacagacttcgactcggtttcatcatggtgtggatggcacactgatcatggatctctaacagggcttacatgtggcttgtttacgaagaattctatggaggtaccatgtccagacagtgcagctggactatacattcggactcgtgataaccaagttgttaaggttgtgttcgacgaggatcagctagcttaccaaatcggggaaactactgaaatactgtcaagaggttatctatgtgcaaccccacactgtgtgcaggcacccagcagcgaaaatgcttcaaatgttgaccgctctacttttgccttgttcatgcaaccagattggaatgagaagctgaagtttccaagcgaaatcccctatcaccaagagttgattccaccaaacggaacgctgactttcggggagtactcagaaaggctggtagacaagtattaccagacaacaacgtagagcatacctcaagaaaagctaccgtccatacgttcgtaccatcaagtgtgttcttgtgtattcatttttagctttgatcataactctgtacaaaatatagtcgatcatcgaatcgaatacagcgcacagtaatgtatcacgcctattgctttgggtgaatttacgtatactactacgactaagaagctaatgtttagatgctaatctaatatacatcctgcagaacagtcgttttctggagttatcagaggttcccgccgcatttcttatga

SEQ ID NO: 211654 - DNA, 702 bp, Zea Mays
cgagagcgacgtcatggtgctggaggtgggcaccgccgtgggaatacgaaccacctccacttgggctgcaggtccagccgcccggcgcagatcacggggccaggtcgtctccttcgccctcgctcccgcgtcgtcccgccgggtccggcaccgttgccgcgcgatgcaacagcacgaggaggagcaggagcggccgccgaccgtccgcgcggtcaccatccccttcgccgacctcagggtgccggacagggaccttggcgacaagatcgaggaaggtctgggtccccatgggctcggcatcgtcaccattgccgatgtacctgagtttccagagctaagaaaaaggctgctgcgcttggcacccaggattgcaaaccttcctgaagaggtgaagaaacagcttgaagatccagatagcagatataactttgggtggagtcatgggaaggagaaactcgagtccgggaaacttgacacatttaaaggttccttttatgcgaaccctgttttggatgtccctactactgatgatgtgcttgtaagtaggtatccatcatattgccgaccaaatatatggccaaacgataatcttcctgagcttgagatagcatttaaagatcttgggaagctgatgatggaagttggtttgatgttggctcatcattgtgatcgctatgatgcagggttttcagttagtttggg

SEQ ID NO: 211655 - DNA, 1498 bp, Zea Mays
gctggaggtgggcaccgccgtgggaatacgaaccacctccacttgggctgcaggtccagccgcccggcgcagatcacggggccaggtcgtctccttcgccctcgctcccgcgtcgtcccgccgggtccggcaccgttgccgcgcgatgcaacagcacgaggaggagcaggagcggccgccgaccgtccgcgcggtcaccatccccttcgccgacctcagggtgccggacagggaccttggcgacaagatcgaggaaggtctgggtccccatgggctcggcatcgtcaccattgccgatgtacctgagtttccagagctaagaaaaaggctgctgcgcttggcacccaggattgcaaaccttcctgaagaggtgaagaaacagcttgaagatccagatagcagatataactttgggtggagtcatgggaaggagaaactcgagtccgggaaacttgacatttaaaggttccttttatgcgaaccctgttttggatgtccctactactgatgatgtgcttgtaagtaggtatccatcatattgccgaccaaatatatggccaaacgataatcttcctgagcttgagatagcatttaaagatcttgggaagctgatgatggaagttggtttgatgttggctcatcattgtgatcgctatgtaatgaggcaaggagtagggtcatatgatggtgacagtcttgagcagacaattgctcgttcaaggtgtcacaagggtcgtctgttgtactatttcccacgacagtttagcaagcagacagacttcgactcggtttcatcatggtgtggatggcacactgatcatggatctctaacagggcttacatgtggcttgtttacgaagaattctatggaggtaccatgtccagacagtgcagctggactatacattcggactcgtgataaccaagttgttaaggttgtgttcgacgaggatcagctagcttaccaaatcggggaaactactgaaatactgtcaagaggttatctatgtgcaaccccacactgtgtgcaggcacccagcagcgaaaatgcttcaaatgttgaccgctctacttttgccttgttcatgcaaccagattggaatgagaagctgaagtttccaagcgaaatcccctatcaccaagagttgattccaccaaacggaacgctgactttcggggagtactcagaaaggctggtagacaagtattaccagacaacaacgtagagcatacctcaagaaaagctaccgtccatacgttcgtaccatcaagtgtgttcttgtgtattcatttttagctttgatcataactctgtacaaaatatagtcgatcatcgaatcgaatacagcgcacagtaatgtatcacgcctattgctttgggtgaatttacgtatactactacgactaagaagctaatgtttagatgctaatctaatatacatcctgcagaacagtcgttttctggagttatcagaggttcccgccgcatttcttatga

SEQ ID NO: 211656 - DNA, 1487 bp, Zea Mays
ctggaggtgggcaccgccgtgggaatacgaaccacctccacttgggctgcaggtccagccgcccggcgcagatcacggggccaggtcgtctccttcgccctcgctcccgcgtcgtcccgccgggtccggcaccgttgccgcgcgatgcaacagcacgaggaggagcaggagcggccgccgaccgtccgcgcggtcaccatccccttcgccgacctcagggtgccggacagggaccttggcgacaagatcgaggaaggtctgggtccccatgggctcggcatcgtcaccattgccgatgtacctgagtttccagagctaagaaaaaggctgctgcgcttggcacccaggattgcaaaccttcctgaagaggtgaagaaacagcttgaagatccagatagcagatataactttgggtggagtcatgggaaggagaaactcgagtccgggaaacttgacacatttaaaggttccttttatgcgaaccctgttttggatgtccctactactgatgatgtgcttgtaagtatccatcatattgccgaccaaatatatggccaaacgataatcttcctgagcttgagatagcatttaaagatcttgggaagctgatgatggaagttggtttgatgttggctcatcattgtgatcgctatgtaatgaggcaaggagtagggtcatatgatggtgacagtcttgagcagacaattgctcgttcaaggtgtcacaagggtcgtctgttgtactatttcccacgacagtttagcaagcagacagacttcgactcggtttcatcatggtgtggatggcacactgatcatggatctctaacagggcttacatgtggcttgtttacgaagaattctatggaggtaccatgtccagacagtgcagctggactatacattcggactcgtgataaccaagttgttaaggttgtgttcgacgaggatcagctagcttaccaaatcggggaaactactgaaatactgtcaagaggttatctatgtgcaaccccacactgtgtgcagcagcgaaaatgcttcaaatgttgaccgctctacttttgccttgttcatgcaaccagattggaatgagaagctgaagtttccaagcgaaatcccctatcaccaagagttgattccaccaaacggaacgctgactttcggggagtactcagaaaggctggtagacaagtattaccagacaacaacgtagagcatacctcaagaaaagctaccgtccatacgttcgtaccatcaagtgtgttcttgtgtattcatttttagctttgatcataactctgtacaaaatatagtcgatcatcgaatcgaatacagcgcacagtaatgtatcacgcctattgctttgggtgaatttacgtatactactacgactaagaagctaatgtttagatgctaatctaatatacatcctgcagaacagtcgttttctggagttatcagaggttcccgccgcatttcttatga

SEQ ID NO: 211657 - DNA, 1355 bp, Zea Mays
gttgccgcgcgatgcaacagcacgaggaggagcaggagcggccgccgaccgtccgcgcggtcaccatccccttcgccgacctcagggtgccggacagggaccttggcgacaagatcgaggaaggtctgggtccccatgggctcggcatcgtcaccattgccgatgtacctgagtttccagagctaagaaaaaggctgctgcgcttggcacccaggattgcaaaccttcctgaagaggtgaagaaacagcttgaagatccagatagcagatataactttgggtggagtcatgggaaggagaaactcgagtccgggaaacttgacacatttaaaggttccttttatgcgaaccctgttttggatgtccctactactgatgatgtgcttgtaagtatccatcatattgccgaccaaatatatggccaaacgataatcttcctgagcttgagatagcatttaaagatcttgggaagctgatgatggaagttggtttgatgttggctcatcattgtgatcgctatgtaatgaggcaaggagtagggtcatatgatggtgacagtcttgagcagacaattgctcgttcaaggtgtcacaagggtcgtctgttgtactatttcccacgacagtttagacagacttcgactcggtttcatcatggtgtggatggcacactgatcatggatctctaacagggcttacatgtggcttgtttacgaagaattctatggaggtaccatgtccagacagtgcagctggactatacattcggactcgtgataaccaagttgttaaggttgtgttcgacgaggatcagctagcttaccaaatcggggaaactactgaaatactgtcaagaggttatctatgtgcaaccccacactgtgtgcaggcacccagcagcgaaaatgcttcaaatgttgaccgctctacttttgccttgttcatgcaaccagattggaatgagaagctgaagtttccaagcgaaatcccctatcaccaagagttgattccaccaaacggaacgctgactttcggggagtactcagaaaggctggtagacaagtattaccagacaacaacgtagagcatacctcaagaaaagctaccgtccatacgttcgtaccatcaagtgtgttcttgtgtattcatttttagctttgatcataactctgtacaaaatatagtcgatcatcgaatcgaatacagcgcacagtaatgtatcacgcctattgctttgggtgaatttacgtatactactacgactaagaagctaatgtttagatgctaatctaatatacatcctgcagaacagtcgttttctggagttatcagaggttcccgccgcatttcttatga

SEQ ID NO: 211658 - DNA, 858 bp, Zea Mays
tgttgcagaaccataagtaatgaggcaaggagtagggtcatatgatggtgacagtcttgagcagacaattgctcgttcaaggtgtcacaagggtcgtctgttgtactatttcccacgacagtttagcaagcagacagacttcgactcggtttcatcatggtgtggatggcacactgatcatggatctctaacagggcttacatgtggcttgtttacgaagaattctatggaggtaccatgtccagacagtgcagctggactatacattcggactcgtgataaccaagttgttaaggttgtgttcgacgaggatcagctagcttaccaaatcggggaaactactgaaatactgtcaagaggttatctatgtgcaaccccacactgtgtgcaggcacccagcagcgaaaatgcttcaaatgttgaccgctctacttttgccttgttcatgcaaccagattggaatgagaagctgaagtttccaagcgaaatcccctatcaccaagagttgattccaccaaacggaacgctgactttcggggagtactcagaaaggctggtagacaagtattaccagacaacaacgtagagcatacctcaagaaaagctaccgtccatacgttcgtaccatcaagtgtgttcttgtgtattcatttttagctttgatcataactctgtacaaaatatagtcgatcatcgaatcgaatacagcgcacagtaatgtatcacgcctattgctttgggtgaatttacgtatactactacgactaagaagctaatgtttagatgctaatctaatatacatcctgcagaacagtcgttttctggagttatcagaggttcccgccgcatttcttatga

SEQ ID NO: 211659 - DNA, 699 bp, Zea Mays
aaatgacaaaagcatcaagtttggcttccatgctaggcttacatgtggcttgtttacgaagaattctatggaggtaccatgtccagacagtgcagctggactatacattcggactcgtgataaccaagttgttaaggttgtgttcgacgaggatcagctagcttaccaaatcggggaaactactgaaatactgtcaagaggttatctatgtgcaaccccacactgtgtgcaggcacccagcagcgaaaatgcttcaaatgttgaccgctctacttttgccttgttcatgcaaccagattggaatgagaagctgaagtttccaagcgaaatcccctatcaccaagagttgattccaccaaacggaacgctgactttcggggagtactcagaaaggctggtagacaagtattaccagacaacaacgtagagcatacctcaagaaaagctaccgtccatacgttcgtaccatcaagtgtgttcttgtgtattcatttttagctttgatcataactctgtacaaaatatagtcgatcatcgaatcgaatacagcgcacagtaatgtatcacgcctattgctttgggtgaatttacgtatactactacgactaagaagctaatgtttagatgctaatctaatatacatcctgcagaacagtcgttttctggagttatcagaggttcccgccgcatttcttatga

SEQ ID NO: 211660 - DNA, 5026 bp, Zea Mays
gctagagcttgacgcgcacctaattttgcgcgccaaatgctcgaacaccttcgcgccatagctacccgctggcattggcaatatccgaagcgaacagggctcccgcaccccaacacctaatttgtgcgcgcgcccgtgtcacaaagagagtgaagagagagcatggaaggctcacccgccgatgccgccggctccggccgccgcacgcgcacccggggcgcggaggcgtcggggcgtgccgccgtgctccaacaactccgcgccgttcgcagtggtcaaattcgtgcctccgacgccatccaggtgaaggttgacgccccgatttacgacaccgtcccggaggaggagtacaacgtgctcgtcgctcgccgccgcaaggaagcaggcgagttcatcatcgacgacgacgggctcggttacgtcgaggacggccgcgaggaggactggagccaccgcgctctcccttcctcctccgacgagggatctgaaggcgaggacggcgccccccgcaagcggaagcagacgcgccctccccaggcgaagcgccagccgcagcagtccgccaaggtggcctctctctccgccgctgccgcaaagacgggccagcagatctcctctatgttcacatcctcggtatttaagggacgcggcagcgaccgcgccaagaacttggcactggccgccgacagcatcgtggacgacgtcatcgccgagtttgcacctgacgagaacgaccgtgaggagaggcggcgacgggttgctagggtttgtgcgccgcagcctgtcccaacagtttcctacatcaagcctcaaaaggtaattctcgatgctgaaatggtcagatcggagaatgaaaatgatatggtggtggtggaattgaagaacgatactgagatggaaaccaatttggaagaaattcctggttctagtgctgaattggtggttaataagagtttggaggagccgaagcaggaggataatggggaagtaaagatagaaaaggcacaccgcctcaatgcaaagattaaggcggaggagtgcagaaataatgatgtgacgagtgcaacagaaggatggatgaagatatgtgggaatggggagaatgcagtaggtgaagaaggggtggctgttgatggtaacaccaatgtggatgaaagttcagagtttgagctgaaagatggagcactgcccttctacatactggatgcatacgaggaaccatttggtgctaattcaggcacagtgtatttgtttgggaaggttgaagttggcaagcaattccatagttgttgcgtcattgtaaaaaatattcaaagatgcatatatgctattccaaaccggtcagtgtttccaatggactccatatcagggatagaaagaaaccccactgctgaccttttgccatcacttcgagcaactctacatgagttggcatcaggattaaagagtgaaatagctgacaaattgtcagacctcaatgtgtcaaatttcataatgactccagtcaagaggaattatgcatttgagaggactgatctaccaaatggagagcagtatgtcctaaaaatcaattatccttacaaggatcctgctctaccagcagacctcaggggtgaacattttcatgcattgcttgggacaaacaatagtgctcttgaattgtttcttatcaaaaggaaggtcaagggaccttcatggctgtcggtttccaagtttgtgacacggccatccactcagcgggtcagctggtgtaaatttgaagttacagttgattgcccaaaggatatatctgttttgacaacaagtacaaatctagaagttcctactgttgtagttggagcagttaatctcaaaactatcataaatgagaaacacaatgtgcatgagattgtgtcggcatctctcatatgttgtcatcgggtgaagattgatagtccaatgcgtccagaagattggcagaaacggggaatgctcagccattttactgttgtgcgcaaacttgaaggtagcatatttcctataggtcttgctaaggaagcttctgataggaaccagaaggctggtagcaacgtgctagcactagaaagcagtgaacgtgcattattaaatcgcttgatgattgagctgagcaaacttgattgtgatgtacttgtgggacacaatatttcagggttcgacttggatgtgcttctacaccgtgctcagacatgcaaagtgccaagcagcatgtggtccaagattggtcgtctcaggcgatcattaatgcccaggcttaccaaaggaagcacactctatggttctggagcaagtccaggaattatgtcctgtgttgctggccgtcttctctgtgacacctatttatgctctcgtgaccttctgaaggaggtgagttattccttgacacaacttgcagaaacacagttaaaaaaggtcaggaaggaggtttctccacacgatatacctatgatgttccagtcttcaggcgaactgctcaaactggttgaatatggtgagacagatgcatggctttctttggagctcatgtttcatttgagtgttctcccactgacacgacaattaaccaacattagtggtaacctgtgggggaaaacactccagggtgctagggctcagagggtagaatatctactactgcattcattccatgcaagaaaatttattgcaccagataaatttgcacgcaacaaagagctgaactccacaaaaagaaaaatgaatcctgatactgggggtgcaaatgctgatgatggtgctgctgatccttccgttgatgatgaagtgcataatggtgatcaaagtaaagctagaaaaggaccttcatatgctggtggattagttttggagcctaagaagggtctatatgacaagtatgttctacttctcgacttcaacagcctttacccttcaataattcaggaattcaacatatgctttaccactgtcgagcgttcttctgatggcagtgtacctaatttgccagcatcaaaagttactggtgttttacctgagttgctgaggagtttggtggagaggagaaggatggttaaatcatggttgaagactgcttctggtcttaaaaagcagcagttcgatattcagcaacaagcattgaaacttactgcaaatagcatgtatggttgcttgggcttttccaactccaggttttatgcaaagccacttgctgagctgattacactccaagttatctatggtgatacagattctatcatgatacatactggacttgatgacatctccagggcaaaagcaattgcaggaaaggttattcaggaggtgaacaaaaagtaccgttgtctggagattgatcttgatggcatatacaagagaatgttacttcttaaaaagaagaaatatgctgctattaaagtagcactggatggcagcttacgagagaacattgaacgcaaggggctcgatatggtcagacgtgattggagtttgctgtcaaaagacattggagatttttgtcttaaacaaattctgtctggagggacatgtgatgatgttgttgagtcaatacatagttcacttgtccaggtgcaagagcaaatgagaagtggtcaaatagaactcgaaaaatatgttatcacaaagagcttaacaaaagcaccagaagattatccagatgctaaaaatcagcctcatgttcaggttgctttgagactcaagcaaaatggttactctggttgctcagctggtgacacagtaccttatataatttgctctcagcaggactcagataatgcacattctgtgggaatagctcagagagctagacatcccgaggagttaaaaagagaccctgacaagtggatgattgacattgactattatttatcacaacagattcatcctgtcgtttctcgtctgtgtgcttccattcagggcactagtccagctcgtctggctgaatgtctgggccttgattcggctaagttccaaccaagattgactgagtcgagcaaccaagatacatctatgatgctgttatctgtaatcgatgacgaagatgagagatatcgtggttgtgaaccactgcgtttgtcatgcccaagctgttctggtaccttcgactgcccccctgtatctagtctgattactagtgctagtgctacaagtgtatcagatccaattgaaggaaaggatgctactgctaatttctggcgccatatgcggtgcccaagatgcctagataatactgttgagtccaaattttccccttctatgctcgccaaccagatgaaaagacaggctgataatttcattagtctatattataaaggtttgcagatgtgtgacgatgagggttgcaaatactcgactcacagcgtaaaccttagagttatgggggattctgagagaggaactgtctgtcctaactacccacgctgcaacggtcgcctagtaagacagtacaaggagtcagatctgtacaggcaactatcatacttttgttatgtacttgatgcaacccggtgtcttgaaaagctggaccagaaggcaaggctccccttcgagagagagtttgtagcagtaggccaaacaattaaattggcactgctagagatccagaaaatccgagacagatgtgcatttggatgggttcagctaaaggaccttgccgtatcaatatgatgtttttcttgtgtgaaagggctcaattagataagtttgaattaaccgtgcaagaaattcatctctctgtaggttattctagatctcgttggtaaaaggaacaggacacggcaaacggtgtatcgaaacaccagccgtctttggtatttccctgcgtgacagaccttgtatcatctatacatgtgttttagccagtggctgtattgtacaactttatgttgtgtccgtctccataggcctcggtgcatgtgccaatgtagtcttgttaatataattatacgcagcgtgtgatgagaaaaaaaaaacaagacactagattactaatgtcgcgagttgcggtagatgggaa

SEQ ID NO: 211661 - DNA, 5077 bp, Zea Mays
gctagagcttgacgcgcacctaattttgcgcgccaaatgctcgaacaccttcgcgccatagctacccgctggcattggcaatatccgaagcgaacagggctcccgcaccccaacacctaatttgtgcgcgcgcccgtgtcacaaagagagtgaagagagagcatggaaggctcacccgccgatgccgccggctccggccgccgcacgcgcacccggggcgcggaggcgtcggggcgtgccgccgtgctccaacaactccgcgccgttcgcagtggtcaaattcgtgcctccgacgccatccaggtgaaggttgacgccccgatttacgacaccgtcccggaggaggagtacaacgtgctcgtcgctcgccgccgcaaggaagcaggcgagttcatcatcgacgacgacgggctcggttacgtcgaggacggccgcgaggaggactggagccaccgcgctctcccttcctcctccgacgagggatctgaaggcgaggacggcgccccccgcaagcggaagcagacgcgccctccccaggcgaagcgccagccgcagcagtccgccaaggtggcctctctctccgccgctgccgcaaagacgggccagcagatctcctctatgttcacatcctcggtatttaagggacgcggcagcgaccgcgccaagaacttggcactggccgccgacagcatcgtggacgacgtcatcgccgagtttgcacctgacgagaacgaccgtgaggagaggcggcgacgggttgctagggtttgtgcgccgcagcctgtcccaacagtttcctacatcaagcctcaaaaggtaattctcgatgctgaaatggtcagatcggagaatgaaaatgatatggtggtggtggaattgaagaacgatactgagatggaaaccaatttggaagaaattcctggttctagtgctgaattggtggttaataagagtttggaggagccgaagcaggaggataatggggaagtaaagatagaaaaggcacaccgcctcaatgcaaagattaaggcggaggagtgcagaaataatgatgtgacgagtgcaacagaaggatggatgaagatatgtgggaatggggagaatgcagtaggtgaagaaggggtggctgttgatggtaacaccaatgtggatgaaagttcagagtttgagctgaaagatggagcactgcccttctacatactggatgcatacgaggaaccatttggtgctaattcaggcacagtgtatttgtttgggaaggttgaagttggcaagcaattccatagttgttgcgtcattgtaaaaaatattcaaagatgcatatatgctattccaaaccggtcagtgtttccaatggactccatatcagggatagaaagaaaccccactgctgaccttttgccatcacttcgagcaactctacatgagttggcatcaggattaaagagtgaaatagctgacaaattgtcagacctcaatgtgtcaaatttcataatgactccagtcaagaggaattatgcatttgagaggactgatctaccaaatggagagcagtatgtcctaaaaatcaattatccttacaaggatcctgctctaccagcagacctcaggggtgaacattttcatgcattgcttgggacaaacaatagtgctcttgaattgtttcttatcaaaaggaaggtcaagggaccttcatggctgtcggtttccaagtttgtgacacggccatccactcagcgggtcagctggtgtaaatttgaagttacagttgattgcccaaaggatatatctgttttgacaacaagtacaaatctagaagttcctactgttgtagttggagcagttaatctcaaaactatcataaatgagaaacacaatgtgcatgagattgtgtcggcatctctcatatgttgtcatcgggtgaagattgatagtccaatgcgtccagaagattggcagaaacggggaatgctcagccattttactgttgtgcgcaaacttgaaggtagcatatttcctataggtcttgctaaggaagcttctgataggaaccagaaggctggtagcaacgtgctagcactagaaagcagtgaacgtgcattattaaatcgcttgatgattgagctgagcaaacttgattgtgatgtacttgtgggacacaatatttcagggttcgacttggatgtgcttctacaccgtgctcagacatgcaaagtgccaagcagcatgtggtccaagattggtcgtctcaggcgatcattaatgcccaggcttaccaaaggaagcacactctatggttctggagcaagtccaggaattatgtcctgtgttgctggccgtcttctctgtgacacctatttatgctctcgtgaccttctgaaggaggtgagttattccttgacacaacttgcagaaacacagttaaaaaaggtcaggaaggaggtttctccacacgatatacctatgatgttccagtcttcaggcgaactgctcaaactggttgaatatggtgagacagatgcatggctttctttggagctcatgtttcatttgagtgttctcccactgacacgacaattaaccaacattagtggtaacctgtgggggaaaacactccagggtgctagggctcagagggtagaatatctactactgcattcattccatgcaagaaaatttattgcaccagataaatttgcacgcaacaaagagctgaactccacaaaaagaaaaatgaatcctgatactgggggtgcaaatgctgatgatggtgctgctgatccttccgttgatgatgaagtgcataatggtgatcaaagtaaagctagaaaaggaccttcatatgctggtggattagttttggagcctaagaagggtctatatgacaagtatgttctacttctcgacttcaacagcctttacccttcaataattcaggaattcaacatatgctttaccactgtcgagcgttcttctgatggcagtgtacctaatttgccagcatcaaaagttactggtgttttacctgagttgctgaggagtttggtggagaggagaaggatggttaaatcatggttgaagactgcttctggtcttaaaaagcagcagttcgatattcagcaacaagcattgaaacttactgcaaatagcatgtatggttgcttgggcttttccaactccaggttttatgcaaagccacttgctgagctgattacactccaaggtagagagatattgcaaaacactgtagatctggttcagaacaatttaaatttggaggttatctatggtgatacagattctatcatgatacatactggacttgatgacatctccagggcaaaagcaattgcaggaaaggttattcaggaggtgaacaaaaagtaccgttgtctggagattgatcttgatggcatatacaagagaatgttacttcttaaaaagaagaaatatgctgctattaaagtagcactggatggcagcttacgagagaacattgaacgcaaggggctcgatatggtcagacgtgattggagtttgctgtcaaaagacattggagatttttgtcttaaacaaattctgtctggagggacatgtgatgatgttgttgagtcaatacatagttcacttgtccaggtgcaagagcaaatgagaagtggtcaaatagaactcgaaaaatatgttatcacaaagagcttaacaaaagcaccagaagattatccagatgctaaaaatcagcctcatgttgctttgagactcaagcaaaatggttactctggttgctcagctggtgacacagtaccttatataatttgctctcagcaggactcagataatgcacattctgtgggaatagctcagagagctagacatcccgaggagttaaaaagagaccctgacaagtggatgattgacattgactattatttatcacaacagattcatcctgtcgtttctcgtctgtgtgcttccattcagggcactagtccagctcgtctggctgaatgtctgggccttgattcggctaagttccaaccaagattgactgagtcgagcaaccaagatacatctatgatgctgttatctgtaatcgatgacgaagatgagagatatcgtggttgtgaaccactgcgtttgtcatgcccaagctgttctggtaccttcgactgcccccctgtatctagtctgattactagtgctagtgctacaagtgtatcagatccaattgaaggaaaggatgctactgctaatttctggcgccatatgcggtgcccaagatgcctagataatactgttgagtccaaattttccccttctatgctcgccaaccagatgaaaagacaggctgataatttcattagtctatattataaaggtttgcagatgtgtgacgatgagggttgcaaatactcgactcacagcgtaaaccttagagttatgggggattctgagagaggaactgtctgtcctaactacccacgctgcaacggtcgcctagtaagacagtacaaggagtcagatctgtacaggcaactatcatacttttgttatgtacttgatgcaacccggtgtcttgaaaagctggaccagaaggcaaggctccccttcgagagagagtttgtagcagtaggccaaacaattaaattggcactgctagagatccagaaaatccgagacagatgtgcatttggatgggttcagctaaaggaccttgccgtatcaatatgatgtttttcttgtgtgaaagggctcaattagataagtttgaattaaccgtgcaagaaattcatctctctgtaggttattctagatctcgttggtaaaaggaacaggacacggcaaacggtgtatcgaaacaccagccgtctttggtatttccctgcgtgacagaccttgtatcatctatacatgtgttttagccagtggctgtattgtacaactttatgttgtgtccgtctccataggcctcggtgcatgtgccaatgtagtcttgttaatataattatacgcagcgtgtgatgagaaaaaaaaaacaagacactagattactaatgtcgcgagttgcggtagatgggaa

SEQ ID NO: 211662 - DNA, 6801 bp, Zea Mays
agacgaaaactttccaagttgcatgcacggtccttactaatggaatagaggtaaagctgcagcggaatgctttaagtgtgatagaacctccgactggcaacgaggatgatgataaatttgattgtgaaaacatgcagtggaatagttcagatatggcctccgatgatgcactatcaccaaagccacagcggtcacggagcaggcagcataggggtttccacagaaaatccatcagccgttcaatgtcatgtgactcccactccaagacgtctgtttcatcttcctcaagagctcacacgaaagttgacctaagcaagctagaactgactgcactgctgagatattggcgtcacttcaatctcgatgcatgtcctaatccatccagagagcagttagttgatgctgttcaaaggcacttcacagcccagcaattggatgagttgcaggtcattgtcggctttgtgcaagctgcaaagaggctaaagacgactatgaaagtggcctgactgtgaagcctgaacttcaactaacagattcaagagaggatgtagcatgtttgatgaatgttgccgtgctatgtaatatatatgcatgaagttctttagattcaggtggctaggttaatggacaactagactatgttagcctcatctgatgtagatatgcagtatcctgtctaaagatgtttcaacctctagctcagttctttcctgctgactggatgtggattgaaatgacaagtttaaaacaagttattttgtcatccttttcgatgttccaacattatatttagcccatgctttagcccaaattgcatgcagaactaattaggaatgcagaatatggtggctagatgtgtcagaaaattaccgagtctcatggtaaagcccttctgcaatagtagccgagaactgtttaaatgagcctgtggaaaaaaaagacttgagtaatggcttgaaaaaagcagtagcaccgatcttcatcaggtggagcttttgtagcaatctcgaatagttgaatgcttttggaaggtgaattgcagtagcatcaagacaaatcgatcagcataaagagaagatattaggcctctgtgacaacagacatcacacacggaataaattagggtcattcaaagtagcatatgaacctgtctgtcgctggtttactatactaactggttttctgtttgagagtaatcataactacggtagatttacctaggacaaaataatggagataagacaagacaatgttgatgctctaatctcaagaaaacaaaaatgtcagccatcttatggcttgtctgagtaaaacctattcccttccaatacatatggaacggagaggagaatgtattttccccttaaatccttctccatacatatatggatttgaggggattattttgtttcaaaacgtggcctaatgctgctagatatctaggaacaccatcatgtaaagtggaacagaaagagtgcttccataatggagtgtttgggttggtgaatcaacccgttttagatgaggtgatccatcatgactttattcctcaaatttaatgaaatgactttattctgtatactttgtggtagcaggtctccagccccggtaaaggaggattgtgataggtttgacaagcagccgttaaaactagctgttctaataaagacaaaacccaaaagaaatcagttagggcataaccctcttagtaacttgtcatatcggaatccaagtatggtgttaaatgggtaaagggtgaaagggcctctagctgggtaagtaaggtggtctgagtatcactcaggttctaggttcgactcctcgtgggagcaaatttcagattgaggttaaaaaaattcactcattggttgcattggtcggcatggtgaaccaacatatggtgggcgagccctcgcataagtggttggtcaggtgggttgggcggttgggcctcaaagcatgggtcaagactcgaactatagggggcggcatccccatgtatgaggggccagctttcgtggcttttcttggtcgagctccgattgagctcttcttagtgaaataccgtggaggcggtccttcccccaccagccaagttaaatgggcaaaggctaggtcgacaccccttggtgacacgctatgtcatgatatgagcacggtgaagtgagcaaggattggatcactgcttccttaatattgcgcttcaacgcccagatgtagtgaaaaatgtgcaagtgccttttacatcattgacgggtctaaaaggtaagctagttgaaccaactaggatctttctaattagttcgaatgtagggtcgcttgcaggtaagttttagttgagataatgactaggagacataaaaatattttatgtgtccacaaaactaaatgaaggatcagaagatggagatggacaataccgacttcaaaatttggtacacagggacagctacaaacagaaacggagttctaattgataagagtctcaagaacagtatggtggatatgagaaggcgagaagcaagcttgtcatggatggtttgatcttgaacgtaatgagcgtgtataacccccaagtaggacacgatgagagtgctaagagacttttctatgaagacttagatagcatggttaggactatacctattagtaagaagcttttcataagagatctcaatagtcatgtaggtacaacaagtgcaaattttgaggcaatccatggaggttttgagtatggtagtagaaattggaagggagaggaagtcttgaaatttacggtagcttttgacctattgatagtcaacacttctttaggaagaaataatcccatttagtgaactatagtaatgacgaacactctagtcagattgactttgtccttacaagaagagaggataaacaagtatgcttggattgcaaggtgatacatgaagagtgtgttgtctctcgatataagcttgtggtgatggtcttccgttttcaggtacatacccctagggataaacaagccaagattgcaagaacaaagtggtggaaagtaaaagagaagatgttagaagtcttcaatgaccatcaaagaggatacttggaaggaaaatgaggcaaacaacatgtggaagatgatggcaacctgcataaaaaggtagtctcagagctattaagaagaagaaagaatgctatagacgtttgtaccattacatgagtatggactatggacaacatagagaagtacaagatagtaaagaagactgtaaagcaagctgtaagtgtgccaaggggtagggcatatgccaacgtttgtacacacatgaagaatggctagggtccatgagaggaagacaagtgacttcaaccaagttattcaaccaagtgcattaaggatgaaatcgagcacctattggtggatgataagtggcgagagtattttgacaattgttcaacgtggagaatgtaacacaacctttcatttagatgactcttttgatggcatctatagacgatttgtgcgtaggatccaagaatttaaggttaaagagacattgaaaacgatgaaaggggtaagacgatgagccctgatggtatcccgactgaggcatggagatgcctcagggacagctatagtatggccaactaagttattgaaccgcatcttccgatcgaataagatgtttgacgattggagaagtatgttagtaccaatctacaagaataaggaagatattcgaaattgtactaattatcgaggaattaagttgatgagtcatactatgaagctatgggagagttatcgagcattgtctgaaaaggaataatgaggaccccgataaaccagtttagtttcatatgcctgaaactgaaaggtcaatcatggaagctaatttcttagtaagacaagtgatggaacaacatagggagcagaaggactaacacatggttttcatttacttggagaaggcttatgacaaaataccaagaaagtttatatggtgggctttggacaaaaataaagttgcaacaaagtaagttggacccattaaggatatgtgaaaaggcatctagcctagtggttaaaggcttccgagaagcacctctaagacccaggttcgattcccctcgagggagaattttctggcttggttaaaaaaatcccctcactgtgcctcatatgcgcttgggttacaatgtcttgtgtgccaccctccggttgaaccattgtagagtggaaggttgacgccggccagttagtgatggccagcgttcggagattttctcggctgggaccaatgttttggtctcctcttaatattataccgccattccctctccagccaagtttttttcattaaggatatgtatgttgtgcctagcgttcgaacaagtggagacagagatggcttccctattagaacagaactgcatcaaaagtcagctttgagcccttacctttctgccttagtgatggatgagattgttagagtgccactaaccaattcaacccaaaagcttaaactgatgggagaaggcagtcaatccacttatacacttcaacacccccactcacgtgcagccagagagaaaggcgcaaaagcgaccagagagaggcgcaaacatggaaataaatgggtggaggcacaaattaagcctctgtcaggatttgaactcgagacctctggctctgatatcatgttagagaggacgcactaaccagatcaacccaaaagcttaagctgatgggataaggtagccaatcctaaggaacgaaagcaatggaaagaaaaacaggggaaaacagaagttgatatgggaagaggacagtacaaggagacctgaaaagatgaaatatacccaaagatttagccttaaataagagtgtctagaaaacagctatccatatgtatgaggtgtacatttgggtcgggcctgatgggctgacccgaagcacgaaaaaaacacggcccaagcacggcacgacccgaaatattttagtgtcggggcgggtttgggtcgaggtcgtgggccataggcaggcatggcccgtttaaagcaggcacgaaatgacccatatagaggcacaaaaaggctcatatatattcattaaaaccacacttcaatccacactttcatgtacttgataaagaacataaagctagagatgatactagttagatgttttttgcagctttgaattagagtgtgatgtaattttacttttattatgaacatattgaaggatgcatagaccacgaaaggtcaaaatcaacgggtgttctctaatcatttaggagaactcatgataggttaggtgatcctgtcatatttaccatactggctagaaacagaagcaacagttcttccaaaggtgaagtgaaaacggttgaggaaaggaaaaatcgacgaaatcttattttcactctcaggaacattttacaccctcaaactgtcactgaagtataatattgacatccaacagcgactcaaactactgaaagcagccaaattgccctgttgatcccatttgaaagggtgttttccagtgatgtggcactgacaatgactcagtttgacatgtaagtgcttatcactaatcacacctaggggtggtaactggctctagattttacagtatacaatttaaggatcgaaacagattaggatcgagctctattcatattcattttttaactaaattatttaagggacctaacttattgtgaagaaacatttggatcatgatccattaccacccctaatcacacctcgcgcacaccgcacgagcagtggtgataaatcaaagtaaatatgaataacaatatataactgcacctgcagttaatcttttggcattcttctatttccatattctccctttccttatctccataggcggaaaagaaagagataggccttggagatccaggagtgatgtggatgattggatggtgagatgacaaatcccagtggcatggacttgcagacttatagctgggccctaaatggattttctcccacaagaccagtaagggagtcctcaacagaaattgctcgttgttaactttttaagctccatgtcaccatgtaggaccaatatgtaaattttttaaaattttcctttctctccaaccgcttctctctcccatcgtatgaacccaggcaccagcaggcatatgtactttgcgtcgctgctgctgccccatcgccactaccgaccaggacaccaggtgggtcggccttgtctcttcttgcaccgccgcccattggccacgtctcctccgtgtcgccgcactttcggacctgcgcgcaatcggccttgtcgcccgctccactctcagccatttgtcagaaatttggattcttagctagggcacgttgacggtagggcacccacaagcacacactggccagtttgcccatgtgaacacgtcgtcgactgggtcctccagcgagcacggggcagtgtctagatacactaccaagattagttgagcgggagccaagagggcaccactagagtctagatcgctttcttcccacattcgacctattctctcaacttgctttttcagcgagactagcaatgaacaagtcgctatcgaggttattttccattttctctcacctccaagtcggtgagaattcgagtcagctggctacttcgacgattgctggacaggccctaagtcaacattaagatttccgatttattgtagtgcttcactatccatagtttccacagcatggatctccaattatacaacttagagatgagtccatttttcttatctgatttcatatcaaagcaaa

SEQ ID NO: 211663 - DNA, 2475 bp, Zea Mays
ggggcctcccccacgctgtggcattccacattcgtcgggtttgtcggtggtggtgggcgagctgttgctggggctcattatttgccgtaatgtcgctgattaggaaagggaattgcttggtttctgttgggttgttagcagtagcaatggatgatgtaatggcatgagttacaactcaagcgggtgctcacaagctggcactgtaaaatgttgccttttggttgtgggaatcggcgttggtagcaggtgctcacaagctgggcactgtaaatgttgtcttttggttgtgggaatcggcgttggtagtttggagttcctgaacgtagcactggttaaagtatctttcttttcttccttgcaaaggcttttatgagttatcacagcacacccacaagcaataagtggttcatgatgaagaaagaaaagtagtagcaatcctgggtaaaagttcaaagtgccctgattttcgcattttgtgtcatctcggatgaactttgctgctcagtcaggaaattatctgaaaaatttttcatcagcagctcgattcttgatcttacaatagttggtattgattatacagagggtgactcgaccctacagggtcagcaacctcactatttgaaaacaagctgcaaaccaagcctagatcatgggagtcccgtgtacctgctgggacatacagggaaaaaagaactggtgattggtgagggcaaggtggttattggcacagacaacctcataaaactctcagccgagggggtgacatggtgtcctgggtctgctggttttgatgcccaagggaacctagctttcatgatctgtgatccaatgaagctggcctcttctcccaccgcaagatcatcctcggcatcctcatcctcatcacattcatggaagaaggatcagccaatgcaatttgggattcccatatctgtagtttgtgattggttatatcagcactggcagggcagcttggacgaggttagcaagccaaagttacctcttgttcggctgatgtccagcaggagtgatcactcaagcacctcgttcactcgtcgtcatgtgttcaagcctgacgatgagaacgatgatgcatccgtttgttcaaagcctaaacatcagcaggtatcaggtagcacagccactgcaaggatttcacatgaagcaaatcctatagttgatctgcgcacaagctgtgagcagggtgttacgactccagaaatatatgaatcgccaaggcgaagttcttgtcaggctcagaagaacgctgctgcaccaattcaactcttggacatcaacttcccacccagggttccaaagactatatttctaccattgcctctgaagcaaatgctttctgatgagaacaatgttgaaacgtcgaagccaaaatatcggtcaaaagacaatggcttcccatcagggctgatatggcaccgcaatattgaggctgagtgtagggaccctccggtagctcttcagcatatggattgcagcagcgagggacagtcgagctcatcacctgctgagataccggagtatggatgccaagaccagtacgatagcgaggaggaaacaatgtactcagctgaaaccatggaaagcaggaacattccaagccccagggagaaacatgtggggaggagccagagctgtgttacctacagcaggtggagctctccaaggacctcatcaatgcagaatggaaccttgcgaaagcagcatacactgatccctgtgcggaagacgcactcgcagaacacgactcttccgcagaggagtcatgactacttaagcccaacagtttcctcagccatgaagaagaggaactccatggaacagcagcaggccacaaagcctcgacggagcaccatacagtcttctccaaaatggatgttttgatggttctatctatatctggttttgaggtggaaacaatgaagaaagcaagtgcctactcggtgaaaactactgctcctatgtttcctactcaaaacttacatgtaagtctgctcccttccctcagttctctacttctctccctgggttcctgtgtgcagaatggcatggataaataaagagaaacaaaaaggaaaagaaaagcaaaaaaatcatcacaaaagattacagatgaaatgtgttgaaggcggcatttgtgaggtgcgatgaggactgttatattcctgccgactctagtgttcagcttacaattttcaactaaacatttttaatatgttttttttggtattttgctattcatccatagccatgatgactgtaatcattttgtttgctactgcttgcggccttatgtaccatgtgtgtcatcctgaattagaccaggaaataggttgagagttggctaccaagtgagtttttttttttcaattgaccgcttgtccgcagtgttggctgtgtgccatactatatagcaatgtaaatagcttttatttgaatgatgcggcagagttcatt

SEQ ID NO: 211664 - DNA, 1063 bp, Zea Mays
taactacccttcgttcctctcaattcgaaggatcccctttctctacctggaggacatccaaatgaggttcatgaaaaactacggcagagtcgcccactctgcgctggcttacgccatgaacgatgagttctccagagtgctccatcagcaaatggagttcttctccagcaacccaagcgccgacacactcaaccgtctccgtggagaagtcagcgagatacacaccgtcatggtcgacaacatagagaaaattcttgacagaggcgatcgcatctcgctccttgtcgacaagacatccaccatgcaagacagcgcctttcacttccgcaagcaatccaagaggctccgtagagctctttggatgaagaatgccaagcttctagttgtgttgacagttgtcatagtagtgctgctctacttgatcatttctgctttctgtggaggcctttccttgtcatcatgcagatcatgagtaacacaccagatggctttgcccctcccttaaatggagggtagaacaccatggaatgatgcctgctgtgttgagcaccggagcttccggaggcaaaaaaaaaaggagatcgatggataccactgtggtttccagtaacttggatcagtttgtacagtggacgagtggagttggccgttgctgtttttgatgtcgccatggttgtgggtgaactcaaaccttaaatcgtggtgtgcttagcatctttcttggcgtgtcaaactgtcgttgtgacttgtgagggatgggactagtgagttgggttttgtagagttacttggttatcaatgtgcagacatatatgtatgccgcgatgagtgttagtacatgcctactatggttatcggtgtacgaaagtgtcttagctgctgttgtttgagactgccatggatggatgtggttgtgttttgaaggagctgcccttgtggccatgtgatgaataaaagcacgtaaagcaagcagactagcagagggttacgatgtgcagcagttaggaggagcaggtccggcgacggcgaggcagatgaaacaactcctctgttcctccctctc

SEQ ID NO: 211665 - DNA, 726 bp, Zea Mays
gctgtttctcttccttctatgaatatcgaagacattatatatagagttgtgttgacagttgtcatagtagtgctgctctacttgatcatttctgctttctgtggaggcctttccttgtcatcatgcagatcatgagtaacacaccagatggctttgcccctcccttaaatggagggtagaacaccatggaatgatgcctgctgtgttgagcaccggagcttccggaggcaaaaaaaaaaggagatcgatggataccactgtggtttccagtaacttggatcagtttgtacagtggacgagtggagttggccgttgctgtttttgatgtcgccatggttgtgggtgaactcaaaccttaaatcgtggtgtgcttagcatctttcttggcgtgtcaaactgtcgttgtgacttgtgagggatgggactagtgagttgggttttgtagagttacttggttatcaatgtgcagacatatatgtatgccgcgatgagtgttagtacatgcctactatggttatcggtgtacgaaagtgtcttagctgctgttgtttgagactgccatggatggatgtggttgtgttttgaaggagctgcccttgtggccatgtgatgaataaaagcacgtaaagcaagcagactagcagagggttacgatgtgcagcagttaggaggagcaggtccggcgacggcgaggcagatgaaacaactcctctgttcctccctctc

SEQ ID NO: 211666 - DNA, 1840 bp, Zea Mays
gtactaggtaggtctttctccttgcaatctttccgtttcttcgtttgattccctcccgccgccgccgctggagacgcccaaccacgacagcgccccagggttcgtcctcccgctggaatagtaagtgaccggagaaaagcagcacaagagagatgtggtatctatgcgtcttctaccacaggctcctggactaccggcgaccggaggtggagtccctcgccgagctctttgccggcccaggcgcccgtgaatccgtcgagtggcgcatgccggagaaccaccacgtagactcccccttccacctcgttcgcctccctggagacgagcgcctcgccgctcaggtcgccaaccgcagcttgttggtgaagggggtctacgagctctggggctatggcactacctacgaggagctggagaagtcggtcagggagtaccccgacgagaggaagcttccgttcctggtcccggaaagcagcttcaagatcgttatcgacagcttcggcaaggtgatcagctcccaagagcagaacgagatcatacagagcctcacttacataccattcaagggacgtgttaatttgaagaagcctgatcacagattctttgtcatggagaccgatgactatgggtcgaacaatggtctcccaccggttgtcaagaggtcgatattctttggccgggaggttggagcagctgataggcatctcctgccaacataccagctcaagagtaggaagtacattggccccactgcaatggatgctgaaatggctttcctcatggccaatcagggtctggcctcgcctgggaagcttgtctatgacccttttgttgggaccgggagcattttggttgcagctgcacattttggagctatgacgatgggtgcagatattgatataagggttgtacgggatggtcgtggccccaattgcaatgtttggagcaactttgagcagtataagttaccagagcctttgtgtttgctaagggcagacaacaatctcccaccctggcgtcctggattgaaggagatgttcgatgcaataatttgtgacccaccatatggagtccgggccggtggccggaagtctggtggtcggaagctcataaaaggcgtcaaaggcccttacacagtgcctgatgagaaacgggacaatcacatcccatcaaccgccccatatagcctcgcagagtgcgtccatgacctcctccaccttgccgcaaggatggtagtcatgggtggcaggctcgtcttcttctaccctgtactgcgagatcctgagctttcggtacagccgggttctgctgaccatggtgaaggttgcaccttacaccgaggagatcgagaagttggccgcagagcggcaccgggagttcagggagaaccaccagaagtggatggaggagggcaacctccattccgccgtgttcgagccagcccaggatgggaagcctgatagagactccaagcccaaatacagaggcaagtatgtgtagcagcgcagatactaacttgttgaatttagtggaaacacatttttggtggtttcctgttctgcatcctgtaccaaattttatgagctagtgtgttggcaggcgctgcgagatgtaccactgttccagagtaccattcaaatcttgtcagtccatttgatggatgaggaagtgtaattgcagcttaattgactgaacttatttttttggttaacctgcctttgacacggctgttgaaattggcgctgcttctgttactgaattatatgaaaagaaataattcagtaacagaagcagcaccaatttagtactaagggaaaaaacaagtaaaatacatcagtgg

SEQ ID NO: 211667 - DNA, 1221 bp, Zea Mays
gcggaacccttcttttgtgccatgactatcgtgaagagcatccagaagtgactgtcctcgacccaccaaatgctatccaacatttgcacaatcgccaatcaatgctacaagaagttgctgatttgaacctgtccaatggttatggagaggtttgcgctccacgacaactagtcatcatgaaagatccgtcttccatacctgatgcagttgccaaggctggactaaccttgcctttggttgccaaaccattggtcgctgatggtacatcaaaatctcatgagctatcccttgcatatgtggaagcatcattgcctttgcttgaccctcctttggttctccaggaatttgtcaatcatggtgggatcctatttaaggtatatattgttggtgaaacaatacaggtagtccgcaggttttcacttcctgatgttaatacatatgacctgggaaacaatgacggtatctttcgattcccaagagtttcttgtgctacaaataatgcagaagatgcagatgttgacccttgtattgcagaacttcctccaaagccacttcttgagaaacttggccgggagcttcgacgccggctggtactgaggtcttaggctgtttaacatagatatgattagagaacatggaagaaaggaccggtactatgtcattgacatcaactattttcctggatatggcaagatgccaggatatgagcacatattcactgacttcctgctaagcctcgtgcaaagcaagtacaagaggctaagtgggagctgaagcgtagagaagatttactttcgatggagactattaacagatgccagctagcctggccatataacagtggcagctagaaaggtcttccaggttgtacatagcaagggggtgggtcttagcatgaatgcggtgtttgggccggggccttgactgaaggcgcatagcagaactaagataaaaaatgcagtgtttgggccggggcagtatctgaagaaaggttttggctccgtgcccagcctactgtgtaattcgtttgaccgagtggccgacctgtgtaaatcgttttaccgagtgccgacctgggcttctttagtttcaaaaacaaacaaacaaaacctttgcttcgtttttgcattcattgtttatcacccgactgatgccccgttctttgattgagatttgctgtagttaattttgcggagatttcgctgttaaccctgtccagag

SEQ ID NO: 211668 - DNA, 2181 bp, Zea Mays
gccatggcttcgggcatgccacccgcgccctcgaggtggtgaggcacctggtcaccgcagggcacgacgtgcacgtggtcatcgccgcgcccgagttcgtcttcaccaccgagatcgcctcccccagcctctccgacaagctcgcgtccccgtccacatccgagatgctcgcgcccgcgccttggatggaagcccagaatcgccttccatcgaggattctacaccacgcgtcgcgccccctccccgcacgcaagcccccgcctgcacattctccgccaccccatcccctgtccggcgcgtgtgccacggcctccctcgaccagcggcacgcgtacgccatcaccccctccctactgctcccatccgcggtgctcaccttcgccatcgcgcaatccatcaaggtcctcaccacctggtataaggagaaccggtgggacgcgaagcagctggtgggctccggtgggatgccgtcctcgcactcagccaccgtcacagcgctcgctgtcgccgtcggcctgtaagaggggctcgccagctcgttgttcgccaccgccgtcgtctttgtcttcgtggcacaataagccacttcaggcttcagtctgttctgtgatcagcagaacattatgggctctaaagcaggaggacttttgagatttacagagcttcaactaagtcaacttgttgagtcgcttgttacatatcttttgcatatgggaaaaaataatagataagaggtagtgtgagacacatattggcaactgaccaaatgacttcagatatttggggtctcatcgatgttcaaacagagaatgcacaaagtagtcagaaatggtaattatattgtcattgttgttgctggtagtgatgttactgttctactatcacgaaggagaaatttgatccaattggtgggcctttgcctaaactttcacaagctgattccaagcaatgtgtctaaaatctttttcttgtgttggtaaccaccagatgcttgtcaattgtcaaacttattttggttggcttattttcaagattaaatgatctctggtaactgaggagaatgctgtagatgttgattttccttttaggaaggtgaagctctccgatgtggtagggggaatggaaaatgtgcatatatgcttctgattgcagtgagattagcctcgtccaagttatgggatctgccatgaactagacaagattataagtttacagaggccttacatcaagagagtacaagattgccataaggaagtaaagtctttgaggaaagtgaccttatgagaagcttgagaaaatcaacttgtgtgtgagaagttttgtctacttgtgctaattagtcatatgatatttttagtcatgaactagacaagatcagaagtttaaagaggttttaaatcgagtacaagatcgccataaggaagtacaagtctttgaggaaagtgaccttatgaaaagtttgagcaaatcaacttgtgtgcgagaagttttgtctacttgtgctgatcagtcataccttggaatattgctgaactgttgcctttgttgctcattggcttcaatacttcatacaccatcaaatgagtcatgtgcaaaattcttcgaagcatcagttcttgctctagaagaacttcatcaggtgattactcttttgctttcctttattgaataattagcacatgtgcgttcaaaaaaattgccacatgaatgaaatgatatattctcgaattattctattgagttttttgtttttatcacaacaccaccctggcgcgctagaggcggggtcgaatcagcaactacggctgacatgacgctacccatccagttgctcactgctcaggttatagcgaagaacattgttttagctggatacaaggagatgcagaagctctgagttttgaggatggatctatggatggttacactatcacatttgggatcagaaatgtgacgcacattgagaaagctctatcagaagcttacagttgatggttctaaagcaagggtggaggttcctatgcttggagttgagtcatgtggatgtccctatttttaaatagatttatgatgcttactcgttttctatgattccggctattgaagagctggttgatggtgatcggcagatagaagacgggcaacatgctaaccaggctgcttcggggtcaggagccgctg

SEQ ID NO: 211669 - DNA, 2646 bp, Zea Mays
caacgccgcagccgccgcgaaatccgcacccacccgcgcgacctctactgccgcaaggccgcagccgccgcgaaatttgcacccacccgcgcgccgcagccctttgtccgcgccggagcctagcaccgaaccgccgcggattcgccactacatcaccggccatggcttcgggcatgccacccgcgccctcgaggtggtgaggcacctggtcaccgcagggcacgacgtgcacgtggtcatcgccgcgcccgagttcgtcttcaccaccgagatcgcctcccccagcctctccgacaagctcgcgtccccgtccacatccgagatgctcgcgcccgcgccttggatggaagcccagaatcgccttccatcgaggattctacaccacgcgtcgcgccccctccccgcacgcaagcccccgcctgcacattctccgccaccccatcccctgtccggcgcgtgtgccacggcctccctcgaccagcggcacgcgtacgccatcaccccctccctactgctcccatccgcggtgctcaccttcgccatcgcgcaatccatcaaggtcctcaccacctggtataaggagaaccggtgggacgcgaagcagctggtgggctccggtgggatgccgtcctcgcactcagccaccgtcacagcgctcgctgtcgccgtcggcctgtaagaggggctcgccagctcgttgttcgccaccgccgtcgtctttgtcttcgtggcacaataagccacttcaggcttcagtctgttctgtgatcagcagaacattatgggctctaaagcaggaggacttttgagatttacagagcttcaactaagtcaacttgttgagtcgcttgttacatatcttttgcatatgggaaaaaataatagataagaggtagtgtgagacacatattggcaactgaccaaatgacttcagatatttggggtctcatcgatgttcaaacagagaatgcacaaagtagtcagaaatggtaattatattgtcattgttgttgctggtagtgatgttactgttctactatcacgaaggagaaatttgatccaattggtgggcctttgcctaaactttcacaagctgattccaagcaatgtgtctaaaatctttttcttgtgttggtaaccaccagatgcttgtcaattgtcaaacttattttggttggcttattttcaagattaaatgatctctggtaactgaggagaatgctgtagatgttgattttccttttaggaaggtgaagctctccgatgtggtagggggttagtacccctttcctctcctctagcatgcttaaggaggtattgttgggcttttttatactcatactcagttgtatatatgtttctcaggaatggaaaatgtgcatatatgcttctgattgcagtgagattagcctcgtccaagttatgggatctgccatgaactagacaagattataagtttacagaggccttacatcaagagagtacaagattgccataaggaagtaaagtctttgaggaaagtgaccttatgagaagcttgagaaaatcaacttgtgtgtgagaagttttgtctacttgtgctaattagtcatatgatatttttagtcatgaactagacaagatcagaagtttaaagaggttttaaatcgagtacaagatcgccataaggaagtacaagtctttgaggaaagtgaccttatgaaaagtttgagcaaatcaacttgtgtgcgagaagttttgtctacttgtgctgatcagtcataccttggaatattgctgaactgttgcctttgttgctcattggcttcaatacttcatacaccatcaaatgagtcatgtgcaaaattcttcgaagcatcagttcttgctctagaagaacttcatcaggttatagcgaagaacattgttttagctggatacaaggagatgcagaagctctgagttttgaggatggatctatggatggttacactatcacatttgggatcagaaatgtgacgcacattgagaaagctctatcagaagcttacagttgatggttctaaagcaagggtggaggttcctatgcttggagttgagtcatgtggatgtccctatttttaaatagatttatgatgcttactcgttttctatgattccggctattgaagagctggttgatggtgatcggcagatagaagacgggcaacatgctaaccaggcatgtgaaccttgaaccttggcaggaaaagtttgctcagatgattcaggaagccggattccagagggtggaatatgaaaacctcctgagcggtgtagttgccattcattctggactgaaactgtagagctgaatacggatggatgttttttcatgggtgcaccgcttctacaattagtagtatttgttgttttttaatgaattctataataggttcggtggcttgtaaaagcagctggtgctggctgtcagcattagcacaatatgtagaataagtagtatttgcgagaagtatgtgctggagcagtagcgtcagtggctattttggcttttaagccagctgacctcttccatttgtaaagcttttttcttggaaacgtgaaaccatccagaacatcaaattagtcttatcacatacctcctgcaatacattttttgttctaaaa

SEQ ID NO: 211670 - DNA, 2768 bp, Zea Mays
caacgccgcagccgccgcgaaatccgcacccacccgcgcgacctctactgccgcaaggccgcagccgccgcgaaatttgcacccacccgcgcgccgcagccctttgtccgcgccggagcctagcaccgaaccgccgcggattcgccactacatcaccggccatggcttcgggcatgccacccgcgccctcgaggtggtgaggcacctggtcaccgcagggcacgacgtgcacgtggtcatcgccgcgcccgagttcgtcttcaccaccgagatcgcctcccccagcctctccgacaagctcgcgtccccgtccacatccgagatgctcgcgcccgcgccttggatggaagcccagaatcgccttccatcgaggattctacaccacgcgtcgcgccccctccccgcacgcaagcccccgcctgcacattctccgccaccccatcccctgtccggcgcgtgtgccacggcctccctcgaccagcggcacgcgtacgccatcaccccctccctactgctcccatccgcggtgctcaccttcgccatcgcgcaatccatcaaggtcctcaccacctggtataaggagaaccggtgggacgcgaagcagctggtgggctccggtgggatgccgtcctcgcactcagccaccgtcacagcgctcgctgtcgccgtcggcctgtaagaggggctcgccagctcgttgttcgccaccgccgtcgtctttgtcttcgtggcacaataagccacttcaggcttcagtctgttctgtgatcagcagaacattatgggctctaaagcaggaggacttttgagatttacagagcttcaactaagtcaacttgttgagtcgcttgttacatatcttttgcatatgggaaaaaataatagataagaggtagtgtgagacacatattggcaactgaccaaatgacttcagatatttggggtctcatcgatgttcaaacagagaatgcacaaagtagtcagaaatggtaattatattgtcattgttgttgctggtagtgatgttactgttctactatcacgaaggagaaatttgatccaattggtgggcctttgcctaaactttcacaagctgattccaagcaatgtgtctaaaatctttttcttgtgttggtaaccaccagatgcttgtcaattgtcaaacttattttggttggcttattttcaagattaaatgatctctggtaactgaggagaatgctgtagatgttgattttccttttaggaaggtgaagctctccgatgtggtagggggaatggaaaatgtgcatatatgcttctgattgcagtgagattagcctcgtccaagttatgggatctgacaagattataagtttacagaggccttacatcaagagagtacaagattgccataaggaagtaaagtctttgaggaaagtgaccttatgagaagcttgagaaaatcaacttgtgtgtgagaagttttgtctacttgtgctaattagtcatatgatatttttagtcatgaactagacaagatcagaagtttaaagaggttttaaatcgagtacaagatcgccataaggaagtacaagtctttgaggaaagtgaccttatgaaaagtttgagcaaatcaacttgtgtgcgagaagttttgtctacttgtgctgatcagtcataccttggaatattgctgaactgttgcctttgttgctcattggcttcaatacttcatacaccatcaaatgagtcatgtgcaaaattcttcgaagcatcagttcttgctctagaagaacttcatcaggttatagcgaagaacattgttttagctggatacaaggagatgcagaagctctgagttttgaggatggatctatggatggttacactatcacatttgggatcagaaatgtgacgcacattgagaaagctctatcagaagcttacaggtcggctaatttagaaccctaacaattattattgctcatgtttaaattattactgtttgaacttcagtatatgtgtctattcttcgtgattaagtttttttgtcttcgtgtgcagtatcatggattaagcttttttatattttaccatgtttgtttagttgatggttctgaaatgtcattactgtcatatcaattggcatatttcaaaatcttttttgcttagttgatggttctaaagcaagggtggaggttcctatgcttggagttgagtcatgtggatgtccctatttttaaatagatttatgatgcttactcgttttctatgattccggctattgaagagctggttgatggtgatcggcagatagaagacgggcaacatgctaaccaggcatgtgaaccttgaaccttggcaggaaaagtttgctcagatgattcaggaagccggattccagagggtggaatatgaaaacctcctgagcggtgtagttgccattcattctggactgaaactgtagagctgaatacggatggatgttttttcatgggtgcaccgcttctacaattagtagtatttgttgttttttaatgaattctataataggttcggtggcttgtaaaagcagctggtgctggctgtcagcattagcacaatatgtagaataagtagtatttgcgagaagtatgtgctggagcagtagcgtcagtggctattttggcttttaagccagctgacctcttccatttgtaaagcttttttcttggaaacgtgaaaccatccagaacatcaaattagtcttatcacatacctcctgcaatacattttttgttctaaaa

SEQ ID NO: 211671 - DNA, 3058 bp, Zea Mays
gactgcccccgctccttgcccaacgaaacccccgctcccgcacgccccgccgacctctgctgccgcaacgccgcagccgccgcgaaatccgcacccacccgcgcgacctctactgccgcaaggccgcagccgccgcgaaatttgcacccacccgcgcgccgcagccctttgtccgcgccggagcctagcaccgaaccgccgcggattcgccactacatcaccggccatggcttcgggcatgccacccgcgccctcgaggtccgccgccgctctctccgcccgcttgcagcttgcctgcctggtgccggcgcgtactgtttcctgaccccatcgtctccaggtggtgaggcacctggtcaccgcagggcacgacgtgcacgtggtcatcgccgcgcccgagttcgtcttcaccaccgagatcgcctcccccagcctctccgacaagctcgcgtccccgtccacatccgagatgctcgcgcccgcgccttggatggaagcccagaatcgccttccatcgaggattctacaccacgcgtcgcgccccctccccgcacgcaagcccccgcctgcacattctccgccaccccatcccctgtccggcgcgtgtgccacggcctccctcgaccagcggcacgcgtacgccatcaccccctccctactgctcccatccgcggtgctcaccttcgccatcgcgcaatccatcaaggtcctcaccacctggtataaggagaaccggtgggacgcgaagcagctggtgggctccggtgggatgccgtcctcgcactcagccaccgtcacagcgctcgctgtcgccgtcggcctgtaagaggggctcgccagctcgttgttcgccaccgccgtcgtctttgtcttcgtggttggttccccttcccactccccctctccctttcgacaccaaaaaaaacgcgctgaccatctttggcaagctgtcgcccaccccaccccaaaaccctagctctattccatcgctcccgtactccctattgcggcggttgagaacagtggcgacaagatctcatggagagaagctatgcggaccccaggaaaggtgaaatcgtcgtgcgatggtggagatggccgatgggaggctccaccagccctagggtgtggccaacaagacgctactcgccactgcgtgggtcggcagtgagatctcagggagagaagccatgcaaccccatgaaaggcgaaactgtcgcacgatggtggagacgaccggcggtaggatgcaagtatgagcatttggcaaagagagtattcctccccatgctcccgctccctcctgcaccccacgctcgccgacgagccgctcgacctcgtcgcagcttgccgagccatcatgcgccccggtgcggtggtcaacatcaatccacgccgtcaatcgcgtgttggtcctacgctcagtgcatgagtccttcaactggcggtggtggagcaaccgtactaccacagcgcatacacaggacgtagagaacaactccagaaggtgagccccagatctccgctgccgtcttctcgcctgaaaaaagaggggcatctctatcgccaccaaccactagcaggcggcggacgctgctcgcagcaggaatggaaaatgtgcatatatgcttctgattgcagtgagattagcctcgtccaagttatgggatctgacaagattataagtttacagaggccttacatcaagagagtacaagattgccataaggaagtaaagtctttgaggaaagtgaccttatgagaagcttgagaaaatcaacttgtgtgtgagaagttttgtctacttgtgctaattagtcatatgatatttttagtcatgaactagacaagatcagaagtttaaagaggttttaaatcgagtacaagatcgccataaggaagtacaagtctttgaggaaagtgaccttatgaaaagtttgagcaaatcaacttgtgtgcgagaagttttgtctacttgtgctgatcagtcataccttggaatattgctgaactgttgcctttgttgctcattggcttcaatacttcatacaccatcaaatgagtcatgtgcaaaattcttcgaagcatcagttcttgctctagaagaacttcatcaggttatagcgaagaacattgttttagctggatacaaggagatgcagaagctctgagttttgaggatggatctatggatggttacactatcacatttgggatcagaaatgtgacgcacattgagaaagctctatcagaagcttacaggtcggctaatttagaaccctaacaattattattgctcatgtttaaattattactgtttgaacttcagtatatgtgtctattcttcgtgattaagtttttttgtcttcgtgtgcagtatcatggattaagcttttttatattttaccatgtttgtttagttgatggttctgaaatgtcattactgtcatatcaattggcatatttcaaaatcttttttgcttagttgatggttctaaagcaagggtggaggttcctatgcttggagttgagtcatgtggatgtccctatttttaaatagatagctggttgatggtgatcggcagatagaagacgggcaacatgctaaccaggcatgtgaaccttgaaccttggcaggaaaagtttgctcagatgattcaggaagccggattccagagggtggaatatgaaaacctcctgagcggtgtagttgccattcattctggactgaaactgtagagctgaatacggatggatgttttttcatgggtgcaccgcttctacaattagtagtatttgttgttttttaatgaattctataataggttcggtggcttgtaaaagcagctggtgctggctgtcagcattagcacaatatgtagaataagtagtatttgcgagaagtatgtgctggagcagtagcgtcagtggctattttggcttttaagccagctgacctcttccatttgtaaagcttttttcttggaaacgtgaaaccatccagaacatcaaattagtcttatcacatacctcctgcaatacattttttgttctaaaa

SEQ ID NO: 211672 - DNA, 3299 bp, Zea Mays
gactgcccccgctccttgcccaacgaaacccccgctcccgcacgccccgccgacctctgctgccgcaacgccgcagccgccgcgaaatccgcacccacccgcgcgacctctactgccgcaaggccgcagccgccgcgaaatttgcacccacccgcgcgccgcagccctttgtccgcgccggagcctagcaccgaaccgccgcggattcgccactacatcaccggccatggcttcgggcatgccacccgcgccctcgaggtggtgaggcacctggtcaccgcagggcacgacgtgcacgtggtcatcgccgcgcccgagttcgtcttcaccaccgagatcgcctcccccagcctctccgacaagctcgcgtccccgtccacatccgagatgctcgcgcccgcgccttggatggaagcccagaatcgccttccatcgaggattctacaccacgcgtcgcgccccctccccgcacgcaagcccccgcctgcacattctccgccaccccatcccctgtccggcgcgtgtgccacggcctccctcgaccagcggcacgcgtacgccatcaccccctccctactgctcccatccgcggtgctcaccttcgccatcgcgcaatccatcaaggtcctcaccacctggtataaggagaaccggtgggacgcgaagcagctggtgggctccggtgggatgccgtcctcgcactcagccaccgtcacagcgctcgctgtcgccgtcggcctgtaagaggggctcgccagctcgttgttcgccaccgccgtcgtctttgtcttcgtggttggttccccttcccactccccctctccctttcgacaccaaaaaaaacgcgctgaccatctttggcaagctgtcgcccaccccaccccaaaaccctagctctattccatcgctcccgtactccctattgcggcggttgagaacagtggcgacaagatctcatggagagaagctatgcggaccccaggaaaggtgaaatcgtcgtgcgatggtggagatggccgatgggaggctccaccagccctagggtgtggccaacaagacgctactcgccactgcgtgggtcggcagtgagatctcagggagagaagccatgcaaccccatgaaaggcgaaactgtcgcacgatggtggagacgaccggcggtaggatgcaagtatgagcatttggcaaagagagtattcctccccatgctcccgctccctcctgcaccccacgctcgccgacgagccgctcgacctcgtcgcagcttgccgagccatcatgcgccccggtgcggtggtcaacatcaatccacgccgtcaatcgcgtgttggtcctacgctcagtgcatgagtccttcaactggcggtggtggagcaaccgtactaccacagcgcatacacaggacgtagagaacaactccagaaggcacaataagccacttcaggcttcagtctgttctgtgatcagcagaacattatgggctctaaagcaggaggacttttgagatttacagagcttcaactaagtcaacttgttgagtcgcttgttacatatcttttgcatatgggaaaaaataatagataagaggtagtgtgagacacatattggcaactgaccaaatgacttcagatatttggggtctcatcgatgttcaaacagagaatgcacaaagtagtcagaaatgatgcttgtcaattgtcaaacttattttggttggcttattttcaagattaaatgatctctggtaactgaggagaatgctgtagatgttgattttccttttaggaaggtgaagctctccgatgtggtagggggaatggaaaatgtgcatatatgcttctgattgcagtgagattagcctcgtccaagttatgggatctgccatgaactagacaagattataagtttacagaggccttacatcaagagagtacaagattgccataaggaagtaaagtctttgaggaaagtgaccttatgagaagcttgagaaaatcaacttgtgtgtgagaagttttgtctacttgtgctaattagtcatatgatatttttagtcatgaactagacaagatcagaagtttaaagaggttttaaatcgagtacaagatcgccataaggaagtacaagtctttgaggaaagtgaccttatgaaaagtttgagcaaatcaacttgtgtgcgagaagttttgtctacttgtgctgatcagtcataccttggaatattgctgaactgttgcctttgttgctcattggcttcaatacttcatacaccatcaaatgagtcatgtgcaaaattcttcgaagcatcagttcttgctctagaagaacttcatcaggtgattactcttttgctttcctttattgaataattagcacatgtgcgttcaaaaaaattgccacatgaatgaaatgatatattctcgaattattctattgagttttttgtttttatcacaacaccaccctggcgcgctagaggcggggtcgaatcagcaactacggctgacatgacgctacccatccagttgctcactgctcaggttatagcgaagaacattgttttagctggatacaaggagatgcagaagctctgagttttgaggatggatctatggatggttacactatcacatttgggatcagaaatgtgacgcacattgagaaagctctatcagaagcttacagttgatggttctaaagcaagggtggaggttcctatgcttggagttgagtcatgtggatgtccctatttttaaatagatttatgatgcttactcgttttctatgattccggctattgaagagctggttgatggtgatcggcagatagaagacgggcaacatgctaaccaggcatgtgaaccttgaaccttggcaggaaaagtttgctcagatgattcaggaagccggattccagagggtggaatatgaaaacctcctgagcggtgtagttgccattcattctggactgaaactgtagagctgaatacggatggatgttttttcatgggtgcaccgcttctacaattagtagtatttgttgttttttaatgaattctataataggttcggtggcttgtaaaagcagctggtgctggctgtcagcattagcacaatatgtagaataagtagtatttgcgagaagtatgtgctggagcagtagcgtcagtggctattttggcttttaagccagctgacctcttccatttgtaaagcttttttcttggaaacgtgaaaccatccagaacatcaaattagtcttatcacatacctcctgcaatacattttttgttctaaaa

SEQ ID NO: 211673 - DNA, 3677 bp, Zea Mays
ttttaattatagcttcaaacagctaactttaatacgaaacgaacatgtaatatactcgatacaaaatttacaacccaacattaggtttcatcagttcaccgtcgtaaaaagtaaaactaccggaagtttgtaactaacccaacaaaaccgccgttatcatacgcgtattaccacctatccgttgtgcttgctgttccagcctcctcacaacacaagggtccatgccctgcgccgccgccgcggcgaccccccaccccgcgtcccccgcaacggtcacagctcacctcagctcaacgcgcccagacccggcgaccccgaccctcctctccagctagtatttaccaccacccagcccccttcccgcaccgcaccaaacggctactacccctcccctcccctcccaggctcccacccccactgccttccagaaccttccgccgtccgcgatgccgacaccgcctccgcggaagaagcgcctggtccgcgcaggcctcctcgccgccgcggccggttacttcgccttcgtcctcctcttcgagctgcccctgctgccctttctggcgtcgtcctcccccgccgccaccacctcctcctcctcctcctcgctccccttccagcacccgcgccggcgggagctggaggccgcggcggcggcgttcacgtccccgttctcgcccgcccgcccctccaagcgggccttccccgccgccgccgcaccggccccgggctccacgccgcggctcccgatcttctcttccctcctcctcctcccgcggcccaatgccacggccacccccttcgacaacaccgccgccgacgccttcgccgcggccaagccgcacctcgcccacctccaggccacggccaaccccaccgccgcgtctgcgcccgcgtcgtcgccgccgccgacctgccccgcctcggtcgccgtgcaccgggagcagctcccctacgacggcgtccgcgtggtggagctcccctgcgggctggcggtgggctcccacgtcaccgtggtggcccggccccggcccgcccggcccgagtacgaccccaagatcgccgagcgcaaggacggggaggccgcggtcatggtgtcgcagttcatggtcgagctggtcggcaccaaggccgtcgacggggaggcgccgcccaggatcctgcacttgaaccccaggatccgcggggactacagccggaagcccgtcgtcgagatgaacagctgctaccggatgcagtggggacagtcgcagcgctgcgagggcttcgcctcccgccccgtcgaggacaccggtgagttgtcgtcaacctctccagcgacctccggatttgtcggggttcattttgatttgctattttgattattactttgattcttcgattaatcgtcctatgttctagctgccgtttttctggtttagttttcaattaactacaaagatcgaggtcggtacgagtacgactattaatgggtgacttgttagttacggaaattgaagccagtcaacttcagggtgtggaatagcttagcttggtggaattgggcatagaaggtacaaacttggcgcaggaaatttctagaaacggttagaattcatttccagatttgttttttctttcctgtttgcggagaaatgtgagcgaggggtctgatgccgacgcgtcccatttttaaaatcgaatggaatcttacaaggcacatattgacctgcaaccgcgttcagagctgttcagttttgacgaggcaactgacgtgggaacctgacccttcttgtctttgtttttttttcctcttattggaacataaacaatttctactgccacaacatgtgttgtgtttttaggagttcatgtgtccaatgagttccagctacttataagttacggatgattcaatgctgctaaaaccaggatttcttttacttcaagaatacaaccctgactttgctttgcaacattggcacatgattcatgtgacatgtctcactttcatgtttcagttgacgggcaactcaagtgtgagaaatggatccgtgacgatgacagcaagtcagaggaatcaaagatgaaatggtgggtcaagcgtttgattggcaggcctaaggatgtccgcatcatttggccatacccattcacggaaggcaagctatttgttatgactttaacagctggtttggaaggttaccatgttaatgttgatgggcggcatgttgcttcgtttccttaccgcactggttactctcttgaggatgcaactgcattatccctgaatggagacatcgatattgagtcgatttttgctagttctctacccaattcgcatccaagcttcgctcccgagcgataccttgagatgtctgaacagtggagagctccacctctgcccactgaacctgttgagcttttcatcggcattctttctgcagccagccattttgctgagcgtatggctgtaaggaaatcgtggatgatgtatacaaggaaatcatccaatgttgtagctcggttctttgtggctctgaatggaaagaaggaggttaacgcagagctcaagaaggaggcagagttcttccaggacattgtcatagtgccttttatcgatacctatgacctcgttgtgttgaagaccgttgccattgctgagtatggggtgcgcgtcgtccctgcaaagtacgtaatgaaatgcgacgacgacacattcgtgaggatcgattcggtactggatcaagtgaagaatgttggaaacgataaaagcgtttacgtagggagtataaactacttccatcgaccactaagatctggcaagtgggcagtaacgtacgaggaatggcctgaagcactgtatccgaattatgctaatggacctggctacgtaatttcatccgatattgctcgctacatcgtgtccgaattcgacaaccagacgcttcggctgtttaagatggaggatgtgagcatgggcatgtgggtggagaagttcaacaggacgcggcgggcggtggagatccggcacgacgtgcggttctaccagtcgggctgctacaacggctacttcacggcgcactaccagtccccgcagcacatgatctgcctgtggcggaagctgcagtccgggagtgcccggtgctgcaacgtcagatgacgcattgcgagagagagcctgattttgtactctttcttgatcaaagaggagagaaacagatggtggtggacgacgggtcggcagcccgtaagcgcagctcttctgcgatggacacagctgacgacgacccgttacgacggtgggtttgcaggaggaggttgctcttctggaccttgtgatgcgatgattctttcattcttttggtcggtggcccgtttgagctgctgattctgacagccctggtcggcgtccatggtcggggattctcttatgctgctgctgctgctaccacctgttgatatttttaggtggtagatccagtacatgaggctaagtagggctccggatcatatgggatctatccttgtgctttgcgtcaaacttctttgacctagaaattttaacttgggtgagttcggttggtaggctgtgcttgtctataaaaaatgattttctgagtttgtatttgtgttggcttatcttatatacgaacttgtgcgtgaaaaaaaaaatcaacgtgtcttcttttgttatgcca

SEQ ID NO: 211674 - DNA, 1477 bp, Zea Mays
atgacccactttgccccctcccttgcatccacccctggtctagacatgaaggttggcgatgaagaagcacttatagaagcagaaggcaattgtttttccaattttcacgttgctggaagctccagtagggtagcatttgctttagtcaagaggaaagcaatgaaggcgaggcacatcaatgattacacctaccctgtcagggactggtttccctcggaacctacgcgggaacttactgatgcagagactgctgcacgtgttgttttcagacagatactctccacgcctcctttcatatcaaggaacccaaagattgcctttatgttcctgaccccgggcaagcttccattcgaaaaattgtgggagttgttctttaagggtcatgatgggagatacactatatatgtgcatgcttcacgggagaagcacgaacatgtcagtcccatatttattggtcgagacatacacagtgagaaggtagggtggggtatgattacaatggttgatgcagagaggaggctgttggcaaaagctctagaagatatagacaaccagcattttgtattgctttcagacagctgcgttcctcttcacaattttgactatgtgtacgactttctcatgggatcaagacacagttttctggactgttttcacgaccctgggccacatggagtttacagatactcaaagaatatgttacctgaggttcgagagtcggagttcaggaaaggttctcagtggttctcaatgaagcgacaacatgcaatggtggtgattgcagacagtctttattactcaaaattcaggctttactgcaggcccggaatggaagaaggtcgcaattgctatgcagatgagcattatctgccgaccctattccacatgatggaccctgctggcattgcaaactggtcagtcacctacgttgactggtctgaaggaaagtggcatcccagatcttttcgtgctaaggatgtcacttatgaacgcctgaagaatatgacttcgattgatgtgagctaccacatcaccagtgatgacaagaaagatctattgcagaggccttgcatgtggaatggactgaagagaccatgctacttgtttgcaaggaaattttaccctgaagcattagacaatcttgtgaacttattctcaaactacacaattttctgagttctacagctggaagcataaacatttttggaagcattggtgttcatgttaattctttgtagattgctggaggggcagatatattgacactaactcagtatatgcatgatagtgaacaagtattagacaactgtgtcaccgataaactgttttaggattatattattttatataggttttcagtgttactctttttttttgtgtctcctggcaatagctaattatgtcaaaactgtcatttataccaccttttccattaatcattcctcaaaagaatgtgtaaatagattcctatgtgtgg

SEQ ID NO: 211675 - DNA, 2563 bp, Zea Mays
actcagtcgctcgctccctcgcttcgatccaccggcggcggctgaggtgctgagcggcgaggcagcgagcgccactgcgacctgcgtgctgctgtgctcctgcgcggctgcgcgccggtggacgaccgggccgtcggcgtggttccggctctccgcgcctgcgcggctgcgtcgcgacgagcagtgcatcggcacagtggcggtgcgccccccgcggcgaggcggcttcacggaccgcggttaccgagcgccgtcgcgccgaacgggcgcgggcggcaggcctcctgccggctgctggcgagcgctgctgcctgctgcaggccagggcgagcgggcgagacgctgagaccgcgtgggccgcgcttccctaagccagagcagccgagctcttcgtcgttcgtgattcgttgggccatcgccagcgacgagctgcaaccagtgaattggaggggatcccctcctggcaaatcagcccttgggaatgccctatcgccaaatcctgactccacaactgagcggaaaccagccgtggctgtactatcagcgattgtttttggctgtagaggtgaactggtgaagtgatgggcacggcgatcgtaagcgacgggggcggtgagggaagcgatggaaagtcggttgacgggtggcaggcagagaaggccgtcgcgggcaaccgtagggcactcgaggcccttcgggagctcgtggcttatcctttcctctacgcccgcgagtcccgtttgctcggcctcaagtggcccagagggttgctgctccatggcccccctggcaccggaaagacaagcctggttcgagctattgttcgagaatgcaacgcgcacctgacaacgatcaacccatattctgtacacaaagcccatgtgggagagggagaaaagttcctgcgtgaagctttttctgaagcatattctcaggctttgcggggtaaaccagctgtgatatttattgacgaacttgatgccatatgtccacgccgcaatagtaggagagagaatgagtcccgcattgttggccaacttcttactctcatggatggaaacaaaaaggcgtcaaagatgcttcctcacatagttgttgttgcatcgactaacaggatagatgccgttgatcctgcattgagaagggcaggacgttttgactcagaggtagaggttgccgttcctacagttgaagaaaggctgctgattcttaagctttataccaaaaacctacatctggatgaaaaagtcgatcttcagactgttgctgcgttctgcaatggctatgttggagctgatttagaagcattgtgtcgagaagctgccaagcttgcatatcatagaatgttaaacttatgtgagggtgacaaagtacttaaactacttatggaagactgggaatgtgctagatctatggtgggaccaagcataacaagaggggtaaccaaagaaatttcaattgtttcgtgggatgatataggaggcttgaaagatctaaagaaagagcttcagaaagttgttgaatggcccatcaagcatgctgctgcattttctagacttggaataccaccagtccggggggtgctgttgcatggcccaccagggtgctccaagactactcttgccaaggctgcagcgcatgctgcccaagcttctttcttttctttgagtggtgcagatttatattccaagtatgttggagaaggggaagctctgttgcgtagaacatttcagaaagctcgtcttgcttctcccagcattatattttttgatgaggctgatgccattgcccccaagagaactggccctggtgggaattctagtggcaatgccacagtcggagaaagacttttgtcgactttattgaccgaaatggatggtttagaactggctacgggaattatcgtattgggtgctacgaatcgcccaaatgcaattgatgctgctcttttgcgtccagggcgtttcgataaggtgctgtatgtcccgccaccagatgtggaagggcgacacgagatactacgcatccatacacggaaaatgaagttgggagaggatgtagatctttggaaggttgcagagtgtaccgagctattcaccggtgctgatcttgaaggcctttgcagggaagctggaatggcagcattgagggaagatatctcagcaagtttgatacatgacgctcacttccaagccgcacgaagttcattaagcccctctcttacaaaagcagtagttgatgagtactcaaaggtagatataaatgatccatcgagtaggaaacattgatatgttccttttctatttctttgttgcacactaggcgcaatacacatttgcaaccttgccaccaagacacacagatggagatagagagatctttttaagaatattctttttaaaccaatcctcttaccgtcagctctggatgttatttaaaaaaaatgccctcactggatattatttttaaaatgtcctgtgttgagcaccgtttatggtcggacggtctggccgtacagttggacggtcgcgggaacaaaatcaataatggtttatagtttttt

SEQ ID NO: 211676 - DNA, 1574 bp, Zea Mays
ggattgggtgggattgtgagagagaatgagtcccgcattgttggccaacttcttactctcatggatggaaacaaaaaggcgtcaaagatgcttcctcacatagttgttgttgcatcgactaacaggatagatgccgttgatcctgcattgagaagggcaggacgttttgactcagaggtagaggttgccgttcctacagttgaagaaaggctgctgattcttaagctttataccaaaaacctacatctggatgaaaaagtcgatcttcagactgttgctgcgttctgcaatggctatgttggagctgatttagaagcattgtgtcgagaagctgccaagcttgcatatcatagaatgttaaacttatgtgagggtgacaaagtacttaaactacttatggaagactgggaatgtgctagatctatggtgggaccaagcataacaagaggggtaaccaaagaaatttcaattgtttcgtgggatgatataggaggcttgaaagatctaaagaaagagcttcagaaagttgttgaatggcccatcaagcatgctgctgcattttctagacttggaataccaccagtccggggggtgctgttgcatggcccaccagggtgctccaagactactcttgccaaggctgcagcgcatgctgcccaagcttctttcttttctttgagtggtgcagatttatattccaagtatgttggagaaggggaagctctgttgcgtagaacatttcagaaagctcgtcttgcttctcccagcattatattttttgatgaggctgatgccattgcccccaagagaactggccctggtgggaattctagtggcaatgccacagtcggagaaagacttttgtcgactttattgaccgaaatggatggtttagaactggctacgggaattatcgtattgggtgctacgaatcgcccaaatgcaattgatgctgctcttttgcgtccagggcgtttcgataaggtgctgtatgtcccgccaccagatgtggaagggcgacacgagatactacgcatccatacacggaaaatgaagttgggagaggatgtagatctttggaaggttgcagagtgtaccgagctattcaccggtgctgatcttgaaggcctttgcagggaagctggaatggcagcattgagggaagatatctcagcaagtttgatacatgacgctcacttccaagccgcacgaagttcattaagcccctctcttacaaaagcagtagttgatgagtactcaaaggtagatataaatgatccatcgagtaggaaacattgatatgttccttttctatttctttgttgcacactaggcgcaatacacatttgcaaccttgccaccaagacacacagatggagatagagagatctttttaagaatattctttttaaaccaatcctcttaccgtcagctctggatgttatttaaaaaaaatgccctcactggatattatttttaaaatgtcctgtgttgagcaccgtttatggtcggacggtctggccgtacagttggacggtcgcgggaacaaaatcaataatggtttatagtttttt

SEQ ID NO: 211677 - DNA, 2311 bp, Zea Mays
gaaattcacagctgcgtgcccacccgatcctcgcttgacaccggggaaatccacggcctgctgctacagagcatcgccgctgagcacactggggtgacagtgacaacccgtctccctctctctcgccagatccccctacctccgcgtctctctgtctactttttttttggggagggggggggggggggggggggggggggatccgcgtcgaggcgaggtctgctctggtcacctctggcgatcctccttcgcccattgcctccgccggtcaattcccttcgctggtactcagagatcggcgccctcctcccgtcttcccacgcttgcgggcactaactcagagtagtgtcgctcaatgaatttcctctaccgaactacgcagcctgcagcgactgagctgccaagaatttcagagcaagatcacaggaatgccttacaaaagacgacttcgacactggagggtctcattgcggacgattcacaccaccagccctcctctgcccacatcgaagatggagctgctaataatgggtccagggatatcagtggggattcttcatctgttgatttgaaaagcccagtcccactggggacacatgccgatgtcatggaagacgaaggatggatcacaattccatgcaaggcacttcctgaaagttggaacgacatatcagaaatggttcagttgcaggctctggaccgttccttcctttttccaggcgagcaggttcctatactggcgtgcctgtcagcttctaagcaagatgtacaggttatatccccctttagaattgctgcagtaatgtctaagaatggaacttctatgcaaaactttacaaataaatctagccctgtcagtgcaaatggtcatgataatggagcagctggagaaagtggctatcaggatgttgaacccaatggtgaagcatctccttcaggacatgatattttggagactcaatctctccttcagatggaggatcataagcagcagatcgaacatgtgttgcgaagatttagagaatcaaatttttttgtccggattgcggaatcagtggaacctctatggtccaagaaaagtgtaacttcaactacgatggcagatgaacgatcagataaccagggaaatagtaagagctcaaggagtaatgtttataataccatttctgataaaggggtttttgatggtaacacatctgggggagttgctcgagatgttgtcaagtgttattctctgcaaaatggagacatagtggttgttttgcaagtgaatgttagcgttaacaaattggaagatcctgtgcttgaagtccttcagtttgagaaaacctcttctgttcagacaccaaataatataagaccaccaccaatatctgaaagtcaagaatttatgcctgaaaaacctgcaaaaaccccagatattataaatgatgggcaactttcgtttagaggagttcctttagaacctgaacggtattctaatattgctcctactcatgcaaaagatatagtcgtattcatcgatgcaattactattgtatttgaggaggcatccaaaggaggtgctcctttgtctttaccaattgctagtattgaggttgggcatggtcacagcttgccaaacctagcactcaggaggggcgaggaacactcttttattctcaaaccagcaactatgtcctcaagggaacggaagaccaacagtcatgcacctctggccttatcactcccaacgatgaccggtgctactttaaatactcatacaccaaaggctggtgagccgtatgctgatctaagcgaccaatatgctgtactgatactaacactcgaagctactaatatgacatccgaaaaccttacattaactgtccttgctcctgaagcatctggttcttcttcagttgtatccttgaactcatctccaaccaccccaaatggttcttttgatggtgttaatgagtcatcaaaaagatctgggctgggaaaagatggaattggctttcgaagattgaattctgtcctagctactccaaaagaaggtgataatggaggaaacagaatgagtaatgcttcaggctgtactcatctgtggttgcaaagtgcagtgcccctagggtgtgttcctgcccgctcaagcaccactgtcaaacttgagctgctaccattatcagatggaattatcacacttgatactctgcaaataaccgcaagggagaaaggccttgcttacattccggagcactccttggagatacatgccacctctgtactggaagcagaatcccagatcatggcccggattgaacggtag

SEQ ID NO: 211678 - DNA, 1307 bp, Zea Mays
ccccaacagccgcgctcctattcagaaatctatctgaacagcttgctgagattgtcaatcatggaaaactggtgtctgatgagatcatcataaatctgctgtcaagacgtctggaagagggagaggaaaagggtgaattggggttcatccttgatggctttcctcgaaccataggacaagcggtgagctaattatttgacctgaccgtaagtatgcagcaaaaacacatacttgcctcttatcaggaagcatttttcacttgcatcttcttttgagttcttatgaaaatcttagatttcaccaagcacaagttggttagagttgaatagatttcatccgctctagccctcagagatgagcagtagatcggtatccctggatttctatctcaacgttataacttgtgtcaaaccttagacactggggtagactgcttggtcctaatactggttttatcatgtgccctgtcaggagatacttgaaggagtcacagacattgatttggtgatcaatctcaaactccgagaagaagctctgcttgcgaaatgccttggcaggaggatgtgcagccagtgtggagggaacttcaatgtggcctccattgatattgagggtgaagatggtgggcctcgaatgtacatgcccccactgttgcctcctccacagtgtgaatcgaagctgattgctagagcagacgatactgaagaagtggtaaaagagcggctgcgtgtgtaccatgatttgactgaaccagtggaggagttctacagagcacgtgggaaactgctggagttcaatctgcctggtgggatacccgaatcatggccgaagttactgcaggccctgaacatagaagaccccgacaataagcgatctgcagcagcatgattcttgttttgttataggaatgcacattctaaattgaacatctgtagactatgtcaaagctagtcaaattggtgggcattccttacatctttgggaagcctactccattctggatccagattattgtggcatggcactcaactgtacagtagattgatcatcgattggcaaggtcgatcgatggatgtgctgactgtgatcctcgaacgtaaggtgtgtaaaaaggcaagaaaataattgttgggcgtcgagacattcacttgtaggtcgtaccatgcatatgcttgttgaaagaggggagcatgccagaaacgtctgatttttatttttatttttttatttgggagggctggctggctggagcttttcgtgtatgtgacgagctacctatgtacgcaatacactaatactacactgca

SEQ ID NO: 211679 - DNA, 3440 bp, Zea Mays
atcaaagtcacccaccccactccccggaagcacgccgaccatcacccgcgcctgcaccttccgtcacaaccactctctcgcttccaggcgggcccagggtttctctggtcccgcacgtctgtcacctgctgtggaggtcaccgcggtggagcgcccccttcttccgtgagcgtaggcgatggtcccaccgcgtagtagaaaaacaatttaggtcgggacatgcacacatacacacgcgcacagccgcactcggttccagctacagagaattcgtccaggaaagtaaaaaaactcccccattcgcgagggacaggagggaggagtcaccgcgtgagctcaggaggaagagggagaaggagaggccgccggcggcggcgcggcagaccgggaaccgccgtgtagcactggggtggtggacccgcgcgcccatgcgtcggtgaggtggtggggcccgcttggcgctcgagttggaatggcggcggcagggaggtggtgggcggtggtccttgcggtcgcggtgctgctctggccgggccgggtcgtcgccaacaccgagggcgatgctctatacagcctgcggcagagcttgatagatacgaacaatgtcttgcagagttgggattccactcttgttaatccatgtacatggtttcacgttacgtgtaacagcgataacagtgttatcagagttgaccttggaaatgcacaattatctggcgtcctagtgccacagcttggtcagctgaaaaatctccaatatttggagctttacagcaacaaaataagtggggcaataccccctgaactggggaacctgactaaccttgtcagtttggatctgtatatgaacaacttctctggcaatatccctgaccgcctagggaatctattgaagctgcgtttcctgtaagattcattttgtttaccagttactagcaccctcatatattgttttactagctgtttttaatgcttagacagttttcagtttttttttaaatttgtttgtttttttacttttgatatctatgtcaagaatggtctatgtactttgtaaccagaaaaataagaggaacttgtgatgctgcatttgttaatttctgtgacacgttggtatttgattaagtttgttgttttcctttttgatagatggagttgggtgtttgtttggcctcctttctcttactcttaccttgcttattctatatttttggcagttgtagtgttgaattgtaatttatcagcaaaactcatggtgtctgtggaaaaagaaaatcattgccatttttctttttattagtgtcttctgtgcccttatattttggtaaagtcacaaatatctatttgttctgtgcctatttgcaatgatagacgtcttaacaacaacagcttggttggtcccattcctgtagccttgaccaatatctccactctccaagtactggatctctcgagtaacaacctctcaggaccagtctcatccaatggctccttttcactcttcacccctataagttttaacaataatccaaatctttgtggccctgttactacgaagccctgccctggggatcctcccttttccccaccgcctccattcaatcctccgtctcctccaacccaatcaactggtgcttctggccctggagcaatcgctggaggtgttgctgctggtgctgcattggtttttgctgttccagcaattgcatttgcaatgtggcgccgtcgtaaacctgaagagcatttcttcgatgttcctgccgaggaggatccagaagttcatcttggtcagctcaaaaagttttcgttgcgggagcttcaagttgctactgatacttttagtaacaagcacattttaggaagaggtggttttggaaaagtgtacaagggaaggcttgctgatggctcattggtagcagtgaaaagactaaaagaggagcgcacacctggtggtgagcttcagtttcaaacagaggttgagatgattagcatggcagtgcacaggaaccttctccgacttcgtggtttctgcatgacacctactgaacggttgctggtctacccatacatggctaatggcagtgtggcatcacgtttacgagagcgccaggcatctgaaccacctcttaaatgggaaacaagaagacggattgcactgggatctgcaagaggtctttcttacttgcatgatcactgcgatcctaagatcatccatcgggatgtcaaagctgcaaatattcttttggatgaggagtttgaggcagtcgtaggtgatttcgggcttgccaagcttatggactacaaggatacccatgtcacaactgctgttcgtggaacaattggacacattgctcccgagtacctatccactggcaagtcctctgaaaagaccgatgtttttggatatgggatcatgcttctggagcttattactggacagagggcatttgatctagctcgtcttgcaaatgatgatgatgttatgcttcttgactgggtgaaaggactgctgaaggagaagaaggtggagatgttggtggacccagacctacagaatgcctacgaggagatcgaggtggagaaccttatccaggtggcactcctctgcacgcagggctccccgttggagcgtccaaagatgtcggaggtggtgaggatgctggaaggtgacggcctggcagagcgttgggacgaatggcagaaagtagaggtggtgaggcaggaggctgagtcggcaccgctccgcaatgactggatcgtcgattccacgtacaaccttcgtgctgtggagctgtccggtccaaggtagtagccactccatgactccgatgaaagaattcaacactgaattgcctagattcagtctaattgctgcttgtgtatatgaaaggtagcttttggaattgttagcggcagtcaatatgaagggatggtttttttttttataattcctcgctagcctcagaagtcggggggtaggctgcagttgtgttaaggtgaaaattcgtatacccgagggtgaatttttaaagcattgttgtagtggttcggggaatgtagcagcgatcgtccaattgtactacgtgctatgaagaacagtgctaccttttggccatagttttgcgttttgaaaaatctatttaggttttctttgtgtaaaaatacaattgtcattgaattgacgatacacaactaattatgagactaaagaatttgtggaagttttactttagcttagggttccatctatcctggcggtgccatcggagtccaccaaaaagccatggagggaacaaatcgtttctggattaatttctgaatataaatcatcactagaagcacagtagctagcatgcaaacatctatcataaaaaaattagtatgcctagtacgattgtctcattaaataaaaataaatacgagattaaaacagaaagatc

SEQ ID NO: 211680 - DNA, 1933 bp, Zea Mays
tccaagtttgttatgttttgttcagggtcctgagattcgtacagggtttttgaaggatggtaaaccaattaagctaaccaagggtcaagagatcactgttaccactgattatgatatcaagggtgacgaaaaaatgatcgctatgagttacaagaaactgcctgttgacgtgaagcctggaaatgtcatactctgcgcagatggtactatctctctggccgttctgtcttgcgatcctgatgctggaactgtgcgttgtaggtgtgagaacactgcaatgcttggtgagagaaagaactgcaatttgccaggaattgttgtggatcttcctacattgactgagaaagataaagaagatattttgggctggggtgttccaaatgacattgacatgattgctctatcctttgtccgtaaaggatcagatttggtgactgtcagacaggttcttgggcagcatgccaagcgcattaagttgatgtcaaaggttgagaaccaagagggtgttgtaaactttgatgagatcttgagggagactgatgcttttatggttgctagaggtgatctgggaatggagattccagtcgagaagattttccttgcgcagaagatgatgatctacaagtgcaacattgctggcaaacctgttgttactgctacccagatgctcgagtcgatgatcaaatctcctcggccgacacgtgctgaggccactgacgttgcaaatgccgttcttgatggaactgactgtgtcatgctcagcggagagagtgccgctggagcctaccccgaggtggctgtgaagatcatggctcgtatttgcatcgaggcagaatcttccctggaccacgaggcagttttcaaggccatgatcaggtccgcgcctcttccaatgagccctctggagtcccttgcatcatctgctgtgaggactgccaacaaggccaaggctgcactgattgtcgtcctgactcgcggtggcaccacggccaaactggtcgccaagtaccgccccagggtccccatcctctccgttgtcgtacccgtgcttacgaccgactctttcgactggaccatcagctccgagggcccagctaggcacagcctgatctacagaggcctcattcccctcctcgccgagggctccgcgaaggctacggattcagagtcgacggaggtgatccttgaggccgcgttgaagtcggccgtgcagaagcagctctgcaagcctggtgatgccatcgtggctcttcatcgtattggcgtcgcctccgtcatcaagatctgcatcgtgaagtgatcaccacgacctggttctcactgctgggattccatgaaacagcttttctgcctcctttttactgcatttttttccggagacagatatttatgttgtaagcctgcgtctgttgtttgcagttgcggaatgttttttgttcacgtagttatttagctggtaaatggggagggagaggactccattgatgttagtggtaataagatttgtgtctatggagttgagttgaaagggttttttcatgctaagccccgagacactaggagatggagatcgaggttgagatgagataagcaataagtgaaaaaaatgttgatttgctttctttgtatgcacacgcttttgaggggtaagattagtctccattggagttgagttgaattgtttgttggttgcaactggagctagcatcttaacattttaataccaaaccaatggattgagttagaaacaaagacattcagatcacatctatgacagcaaccggtactgcatcaactgagtgatcgagacagtttggggaaggaagcaccaataataggggaaaaaacaaagaaaatactagtactagaggctagagcagcaagttctagaaatatatagggatgaaagatacatgagactatgacaggctag

SEQ ID NO: 211681 - DNA, 1594 bp, Zea Mays
caggcccacgcgtcggtgggttcgagtaagggtttcgtgcgccaccgtcacttccgcccgccatggccgagacctccacgtatcagattctggtgcgtctcctcgacgggcgtaccagatgtctccgcttctccacgcccaccgtttccggcgccgtgctcctcgacgccgtcgcgtcgatctctcgcgttcccgccgccgctctccgcctcgtcaccggcggcatcgacgtatcgccctcttccgtcctcgcctcagcagctgatggccagttcccctatgcgtcagcgctcctccgccttcgaggaggcaagggtggattcggctccctcctcagaggggctgcctccaaagcgggtcagaagaagaccagcaactttgacgcctgccgcgacatcaacggccgccgcctccgccacgtcaacgctgagcgccgcctcgaggaatggaaggccgaagccgccgaccgccagctagaaaagctcgccgagaacttcatcaagaagaaggccaaggaagcgggccgcggtggcggaccctcaaccgctgaggtggacaaatatctagagaagtaccgcaaggatgctgagatctgcgtcaacgtggttgaggaatccgtgcgtgcatcacttggaaagaggaagaccgcacctaagctgccctctggcgcagacgctaagaagcttaagttttggttaggaaagaacaaagtagaagaagatgaaagtgatagtgacactgatgtggatgatgaggacattgaagatcttaagagcgcagatgcaaaatctgtagtagttgatgaaggcaattactcaaatggatgcagaaaaaatgaggagaagcttgatcttggttctgtttctgggtcatcacattcagaaggagagtcttcaggagaaaagtcccaactgacaacaagttcaggagctgaaggtggtgactttgaatctggtgatagtgcagagcttgagaggtaccacaagttgaagaagtgcggaaagcagacaaggataacactgcttcagctacttcaaaccaaaacaatcaagaggtgccacaagtagaacaacatgttggcatcagcaactcttattcagagccgttggaccttgcaaagtacagttcatctgcagaattggaggtgcttggtctggagaagctaaaaatagagctgcaatctcgcggattaaaatgtggtggaactttacaggagcgtgctgcccgactcttccttctgaagacaactccattggacaagttaccaaagaagctgcttgcaaagactaatgggcggaagtgagaagttgtaccaatatatataaagaagtaccaatgatgcaacgtttaagattttctttgtcaatatatggaaatctgttgtggtgtaatcatgtgttataagctcttggcttggtttgacaattaatgagatgtctgtacgtgctatatgttaaccgttacttggaaggcgctcagtttgggctagcgtttgaattcgttttagtttttgatgttttagtgtatgtttggaacagcttcaccaaccaaaaaaaagtagtaagatttatctggatctattatagagcaaaga

SEQ ID NO: 211682 - DNA, 1089 bp, Zea Mays
cacaatataagctattaagctgttgcccccccctcccgaattaagattattgagggcatatgggtggttgaaaatcaggttggcaagaagacccttgctattgatgattgtgattccagacaatctgtctatgtgtatggatgcaaagattctgtccttcaagtaaacggcaaggttaacaatatcactgttgacaaatgcactaaatttggaatcgttttcaaggatgttgtagcagcttttgaggttgtcaactgcaatggcgttgaggtccaatgtcagggtacgtcaccgacaatatcaattgacaacacatctggatgtcaattatacttaagcaaagattcgctgggagcttcaattacttctgctaaatctagtgaaatcaatgtgatggttccaagtggcggctctgacggtgattgggtggagcatgcattgcctcagcagtacatccatagtttcaaggatgggcaattcaccacttcaccagtttcacactcgggggcgtaaatacaatttgttgctgctgtgtttgttttttatttcgcttttgccttgtttttgaagatgaacgtatgatgatgaggtttgtaacagttttgggtctcgcagcactggactggaccctgactgcgattgttgtttgtgttgccccttgctcggtgcgcggtgtgtatgttctgcatgcacgtggttccattcgattggtgtatttgtgtgccaacaaaccactatacgtggtgtgtgtgtgtgtctttagctgaccattctttgacactgaatctcactatatttgaattgatgtggacgcttgctttttcgagtctcttttcagattcttgtttaacaaagtgacaatgacaatgcagttatcgtacttgaaatctcaacgctgtgcttggatcctgaaacacgtactaggaatgcgaaaggtggcgcgatacattagccggaaaaagcataaaggaaaaggtcacataaacacctgcaaagcattaggatgagcgccagcagtggtggtccctctcgacgtagccttccctggcccccgcgtgcagaggccggaaggcccagctgccgccgtcg

SEQ ID NO: 211683 - DNA, 1824 bp, Zea Mays
atgacaaaattgcaaatgtcttgtcagtctatagcacaaatatggccgcgccccatcacctctgtctcgagccgtccctctcaatcccccgcaccctctctccctgagcgctcgcgagcctgcggccaccaccgccgtctccacgccgcgcagatccgcccagccggttcggccccactcgagaatacgtgtacggacgcaggccccgcccacctcgccgaggactcgctcctgtgtcgtgcgcgccagcactaccggtggccgtgcgcggctgggccgtgccgattcgaccgaatccggtggaattcaccgtgccgtggtgtcaaatcggtgagctccgttgggttacgcgtgggtggaggctcgttcaggtctgggcggccgtaagtggcgccgggcatggttctagggtttggttttggtcttttggcgtgagggcatggcggatgggggccggatgaagggcgtacagagcgctggcggtggcgccggtgacgacgaagaggggaatgaggaggtgcgagaggagccggaactcgcgctgtcgctggggcggcgagtctggcacctcccgccgcggcaggaggccgctccccgctcacttaactggactccggttctgccggagtggaaccccgacgccgctgggagctcgcagggtgtggaaagggccttgggcggacaatccatctcttctcttgggttccatgacatgtttggtggtatcctagacgatccccaagcgggtggcagtatggaggttgggtggggcaagctgaacgaagaggatgaagacagagacctgcagaataaacggctcagagtacgacactttggcgaagaaaacccactgcattctggtgccagtgctactccctttggctctgaatcgtcatttttgcccatttctgatgaatgtgttcatttaaagctgtctcgtttcccagaacatgaattggaatttgggttgtcacttttcgcaaatgatggtagtgagagcccaagggatgccaataatgagcaagtcgatgatgcagaaaactccggtggaagaaattctgtggatgttggaataagaatggatctctccgatgatttcctgcacatgattttctctttcttggaccagaaggatttatgcagagcaggtgtgacctgtaaacagtggcgatctgctagtgtgcatgatgatttttggaagtgtttgaaatttgagaacactagcgtatcactggagaactttgttaatatttgccgtcattaccagagtgtcacagaactcaatttgcatggtgtcataaatgcagaaacactagttctggaagcaataatgtttttaaggcatctgaagacattaacaatgggcaagggacaactgggagaatcattttttcaagctttggctgagtgcccattattgactgctttaacagtaaacgatgcttctcttgggagtggcattcaagaagtaactgttaatcatgatggactgcgtgagcttcatattttgaagtgccgtgcacttagaatatctgtcagatgttcccaacttcaaatactgtctttgaggcgaacaggcatggctcatgtatcactgaactgtcctcagttgcttgagttggacttccaatcctgccataagctttctgacaatgcgattcgccaagctgctacagcttgcccattgttggcaaaactagacatgtcatcttgttcttgtgttactgatgagacattgcgtgacatagctagctcatgtccgagtctttctgttcttgatgcatcaaactgccccaacatttcatttgaggcccaatgccggag

SEQ ID NO: 211684 - DNA, 3728 bp, Zea Mays
cacaaatatggccgcgccccatcacctctgtctcgagccgtccctctcaatcccccgcaccctctctccctgagcgctcgcgagcctgcggccaccaccgccgtctccacgccgcgcagatccgcccagccggttcggccccactcgagaatacgtgtacggacgcaggccccgcccacctcgccgaggactcgctcctgtgtcgtgcgcgccagcactaccggtggccgtgcgcggctgggccgtgccgattcgaccgaatccggtggaattcaccgtgccgtggtgtcaaatcggtgagctccgttgggttacgcgtgggtggaggctcgttcaggtctgggcggccgtaagtggcgccgggcatggttctagggtttggttttggtcttttggcgtgagggcatggcggatgggggccggatgaagggcgtacagagcgctggcggtggcgccggtgacgacgaagaggggaatgaggaggtgcgagaggagccggaactcgcgctgtcgctggggcggcgagtctggcacctcccgccgcggcaggaggccgctccccgctcacttaactggactccggttctgccggagtggaaccccgacgccgctgggagctcgcagggtgtggaaagggccttgggcggacaatccatctcttctcttgggttccatgacatgtttggtggtatcctagacgatccccaagcgggtggcagtatggaggttgggtggggcaagctgaacgaagaggatgaagacagagacctgcagaataaacggctcagagtacgacactttggcgaagaaaacccactgcattctggtgccagtgctactccctttggctctgaatcgtcatttttgcccatttctgatgaatgtgttcatttaaagctgtctcgtttcccagaacatgaattggaatttgggttgtcacttttcgcaaatgatggtagtgagagcccaagggatgccaataatgagcaagtcgatgatgcagaaaactccggtggaagaaattctgtggatgttggaataagaatggatctctccgatgatttcctgcacatgattttctctttcttggaccagaaggatttatgcagagcaggtgtgacctgtaaacagtggcgatctgctagtgtgcatgatgatttttggaagtgtttgaaatttgagaacactagcgtatcactggagaactttgttaatatttgccgtcattaccagagtgtcacagaactcaatttgcatggtgtcataaatgcagaaacactagttctggaagcaataatgtttttaaggcatctgaagacattaacaatgggcaagggacaactgggagaatcattttttcaagctttggctgagtgcccattattgactgctttaacagtaaacgatgcttctcttgggagtggcattcaagaagtaactgttaatcatgatggactgcgtgagcttcatattttgaagtgccgtgcacttagaatatctgtcagatgttcccaacttcaaatactgtctttgaggcgaacaggcatggctcatgtatcactgaactgtcctcagttgcttgagttggacttccaatcctgccataagctttctgacaatgcgattcgccaagctgctacagcttgcccattgttggcaaaactagacatgtcatcttgttcttgtgttactgatgagacattgcgtgacatagctagctcatgtccgagtctttctgttcttgatgcatcaaactgccccaacatttcatttgagtccgtgaggcttccaatgttaatagacttgagacttctaagttgtgaaggaatcacatctgcttcgatggctgcaatagcttatagccgtctgcttgaggcactacagcttgataattgcagcctgttgacatcagtgtctttggacttaccacatcttaagaatataagtctcgtgcacttacgcaaatttgctgatttgaatttgcgaagccctgtgctttcttacatcaaagtttccagatgttcggcactccatcgagttagcataacatcgactacacttcagaaattggttcttcaaaaacaagagagcttatccagtttgtcattgcaatgccacaacttgattgatgtggatcttactgagtgcgagtcattaacaaatgcggtttgtgaagtatttagtgatggaggtggttgccctatgctaagatcattgatccttgacaattgcgagaatttgagcattgtagaactgaacagcagttctttgtcctgcctctctcttgctggttgccgctcgatgacattgttaagactctcatgcccaaatctgcaacatgtcaatcttgatggctgtgatcaccttcaaagtgcagcattctgtccagtgggtctcgaatccctaaatctgggaatttgtccaaaactgagtgttcttcacattgaggctccaaatatgtctatattggagctgaagggttgtggtgtgctttccaaggcttccatcaattgccctcgcttgacttcgttggatgcctctttctgcaggcagcttgtggatgattctctgacttgtatgtcagaggcatgtcctatgattgaacatcttattctgtcatcatgcctatccattggcatcgatggattgtcctcattgcattgccttcataagctgaccttgcttgacctgtcttatacctttttggacaacttgaagcctgttttcaacagttgtctgcagttgaaggtgttaaaactttcagcttgcaagtacctcagtgactcatcattagatgccctctacagagagggtgctcttccattgcttgttgagctagatctgtcctactcgtccattggacagaatgcgatagaagatcttcttgcttgttgtactaatttggttaatgtgaacttgaatggatgtacaaactttcaagaattggtgtgtgggtcagatgatagcagttgtgtcgatatgccagttgacttttgtgcacctagttcagcaatcaagagtgaagagatcagaagtggatttgacatgtcccaatcttttaacgttaaacttgagcaactgtagctcactggaggtgctgaaagcttgattgccccaagattgtccaatctccagcttctgcggcaggaggccgctccccgctcacttaactggactccggttctgcaagagtggaaccccgacgccgctgggagctcgcagggtgtggaaagggccttgggcgggcaatccatctcttctcttgggttccatgacatgtttggtggtatcctagacgatccccaagcgggtggcagtatggaggttgggtggggcaagctgaacgaagaggatgaagacagagacctgcagaatacaaacatcaagtcaggacaagctctctccttagagctcttgtacatagtacccaagcattgccggtatattgcaaggcatggtatattaggagccaggggcaatgatatcttatttttccagtccattcatgttgctgaataagtatttttgtgaatctgttttgttgccggaggtaacaaaatatctgttcatgtttttttttctgtattccttggaagtgtaccgatggagctatatgctggtttatatgcatcaataatcttgtttggatatagaattttggaaccgctttgctaatgtcatctgaggtgtagctttatatagcatgtttaattgttcgaagatcgaag

SEQ ID NO: 211685 - DNA, 3815 bp, Zea Mays
ctctcaatcccccgcaccctctctccctgagcgctcgcgagcctgcggccaccaccgccgtctccacgccgcgcagatccgcccagccggttcggccccactcgagaatacgtgtacggacgcaggccccgcccacctcgccgaggactcgctcctgtgtcgtgcgcgccagcactaccggtggccgtgcgcggctgggccgtgccgattcgaccgaatccggtggaattcaccgtgccgtggtgtcaaatcggtgagctccgttgggttacgcgtgggtggaggctcgttcaggtctgggcggccgtaagtggcgccgggcatggttctagggtttggttttggtcttttggcgtgagggcatggcggatgggggccggatgaagggcgtacagagcgctggcggtggcgccggtgacgacgaagaggggaatgaggaggtgcgagaggagccggaactcgcgctgtcgctggggcggcgagtctggcacctcccgccgcggcaggaggccgctccccgctcacttaactggactccggttctgccggagtggaaccccgacgccgctgggagctcgcagggtgtggaaagggccttgggcggacaatccatctcttctcttgggttccatgacatgtttggtggtatcctagacgatccccaagcgggtggcagtatggaggttgggtggggcaagctgaacgaagaggatgaagacagagacctgcagaataaacggctcagagtacgacactttggcgaagaaaacccactgcattctggtgccagtgctactccctttggctctgaatcgtcatttttgcccatttctgatgaatgtgttcatttaaagctgtctcgtttcccagaacatgaattggaatttgggttgtcacttttcgcaaatgatggtagtgagagcccaagggatgccaataatgagcaagtcgatgatgcagaaaactccggtggaagaaattctgtggatgttggaataagaatggatctctccgatgatttcctgcacatgattttctctttcttggaccagaaggatttatgcagagcaggtgtgacctgtaaacagtggcgatctgctagtgtgcatgatgatttttggaagtgtttgaaatttgagaacactagcgtatcactggagaactttgttaatatttgccgtcattaccagagtgtcacagaactcaatttgcatggtgtcataaatgcagaaacactagttctggaagcaataatgtttttaaggcatctgaagacattaacaatgggcaagggacaactgggagaatcattttttcaagctttggctgagtgcccattattgactgctttaacagtaaacgatgcttctcttgggagtggcattcaagaagtaactgttaatcatgatggactgcgtgagcttcatattttgaagtgccgtgcacttagaatatctgtcagatgttcccaacttcaaatactgtctttgaggcgaacaggcatggctcatgtatcactgaactgtcctcagttgcttgagttggacttccaatcctgccataagctttctgacaatgcgattcgccaagctgctacagcttgcccattgttggcaaaactagacatgtcatcttgttcttgtgttactgatgagacattgcgtgacatagctagctcatgtccgagtctttctgttcttgatgcatcaaactgccccaacatttcatttgagtccgtgaggcttccaatgttaatagacttgagacttctaagttgtgaaggaatcacatctgcttcgatggctgcaatagcttatagccgtctgcttgaggcactacagcttgataattgcagcctgttgacatcagtgtctttggacttaccacatcttaagaatataagtctcgtgcacttacgcaaatttgctgatttgaatttgcgaagccctgtgctttcttacatcaaagtttccagatgttcggcactccatcgagttagcataacatcgactacacttcagaaattggttcttcaaaaacaagagagcttatccagtttgtcattgcaatgccacaacttgattgatgtggatcttactgagtgcgagtcattaacaaatgcggtttgtgaagtatttagtgatggaggtggttgccctatgctaagatcattgatccttgacaattgcgagaatttgagcattgtagaactgaacagcagttctttgtcctgcctctctcttgctggttgccgctcgatgacattgttaagactctcatgcccaaatctgcaacatgtcaatcttgatggctgtgatcaccttcaaagtgcagcattctgtccagtgggtctcgaatccctaaatctgggaatttgtccaaaactgagtgttcttcacattgaggctccaaatatgtctatattggagctgaagggttgtggtgtgctttccaaggcttccatcaattgccctcgcttgacttcgttggatgcctctttctgcagcttgtggatgattctctgacttgtatgtcagaggcatgtcctatgattgaacatcttattctgtcatcatgcctatccattggcatcgatggattgtcctcattgcattgccttcataagctgaccttgcttgacctgtcttatacctttttggacaacttgaagcctgttttcaacagttgtctgcagttgaaggtgttaaaactttcagcttgcaagtacctcagtgactcatcattagatgccctctacagagagggtgctcttccattgcttgttgagctagatctgtcctactcgtccattggacagaatgcgatagaagatcttcttgcttgttgtactaatttggttaatgtgaacttgaatggatgtacaaactttcaagaattggtgtgtgggtcagatgatagcagttgtgtcgatatgccagttgacttttgtgcacctagttcagcaatcaagagtgaagagatcagtgagcgatctggtcgcctccttgaagttctcaattgtactgggtgccctaatatcaagaaagttgttattccttcaatagcgaactttctacatttgtccaaaattaatcttaatctttcgaccaacttgaaggaagtggatttgacatgtcccaatcttttaacgttaaacttgagcaactgtagctcactggaggtgctgaaagcttgattgccccaagattgtccaatctccagcttctgcggcaggaggccgctccccgctcacttaactggactccggttctgcaagagtggaaccccgacgccgctgggagctcgcagggtgtggaaagggccttgggcgggcaatccatctcttctcttgggttccatgacatgtttggtggtatcctagacgatccccaagcgggtggcagtatggaggttgggtggggcaagctgaacgaagaggatgaagacagagacctgcagaatacaaacatcaagtcaggacaagctctctccttagagctcttgtacatagtacccaagcattgccggtatattgcaaggcatggtatattaggagccaggggcaatgatatcttatttttccagtccattcatgttgctgaataagtatttttgtgaatctgttttgttgccggaggtaacaaaatatctgttcatgtttttttttctgtattccttggaagtgtaccgatggagctatatgctggtttatatgcatcaataatcttgtttggatatagaattttggaaccgctttgctaatgtcatctgaggtgtagctttatatagcatgtttaattgttcgaagatcgaag

SEQ ID NO: 211686 - DNA, 2805 bp, Zea Mays
atggttttcaatggcagattttctctttcttggaccagaaggatttatgcagagcaggtgtgacctgtaaacagtggcgatctgctagtgtgcatgatgatttttggaagtgtttgaaatttgagaacactagcgtatcactggagaactttgttaatatttgccgtcattaccagagtgtcacagaactcaatttgcatggtgtcataaatgcagaaacactagttctggaagcaataatgtttttaaggcatctgaagacattaacaatgggcaagggacaactgggagaatcattttttcaagctttggctgagtgcccattattgactgctttaacagtaaacgatgcttctcttgggagtggcattcaagaagtaactgttaatcatgatggactgcgtgagcttcatattttgaagtgccgtgcacttagaatatctgtcagatgttcccaacttcaaatactgtctttgaggcgaacaggcatggctcatgtatcactgaactgtcctcagttgcttgagttggacttccaatcctgccataagctttctgacaatgcgattcgccaagctgctacagcttgcccattgttggcaaaactagacatgtcatcttgttcttgtgttactgatgagacattgcgtgacatagctagctcatgtccgagtctttctgttcttgatgcatcaaactgccccaacatttcatttgagtccgtgaggcttccaatgttaatagacttgagacttctaagttgtgaaggaatcacatctgcttcgatggctgcaatagcttatagccgtctgcttgaggcactacagcttgataattgcagcctgttgacatcagtgtctttggacttaccacatcttaagaatataagtctcgtgcacttacgcaaatttgctgatttgaatttgcgaagccctgtgctttcttacatcaaagtttccagatgttcggcactccatcgagttagcataacatcgactacacttcagaaattggttcttcaaaaacaagagagcttatccagtttgtcattgcaatgccacaacttgattgatgtggatcttactgagtgcgagtcattaacaaatgcggtttgtgaagtatttagtgatggaggtggttgccctatgctaagatcattgatccttgacaattgcgagaatttgagcattgtagaactgaacagcagttctttgtcctgcctctctcttgctggttgccgctcgatgacattgttaagactctcatgcccaaatctgcaacatgtcaatcttgatggctgtgatcaccttcaaagtgcagcattctgtccagtgggtctcgaatccctaaatctgggaatttgtccaaaactgagtgttcttcacattgaggctccaaatatgtctatattggagctgaagggttgtggtgtgctttccaaggcttccatcaattgccctcgcttgacttcgttggatgcctctttctgcaggcagcttgtggatgattctctgacttgtatgtcagaggcatgtcctatgattgaacatcttattctgtcatcatgcctatccattggcatcgatggattgtcctcattgcattgccttcataagctgaccttgcttgacctgtcttatacctttttggacaacttgaagcctgttttcaacagttgtctgcagttgaaggtgttaaaactttcagcttgcaagtacctcagtgactcatcattagatgccctctacagagagggtgctcttccattgcttgttgagctagatctgtcctactcgtccattggacagaatgcgatagaagatcttcttgcttgttgtactaatttggttaatgtgaacttgaatggatgtacaaactttcaagaattggtgtgtgggtcagatgatagcagttgtgtcgatatgccagttgacttttgtgcacctagttcagcaatcaagagtgaagagatcagtgagcgatctggtcgcctccttgaagttctcaattgtactgggtgccctaatatcaagaaagttgttattccttcaatagcgaactttctacatttgtccaaaattaatcttaatctttcgaccaacttgaaggaagtggatttgacatgtcccaatcttttaacgttaaacttgagcaactgtagctcactggaggtgctgaaagcttgattgccccaagattgtccaatctccagcttctgcggcaggaggccgctccccgctcacttaactggactccggttctgcaagagtggaaccccgacgccgctgggagctcgcagggtgtggaaagggccttgggcgggcaatccatctcttctcttgggttccatgacatgtttggtggtatcctagacgatccccaagcgggtggcagtatggaggttgggtggggcaagctgaacgaagaggatgaagacagagacctgcagaatacaaacatcaagtcaggacaagctctctccttagagctcttgtacatagtacccaagcattgccggtatattgcaaggcatggtatattaggagccaggggcaatgatatcttatttttccagtccattcatgttgctgaataagtatttttgtgaatctgttttgttgccggaggtaacaaaatatctgttcatgtttttttttctgtattccttggaagtgtaccgatggagctatatgctggtttatatgcatcaataatcttgtttggatatagaattttggaaccgctttgctaatgtcatctgaggtgtagctttatatagcatgtttaattgttcgaagatcgaag

SEQ ID NO: 211687 - DNA, 874 bp, Zea Mays
ctaacagcaggcggtcttctggtaatagaataaacatagaaggcactttctgtttgccgtgttccgcaaggaagagagctagttatagatctttccgagtgtacagtttatttggagggaagaaggataaagatgagaatggcgatgaagcgccatcgaaaggatttttggaaacatgcaaaatctctatgaaactgttaagaaggcccaaatggttgtccaagttgaggctgtccgggtgcagaaggagcttgcagcgactgagattgatggttattgtgaaggtgaactaatcaaggttacactttctggaaaccagcaacctattagagttgaaatcacagaagctgcaatggagttgggtgctgaaaaactttcggagctggtcaatgatgcatacaaggatgcgcatcaacggagcgtccaggccatgaaagagaggatgtctgacttggcacagagcttaggaatgcctgcgggccttggtgatggtctcaagtgatgctgcctgccattcgggaagcctttctaataatttttttccctcaattttgaatacgagccgtgtgggcacctctcgtagtcacgtagtaagaagtgtactcgtgaccagctgtttcgttcagcgttagctgtgattttgttttgtacaagcagatatatttgcactaaatcgtggtaacgtcgtcctatggaactcggatatcacatgtggtatgctaatctgcaagatataggggatatgcaccgaaaccaatttaaatcgtgtgataaatgatgtacattgtgtgtgtaacaaattaatgaattatgtttttttatacacccttttttttaacgtgaacgtaagggaccagattgtaaaatataacat

SEQ ID NO: 211688 - DNA, 1345 bp, Zea Mays
ctctctcactccttatcccttctctatccgccagagggaaatacccattgatctcatctcatgccctgttgccgcgcctgctcctccttccccatccgcgcccaccgccgcccctccggcagccccgccacgagcccacccgcaagcttcccgcacggccaccgctgcctggtatcaatcaaaccagtcgtccgtcctcctttccttcaaatcaagtccatttccactccctgtctaccctctccctcgtctctggtgggcggtggcctcgcctccctttccccgtcgccctgatggctccctccgcagctctcgctccggtggccttccgctccgccttctcgactccgctcgcgtcgaaccctacccgtaatagaataaacatagaaggcactttctgtttgccgtgttccgcaaggaagagagctagttatagatctttccgagtgtacagtttatttggagggaagaaggataaagatgagaatggcgatgaagcgccatcgaaagcagggatttttggaaacatgcaaaatctctatgaaactgttaagaaggcccaaatggttgtccaagttgaggctgtccgggtgcagaaggagcttgcagcgttacactttctggaaaccagcaacctattagagttgaaatcacagaagctgcaatggagttgggtgctgaagataagtttcatattcatgtgtgagaagacattgatgtttcatataaggaaggtactcaattcattagttcgaaaggaaaatagggaacccccaccattttgcacccttgtattagaaaaaaaagatgcatcttgtatcaaactcggttacgtataaagaaactttcggagctggtcaatgatgcatacaaggatgcgcatcaacggagcgtccaggccatgaaagagaggatgtctgacttggcacagagcttaggaatgcctgcgggccttggtgatggtctcaagtgatgctgcctgccattcgggaagcctttctaataatttttttccctcaattttgaatacgagccgtgtgggcacctctcgtagtcacgtagtaagaagtgtactcgtgaccagctgtttcgttcagcgttagctgtgattttgttttgtacaagcagatatatttgcactaaatcgtggtaacgtcgtcctatggaactcggatatcacatgtggtatgctaatctgcaagatataggggatatgcaccgaaaccaatttaaatcgtgtgataaatgatgtacattgtgtgtgtaacaaattaatgaattatgtttttttatacacccttttttttaacgtgaacgtaagggaccagattgtaaaatataacat

SEQ ID NO: 211689 - DNA, 1082 bp, Zea Mays
ctctctcactccttatcccttctctatccgccagagggaaatacccattgatctcatctcatgccctgttgccgcgcctgctcctccttccccatccgcgcccaccgccgcccctccggcagccccgccacgagcccacccgcaagcttcccgcacggccaccgctgcctggtatcaatcaaaccagtcgtccgtcctcctttccttcaaatcaagtccatttccactccctgtctaccctctccctcgtctctggtgggcggtggcctcgcctccctttccccgtcgccctgatggctccctccgcagctctcgctccggtggccttccgctccgccttctcgactccgctcgcgtcgaaccctacccggatttttggaaacatgcaaaatctctatgaaactgttaagaaggcccaaatggttgtccaagttgaggctgtccgggtgcagaaggagcttgcagcgactgagattgatggttattgtgaaggtgaactaatcaaggttacactttctggaaaccagcaacctattagagttgaaatcacagaagctgcaatggagttgggtgctgaaaaactttcggagctggtcaatgatgcatacaaggatgcgcatcaacggagcgtccaggccatgaaagagaggatgtctgacttggcacagagcttaggaatgcctgcgggccttggtgatggtctcaagtgatgctgcctgccattcgggaagcctttctaataatttttttccctcaattttgaatacgagccgtgtgggcacctctcgtagtcacgtagtaagaagtgtactcgtgaccagctgtttcgttcagcgttagctgtgattttgttttgtacaagcagatatatttgcactaaatcgtggtaacgtcgtcctatggaactcggatatcacatgtggtatgctaatctgcaagatataggggatatgcaccgaaaccaatttaaatcgtgtgataaatgatgtacattgtgtgtgtaacaaattaatgaattatgtttttttatacacccttttttttaacgtgaacgtaagggaccagattgtaaaatataacat

SEQ ID NO: 211690 - DNA, 545 bp, Zea Mays
tgactgcacttttgttttagcatatacggactctctgagtggatcaaaacaacctccacagaatcagaatatgtaagcaaggccctttgtgaagatattagcaaacactgccgatctacaagtgctaccatccagattgatgatgagctatgacatgccgggggcaggtcgttgtttcgcaaaaagcaaaacaggcgacaggttggaaaatgttaaagaacacagctctagtagtccctgacaccatttagagagacatgcagctgccaattctgattgtttgtgttgcactcatatttcctgtaaacaaaagcttagactgatctgtagagaaagcaactggacatcaatttttgcataccgatgaactacagtttaaaacggccggttgaattatcatgtcaggggctataggaaatttgaatgcttctattctaaggtcttgttgttgagtactgagtatagtttgatgactgcatgttggtcaatgacagcatcaaagattacatgcatttttttgggaaaagatgatgtgcattttagat

SEQ ID NO: 211691 - DNA, 892 bp, Zea Mays
ccgaagcccgccgttcgggatacctctgctccaaataactccccacccagcggtgcctccgtgccgtctcccaccgctgctcgggcttcccgccgcacagcccggcttgcctccgccactccgtttcccgccgcaccgccatccgaatccgccgcagcctgctccctgctatcaagccacgttgcctcgctcatcttccgccgccgcagagaggagaaaaaagaagagccagagacacccaggtaccgcgatcgtgctaaggagcggcgtgaagatcaaaacccagattatgaacctacagaacttggttcgtttcatgcagtggcacctcctgggaatgatttgaggctggcagatgctcacaagatctcaattgagaaaagcaaatatctcggaggtgatttggagcatacacatctggtcaagggcttggactatgctctacttcataaagtacggagtgaaattgaaaagaaacctgaggcagaggatgggaaggatacaaagtcaagggcagcaaaagaagatcaggcagtctccttccgcaccgcaactgcaaagtctgtgtaccaatggatcataaagcctcaaagcataattaaagagaatgaattgtttcttcctggccggatgtcatttatttacaacatggggcatcatagcctcataattgctaaatacagtactttctctgtcttcatgttctattaggggaaaccatgaatcacaaaccagaaatcatatcctttccatagattttctcagaataacccatgaagttgccagtattgtcgaattcttttcttttgtattccaaaaacttggccggggagggaaaggccgccctctcagtattatattaagaagagacctaaacatggtcccgaccgag

SEQ ID NO: 211692 - DNA, 2420 bp, Zea Mays
gcaaagagaaacggggaggcggacatccaaccggattggcgagaccgcaacggcgcaacgggcttctcccgttctccgtcggtcgcggtcttttcccgtccgccccgcctccagctcccgtctcccaccccaacccggatctcgcgcgcgacgccgcgcaggcgaaccccacctcctctcagaagcctctagaagttcctcaccccgctcccgcgcggatgagtggcagctcgggccccctcccctactcgatgcgcgatgtgggtgctggcggcgcctacaacaacgccaagttccgccaccggtctcgcctcaagatggttctacagtccttggctactaacagaagcaaataccattgtggaaagttcactgttggtaaattcttgagcctgttgatggtttctggcttattgtacttatttatgcacaaaggctcagagggtattgtatccagtgagcttcatggcaaagaagtacagaataaaaatgttaggagatctcccagtatacgcacattctggagaaaaccaccaaggctgcccccacgcctccctccaaatgaaatctacaaaaataattctctgcttcagcagtctccatctgagtggacatcgaggcagaagaaagttaaagaagcatttgaacatgcatggtctggttatcaaaagtatgcaatgggttacgatgagcttatgcctctgagccacagaggcacagatgggttaggtggtctaggagctactattgtggattctttggatactgcgataataatgggtgctgatgatgttgtttctgaagcatcaaaatggattgaagacaacctaatgaaaagaattagtgagaaagggcaggtgactccggagtacctgtaacatataaaaaggctaatccagagcgacttttggaagtttcaaaggatttagccgacaggttattattggcttttacatcaagcccaacagctatacctttaagtgatgttattcttcgtgaccatactgcacatgcagcgcctgatggcttaagcagcacttcagaggcttcaacgttgcaattagagttcagttacctcagtaaagtattaggggatcctaagtacgacagggcggcaatgaaggtgttagagcatatacatacactcccaaaggtggagggtctggtgcctatttacatcaacccctcctctggtcaatttagtggtgagaatattcgattaggatctcgaggggacagttattatgagtatctgctaaaagtgtgggttcagcaggaggaatatcgtgacagtagtttaaagtatctatttgaaatgtatactgaggcaatgagaggggtcaagcatcttcttgttcggaaaactgttccaaatgggttggtatttgttggggagcttccatttggacgaaatggcgggtttagtcctaaaatggatcacctggtgtgttttcttcctggtacccttgctcttggtgcaactaaaggtatcaccaagagaaaagctcttgagactaatttgttaactgatgaagatatagaaaatctgcagcttgctgaagatcttgccaaaacatgtgttgagatgtacttcgtgacctctaccggccttgctcctgaaatagcttatttccacattgagggtgatacagaaggggggcctgatggtgggaataaaagctccaaatatatcaatgatatcgtaataaaaccacttgaccgtcacaatcttctacgcccagagactgtggaatcactatttgttttgtatagaatcacagaggattccaagtatagggagtggggttggcagatctttcaggcttttgagaagtacacaaaagttgattctggtggttacacatcattggatgatgtcacaagcctacctccttccacgagagataaaatggaaactttctttcttggagaaacattgaagtatttgtatttactgtttgatgaaaacaatacccttcccctagataagtatgtgttcaatacagaggcccatcctcttccagttatgcggtctgcagaacaggcttcacattctgtgtagtttcccaagtttatagctgttgtaccatggtgagaagtacagatctgtgacaaatatacttgacaacatagttggaggaacgagaaattgagaatcccttgcatgactgttcttggaggcaagctcatggttctggaatctccatgcctgatttgaggatttgggggttttacttgtatttactggaaggccatacaacctttgtactctgtactgtctgtagtctgtaatacctaacttcaaattttgaaatcggctagcagttataccaagatttttatcttcaacaattgtatgatcatgcatcagccgttctttcttgtccttcaatgttccaccaaattgcttcatgttagct

SEQ ID NO: 211693 - DNA, 1196 bp, Zea Mays
gcaaagagaaacggggaggcggacatccaaccggattggcgagaccgcaacggcgcaacgggcttctcccgttctccgtcggtcgcggtcttttcccgtccgccccgcctccagctcccgtctcccaccccaacccggatctcgcgcgcgacgccgcgcaggcgaaccccacctcctctcagaagcctctagaagttcctcaccccgctcccgcgcggatgagtggcagctcgggccccctcccctactcgatgcgcgatgtgggtgctggcggcgcctacaacaacgccaagttccgccaccggtctcgcctcaagaaaatctgcagcttgctgaagatcttgccaaaacatgtgttgagatgtacttcgtgacctctaccggccttgctcctgaaatagcttatttccacattgagggtgatacagaaggggggcctgatggtgggaataaaagctccaaatatatcaatgatatcgtaataaaaccacttgaccgtcacaatcttctacgcccagagactgtggaatcactatttgttttgtatagaatcacagaggattccaagtatagggagtggggttggcagatctttcaggcttttgagaagtacacaaaagttgattctggtggttacacatcattggatgatgtcacaagcctacctccttccacgagagataaaatggaaactttctttcttggagaaacattgaagtatttgtatttactgtttgatgaaaacaatacccttcccctagataagtatgtgttcaatacagaggcccatcctcttccagttatgcggtctgcagaacaggcttcacattctgtgtagtttcccaagtttatagctgttgtaccatggtgagaagtacagatctgtgacaaatatacttgacaacatagttggaggaacgagaaattgagaatcccttgcatgactgttcttggaggcaagctcatggttctggaatctccatgcctgatttgaggatttgggggttttacttgtatttactggaaggccatacaacctttgtactctgtactgtctgtagtctgtaatacctaacttcaaattttgaaatcggctagcagttataccaagatttttatcttcaacaattgtatgatcatgcatcagccgttctttcttgtccttcaatgttccaccaaattgcttcatgttagct

SEQ ID NO: 211694 - DNA, 2495 bp, Zea Mays
gcaaagagaaacggggaggcggacatccaaccggattggcgagaccgcaacggcgcaacgggcttctcccgttctccgtcggtcgcggtcttttcccgtccgccccgcctccagctcccgtctcccaccccaacccggatctcgcgcgcgacgccgcgcaggcgaaccccacctcctctcagaagcctctagaagttcctcaccccgctcccgcgcggatgagtggcagctcgggccccctcccctactcgatgcgcgatgtgggtgctggcggcgcctacaacaacgccaagttccgccaccggtctcgcctcaagatggttctacagtccttggctactaacagaagcaaataccattgtggaaagttcactgttggtaaattcttgagcctgttgatggtttctggcttattgtacttatttatgcacaaaggctcagagggtattgtatccagtgagcttcatggcaaagaagtacagaataaaaatgttaggagatctcccagtatacgcacattctggagaaaaccaccaaggctgcccccacgcctccctccaaatgaaatctacaaaaataattctctgcttcagcagtctccatctgagtggacatcgaggcagaagaaagttaaagaagcatttgaacatgcatggtctggttatcaaaagtatgcaatgggttacgatgagcttatgcctctgagccacagaggcacagatgggttaggtggtctaggagctactattgtggattctttggatactgcgataataatgggtgctgatgatgttgtttctgaagcatcaaaatggattgaagacaacctaatgaaaagaattagtgagaaagggcaggttaacttatttgagactaccatccgtgtcttgggagggcttcttagtgcataccatttgagtggtggtgatcatccaggggcaggtgactccggagtacctgtaacatataaaaaggctaatccagagcgacttttggaagtttcaaaggatttagccgacaggttattattggcttttacatcaagcccaacagctatacctttaagtgatgttattcttcgtgaccatactgcacatgcagcgcctgatggcttaagcagcacttcagaggcttcaacgttgcaattagagttcagttacctcagtaaagtattaggggatcctaagtacgacagggcggcaatgaaggtgttagagcatatacatacactcccaaaggtggagggtctggtgcctatttacatcaacccctcctctggtcaatttagtggtgagaatattcgattaggatctcgaggggacagttattatgagtatctgctaaaagtgtgggttcagcaggaggaatatcgtgacagtagtttaaagtatctatttgaaatgtatactgaggcaatgagaggggtcaagcatcttcttgttcggaaaactgttccaaatgggttggtatttgttggggagcttccatttggacgaaatggcgggtttagtcctaaaatggatcacctggtgtgttttcttcctggtacccttgctcttggtgcaactaaaggtatcaccaagagaaaagctcttgagactaatttgttaactgatgaagatatagaaaatctgcagcttgctgaagatcttgccaaaacatgtgttgagatgtacttcgtgacctctaccggccttgctcctgaaatagcttatttccacattgagaaggggggcctgatggtgggaataaaagctccaaatatatcaatgatatcgtaataaaaccacttgaccgtcacaatcttctacgcccagagactgtggaatcactatttgttttgtatagaatcacagaggattccaagtatagggagtggggttggcagatctttcaggcttttgagaagtacacaaaagttgattctggtggttacacatcattggatgatgtcacaagcctacctccttccacgagagataaaatggaaactttctttcttggagaaacattgaagtatttgtatttactgtttgatgaaaacaatacccttcccctagataagtatgtgttcaatacagaggcccatcctcttccagttatgcggtctgcagaacaggcttcacattctgtgtagtttcccaagtttatagctgttgtaccatggtgagaagtacagatctgtgacaaatatacttgacaacatagttggaggaacgagaaattgagaatcccttgcatgactgttcttggaggcaagctcatggttctggaatctccatgcctgatttgaggatttgggggttttacttgtatttactggaaggccatacaacctttgtactctgtactgtctgtagtctgtaatacctaacttcaaattttgaaatcggctagcagttataccaagatttttatcttcaacaattgtatgatcatgcatcagccgttctttcttgtccttcaatgttccaccaaattgcttcatgttagct

SEQ ID NO: 211695 - DNA, 1293 bp, Zea Mays
gcaaagagaaacggggaggcggacatccaaccggattggcgagaccgcaacggcgcaacgggcttctcccgttctccgtcggtcgcggtcttttcccgtccgccccgcctccagctcccgtctcccaccccaacccggatctcgcgcgcgacgccgcgcaggcgaaccccacctcctctcagaagcctctagaagttcctcaccccgctcccgcgcggatgagtggcagctcgggccccctcccctactcgatgcgcgatgtgggtgctggcggcgcctacaacaacgccaagttccgccaccggtctcgcctcaaggtgtgttttcttcctggtacccttgctcttggtgcaactaaaggtatcaccaagagaaaagctcttgagactaatttgttaactgatgaagatatagaaaatctgcagcttgctgaagatcttgccaaaacatgtgttgagatgtacttcgtgacctctaccggccttgctcctgaaatagcttatttccacattgagggtgatacagaaggggggcctgatggtgggaataaaagctccaaatatatcaatgatatcgtaataaaaccacttgaccgtcacaatcttctacgcccagagactgtggaatcactatttgttttgtatagaatcacagaggattccaagtatagggagtggggttggcagatctttcaggcttttgagaagtacacaaaagttgattctggtggttacacatcattggatgatgtcacaagcctacctccttccacgagagataaaatggaaactttctttcttggagaaacattgaagtatttgtatttactgtttgatgaaaacaatacccttcccctagataagtatgtgttcaatacagaggcccatcctcttccagttatgcggtctgcagaacaggcttcacattctgtgtagtttcccaagtttatagctgttgtaccatggtgagaagtacagatctgtgacaaatatacttgacaacatagttggaggaacgagaaattgagaatcccttgcatgactgttcttggaggcaagctcatggttctggaatctccatgcctgatttgaggatttgggggttttacttgtatttactggaaggccatacaacctttgtactctgtactgtctgtagtctgtaatacctaacttcaaattttgaaatcggctagcagttataccaagatttttatcttcaacaattgtatgatcatgcatcagccgttctttcttgtccttcaatgttccaccaaattgcttcatgttagct

SEQ ID NO: 211696 - DNA, 1185 bp, Zea Mays
gcaaagagaaacggggaggcggacatccaaccggattggcgagaccgcaacggcgcaacgggcttctcccgttctccgtcggtcgcggtcttttcccgtccgccccgcctccagctcccgtctcccaccccaacccggatctcgcgcgcgacgccgcgcaggcgaaccccacctcctctcagaagcctctagaagttcctcaccccgctcccgcgcggatgagtggcagctcgggccccctcccctactcgatgcgcgatgtgggtgctggcggcgcctacaacaacgccaagttccgccaccggtctcgcctcaagcttgctgaagatcttgccaaaacatgtgttgagatgtacttcgtgacctctaccggccttgctcctgaaatagcttatttccacattgagggtgatacagaaggggggcctgatggtgggaataaaagctccaaatatatcaatgatatcgtaataaaaccacttgaccgtcacaatcttctacgcccagagactgtggaatcactatttgttttgtatagaatcacagaggattccaagtatagggagtggggttggcagatctttcaggcttttgagaagtacacaaaagttgattctggtggttacacatcattggatgatgtcacaagcctacctccttccacgagagataaaatggaaactttctttcttggagaaacattgaagtatttgtatttactgtttgatgaaaacaatacccttcccctagataagtatgtgttcaatacagaggcccatcctcttccagttatgcggtctgcagaacaggcttcacattctgtgtagtttcccaagtttatagctgttgtaccatggtgagaagtacagatctgtgacaaatatacttgacaacatagttggaggaacgagaaattgagaatcccttgcatgactgttcttggaggcaagctcatggttctggaatctccatgcctgatttgaggatttgggggttttacttgtatttactggaaggccatacaacctttgtactctgtactgtctgtagtctgtaatacctaacttcaaattttgaaatcggctagcagttataccaagatttttatcttcaacaattgtatgatcatgcatcagccgttctttcttgtccttcaatgttccaccaaattgcttcatgttagct

SEQ ID NO: 211697 - DNA, 931 bp, Zea Mays
gcttattgctgctctccttggtcgattgcccttcgttgaaatttcatggcacagaattgatgacctcttaccagctagtgatgatgcagtatctcgtgcagtgaatggaatgaagctgtacatggttgcgccatttttgacgggtcttaaggcttggattgccacacatcctccaccactgcatcagaaaccagagacatctgctagaggtactgtgtggagggcgaagggttcgtcgagcggcacaaccccagtggagaatcctgttgctaaagcaggatctgacgtgcagcacgctgccgaccgccctggttgcagcttcagaaacttcaggtttgacaccgcaagcatcctgcaggccatggaggcttccttcctacgcacctagaatcctgacgaagcatcaacacctgcacccttgatgtgtatagaccgcggaccagcgctatctgtgttgtcaatctgtctttgtttcgtctttctcgccttgtatctgtactcttcacagcaatcctgtcagacgcttgaacctgattttgctgctgccccgtttggtggtggttgtccataaagttctaacgatggtgctgcaaagtctggaaagggccgacttgcgatcttcgtgctgatggctcggatggggccaatccattgggccgctggagccactgcccgcgttgttctacaagagttagttatcctcgcggttgacacagaaaggataaaattgcaagttgtgtctcagtttggcactcgaagggagcttgtgtgggtgttgttgttttttttttgtcatggcagcgtcgtctctaactctaaaggataccgcagtttctccaggtattttgtttaatagcgttatgtacctactcagttgctgtgccatgatagtgtagcctctcaaaaaaaaagatggcaactagcttcgagg

SEQ ID NO: 211698 - DNA, 2423 bp, Zea Mays
ccagtcttaggtagcacttctccaagctcatcaatcgttcctccttagatacattcccattatatatcatgtgccgagtgccctccaagatggtttactacagtaatatagttgtgcatcaattctaaaacagagttgataccttttttccatcttcaaggttctgctctctcatgccgcagttttacaacgttgaaggcttaaaaattctacagaactagatgatacttgcataatgcagccctcagatatttggaaggcgcatgctggttcatcacagtcagaggcttcgggtctggatatggagaggaacggatgcaatcataattgctgtccatctcctctccagccaattgcttcagctggtcagcactctgaaagcagcgctgcatacttttcttggcctacatctactctaatgcacggctcagctgaaggccgtgctaattactttgggaatctacagaagggtgtactaccaggacatcttggtcgcttgccaaatggccagcaagccaccaccttacttgatttaatgattataagagcattccacagcaagattctccgccggtttagtcttggtacagcaataggctttagaatcaggaaaggaacattgactgacacacctgccatccttgtgtttgttgctcgaaaggttcacaggaagtggctcagccctactcaatgtcttccaggtgcccttgagggacctgggggtgtgtggtgtgatgttgatgttgttgaattttcttattatggtgcaccagccccaacaccgaaggaacaactttatgatgagcttgttgatggattgcgtggtagcgaccctagtataggctcaggttcacaggtggctagtcttgagacctatgggactttgggtgccattgtgaagagtcgaactggcaacaagcaagttgggttccttacaaacaggcatgttgcggttgatctggattatcccaaccagaagatgttccatccgttgcctcctaatcttggacctggagtttacctaggtgctgttgagagagcaacatcatttataacagatgatgtttggtacgggatatatgcaggaacaaacccagaaacttttgtccgagctgatggtgcatttataccgtttgctgatgactttgaaattgctagtgtcagcacctccgttaaaggagttggagtcattggtaatgtaaaggcaattgacttgcaatccccaattggcagtctcattgggagacaagttgtcaaagttggaagaagttctggtatgacaactgggactgttgtcgcatacgcacttgagtacaatgatgagaagggaatatgtttcttcactgactttcttgtcgttggggagaaccaacaaacatttgatcttgaaggggacagtggaagcctcataatcttaacaggacaagacggtgagaagccgcaacctataggaattatatggggtggtacagctaaccggggaaggttgaaacttaaaagtggccagggtccggagaactggacaagtggagttgatcttggccgccttcttgatctcttggagctagatctgatcacaacaagtgaagggctacaagctgccttggaagaacaaaggattactctagctgccgctgcggctgcagccactaattcaactgccacagaatcgtcacctgttgctggccctcaagaggatgataaaatcgacaaaatctatgagcctctcggcattaacatcattcctcgagacggttctgccatatcaacggaccaacccaacgaggatgtggaagagctaaacctgatgtctccaatgcgcaatggtgaagaaggcaacggtgacttcaataacttgatggacttggaatcggaaaattcacctgatggtatttctattgctctgaacctgggagagcgggagccagaaagactccgctctgtttctgattcgatgctggacatagacttgcagaaatgaggctgcccgctgctatgctgcagacgtattgcaggaggctccgtatcattcagctttttttatcgatcattgcaggtatggccacaaaggaaataatctgtttctaggcgactggaccggttgttctgcttgaaacccggtctgggttaagctgtgaagctcctgcagccgcttgctcctgcagttttgcgtcaagtgtctaccaactctagcatatgtagtgctgcgtaagatgtcggcacctcagatagacagaggcgccatatttcttgctcatgtaatgttatttgttgtatgctcgtttgtatgtactgcatgaagcattgtaaaattgagcaacagcaaccagagctcgagaatcttaggcgcaaccaaccaaccccgtatcgatgaattgacaataaagctgaatattttaggtgtttagaaagtattttctctt

SEQ ID NO: 211699 - DNA, 2434 bp, Zea Mays
ccagtcttgttgactcttgagtcttccaccttcctcctcccgtctcgtctccaacggtgtgcttcttcctccggacgcctcgctcgtccgaccgctttacctccctcctccggcgagctccctccgctgttcctgatatgcaggagcactagcaaagcggcttcgccatccctccggagtccggagcagccagttttacaacgttgaaggcttaaaaattctacagaactagatgatacttgcataatgcagccctcagatatttggaaggcgcatgctggttcatcacagtcagaggcttcgggtctggatatggagaggaacggatgcaatcataattgctgtccatctcctctccagccaattgcttcagctggtcagcactctgaaagcagcgctgcatacttttcttggcctacatctactctaatgcacggctcagctgaaggccgtgctaattactttgggaatctacagaagggtgtactaccaggacatcttggtcgcttgccaaatggccagcaagccaccaccttacttgatttaatgattataagagcattccacagcaagattctccgccggtttagtcttggtacagcaataggctttagaatcaggaaaggaacattgactgacacacctgccatccttgtgtttgttgctcgaaaggttcacaggaagtggctcagccctactcaatgtcttccaggtgcccttgagggacctgggggtgtgtggtgtgatgttgatgttgttgaattttcttattatggtgcaccagccccaacaccgaaggaacaactttatgatgagcttgttgatggattgcgtggtagcgaccctagtataggctcaggttcacaggtggctagtcttgagacctatgggactttgggtgccattgtgaagagtcgaactggcaacaagcaagttgggttccttacaaacaggcatgttgcggttgatctggattatcccaaccagaagatgttccatccgttgcctcctaatcttggacctggagtttacctaggtgctgttgagagagcaacatcatttataacagatgatgtttggtacgggatatatgcaggaacaaacccagaaacttttgtccgagctgatggtgcatttataccgtttgctgatgactttgaaattgctagtgtcagcacctccgttaaaggagttggagtcattggtaatgtaaaggcaattgacttgcaatccccaattggcagtctcattgggagacaagttgtcaaagttggaagaagttctggtatgacaactgggactgttgtcgcatacgcacttgagtacaatgatgagaagggaatatgtttcttcactgactttcttgtcgttggggagaaccaacaaacatttgatcttgaaggggacagtggaagcctcataatcttaacaggacaagacggtgagaagccgcaacctataggaattatatggggtggtacagctaaccggggaaggttgaaacttaaaagtggccagggtccggagaactggacaagtggagttgatcttggccgccttcttgatctcttggagctagatctgatcacaacaagtgaagggctacaagctgccttggaagaacaaaggattactctagctgccgctgcggctgcagccactaattcaactgccacagaatcgtcacctgttgctggccctcaagaggatgataaaatcgacaaaatctatgagcctctcggcattaacatcattcctcgagacggttctgccatatcaacggaccaacccaacgaggatgtggaagagctaaacctgatgtctccaatgcgcaatggtgaagaaggcaacggtgacttcaataacttgatggacttggaatcggaaaattcacctgatggtatttctattgctctgaacctgggagagcgggagccagaaagactccgctctgtttctgattcgatgctggacatagacttgcagaaatgaggctgcccgctgctatgctgcagacgtattgcaggaggctccgtatcattcagctttttttatcgatcattgcaggtatggccacaaaggaaataatctgtttctaggcgactggaccggttgttctgcttgaaacccggtctgggttaagctgtgaagctcctgcagccgcttgctcctgcagttttgcgtcaagtgtctaccaactctagcatatgtagtgctgcgtaagatgtcggcacctcagatagacagaggcgccatatttcttgctcatgtaatgttatttgttgtatgctcgtttgtatgtactgcatgaagcattgtaaaattgagcaacagcaaccagagctcgagaatcttaggcgcaaccaaccaaccccgtatcgatgaattgacaataaagctgaatattttaggtgtttagaaagtattttctctt

SEQ ID NO: 211700 - DNA, 2557 bp, Zea Mays
ccagtcttgttgactcttgagtcttccaccttcctcctcccgtctcgtctccaacggtgtgcttcttcctccggacgcctcgctcgtccgaccgctttacctccctcctccggcgagctccctccgctgttcctggtgtgtctacgcgccagctcctcctcttgtcgattttgggcgcgctcccctccgccgccgggctgtgctgcgcggacgcggttcgtggattcggcagaaggatctgcaccgtcctcgccgccgatatgcaggagcactagcaaagcggcttcgccatccctccggagtccggagcagccagttttacaacgttgaaggcttaaaaattctacagaactagatgatacttgcataatgcagccctcagatatttggaaggcgcatgctggttcatcacagtcagaggcttcgggtctggatatggagaggaacggatgcaatcataattgctgtccatctcctctccagccaattgcttcagctggtcagcactctgaaagcagcgctgcatacttttcttggcctacatctactctaatgcacggctcagctgaaggccgtgctaattactttgggaatctacagaagggtgtactaccaggacatcttggtcgcttgccaaatggccagcaagccaccaccttacttgatttaatgattataagagcattccacagcaagattctccgccggtttagtcttggtacagcaataggctttagaatcaggaaaggaacattgactgacacacctgccatccttgtgtttgttgctcgaaaggttcacaggaagtggctcagccctactcaatgtcttccaggtgcccttgagggacctgggggtgtgtggtgtgatgttgatgttgttgaattttcttattatggtgcaccagccccaacaccgaaggaacaactttatgatgagcttgttgatggattgcgtggtagcgaccctagtataggctcaggttcacaggtggctagtcttgagacctatgggactttgggtgccattgtgaagagtcgaactggcaacaagcaagttgggttccttacaaacaggcatgttgcggttgatctggattatcccaaccagaagatgttccatccgttgcctcctaatcttggacctggagtttacctaggtgctgttgagagagcaacatcatttataacagatgatgtttggtacgggatatatgcaggaacaaacccagaaacttttgtccgagctgatggtgcatttataccgtttgctgatgactttgaaattgctagtgtcagcacctccgttaaaggagttggagtcattggtaatgtaaaggcaattgacttgcaatccccaattggcagtctcattgggagacaagttgtcaaagttggaagaagttctggtatgacaactgggactgttgtcgcatacgcacttgagtacaatgatgagaagggaatatgtttcttcactgactttcttgtcgttggggagaaccaacaaacatttgatcttgaaggggacagtggaagcctcataatcttaacaggacaagacggtgagaagccgcaacctataggaattatatggggtggtacagctaaccggggaaggttgaaacttaaaagtggccagggtccggagaactggacaagtggagttgatcttggccgccttcttgatctcttggagctagatctgatcacaacaagtgaagggctacaagctgccttggaagaacaaaggattactctagctgccgctgcggctgcagccactaattcaactgccacagaatcgtcacctgttgctggccctcaagaggatgataaaatcgacaaaatctatgagcctctcggcattaacatcattcctcgagacggttctgccatatcaacggaccaacccaacgaggatgtggaagagctaaacctgatgtctccaatgcgcaatggtgaagaaggcaacggtgacttcaataacttgatggacttggaatcggaaaattcacctgatggtatttctattgctctgaacctgggagagcgggagccagaaagactccgctctgtttctgattcgatgctggacatagacttgcagaaatgaggctgcccgctgctatgctgcagacgtattgcaggaggctccgtatcattcagctttttttatcgatcattgcaggtatggccacaaaggaaataatctgtttctaggcgactggaccggttgttctgcttgaaacccggtctgggttaagctgtgaagctcctgcagccgcttgctcctgcagttttgcgtcaagtgtctaccaactctagcatatgtagtgctgcgtaagatgtcggcacctcagatagacagaggcgccatatttcttgctcatgtaatgttatttgttgtatgctcgtttgtatgtactgcatgaagcattgtaaaattgagcaacagcaaccagagctcgagaatcttaggcgcaaccaaccaaccccgtatcgatgaattgacaataaagctgaatattttaggtgtttagaaagtattttctctt

SEQ ID NO: 211701 - DNA, 3778 bp, Zea Mays
ccagtcttgttgactcttgagtcttccaccttcctcctcccgtctcgtctccaacggtgtgcttcttcctccggacgcctcgctcgtccgaccgctttacctccctcctccggcgagctccctccgctgttcctgatatgcaggagcactagcaaagcggcttcgccatccctccggagtccggagcagccagctcatcaatcgttcctccttagatacattcccattatatatcatgtgccgagtgccctccaagatggtttactacagtaatataggtattagagtcatatcaatcaaattttcatcactatatgtattcatacctttcaattttctctggacaagttatctgttcgagtttgcctatcatgacctgtccatttgtttaccttcccatgttataaggtatcttagctccattttgagtttttacggcagacccagggttagaggctcccgcatgagtggggtctgggtgttagagtatattaggcatgttgagtatattaggcaactcctcatatggttggtttaggattgattgtaatcccgggataaccttccttatatctaggataacattccttatctctaggataggcttcttgccctccaagtcatgtactcctacatattctctctagagactcaatgcaatacatcccacacattatacacattctctccttccttcatgttatcggagccagaggtcacgagtttgaatcctggttagcgctattaaataaaataattgttgttcgcttctattccatgtctgagacccaaaaaaagaggctcgacgtgaggggggtgttggagtataatataagtgaattgcctacctcttcctatcagtttaagcttttgggttggactggttggtgcatgcaacttaatatggtagagataaaccaaggcgagccttctccccctacaaatatggaaaggctgctctattctgagtttttttattaataaaaaaggataagatatgctcttgctgcatgccttatcttcccaagttgaacactgattaatctgctgaacagcagacgatgtggatcctttgtattgtccgtgtttttactgaattcgtgcttcccttgtgcacttttactggtaatcagtttttattatggaaaaaataccactatagtcttcttgatatatcattctttcacctgttggtattccactgggaggaacgttgcttctagagaactttgcacttattctctgcaaagttaactttattcttttaacatcattcctagaatcctagtgcaacgccttttgatgctggctgtgtgcaaccatttttttacttgtatcattagacaatgcgctgcggggctgtgatattagttttatattgctctgattcgtaaacttgtaggtctaattcttgatgaaccattttctgttgatgacttatggacttctttttttcctgtgatcagttgtgcatcaattctaaaacagagttgataccttttttccatcttcaaggttctgctctctcatgccgcagttttacaacgttgaaggcttaaaaattctacagaactagatgatacttgcataatgcagccctcagatatttggaaggcgcatgctggttcatcacagtcagaggcttcgggtctggatatggagaggaacggatgcaatcataattgctgtccatctcctctccagccaattgcttcagctggtcagcactctgaaagcagcgctgcatacttttcttggcctacatctactctaatgcacggctcagctgaaggccgtgctaattactttgggaatctacagaagggtgtactaccaggacatcttggtcgcttgccaaatggccagcaagccaccaccttacttgatttaatgattataagagcattccacagcaagattctccgccggtttagtcttggtacagcaataggctttagaatcaggaaaggaacattgactgacacacctgccatccttgtgtttgttgctcgaaaggttcacaggaagtggctcagccctactcaatgtcttccaggtgcccttgagggacctgggggtgtgtggtgtgatgttgatgttgttgaattttcttattatggtgcaccagccccaacaccgaaggaacaactttatgatgagcttgttgatggattgcgtggtagcgaccctagtataggctcaggttcacaggtggctagtcttgagacctatgggactttgggtgccattgtgaagagtcgaactggcaacaagcaagttgggttccttacaaacaggcatgttgcggttgatctggattatcccaaccagaagatgttccatccgttgcctcctaatcttggacctggagtttacctaggtgctgttgagagagcaacatcatttataacagatgatgtttggtacgggatatatgcaggaacaaacccagaaacttttgtccgagctgatggtgcatttataccgtttgctgatgactttgaaattgctagtgtcagcacctccgttaaaggagttggagtcattggtaatgtaaaggcaattgacttgcaatccccaattggcagtctcattgggagacaagttgtcaaagttggaagaagttctggtatgacaactgggactgttgtcgcatacgcacttgagtacaatgatgagaagggaatatgtttcttcactgactttcttgtcgttggggagaaccaacaaacatttgatcttgaaggggacagtggaagcctcataatcttaacaggacaagacggtgagaagccgcaacctataggaattatatggggtggtacagctaaccggggaaggttgaaacttaaaagtggccagggtccggagaactggacaagtggagttgatcttggccgccttcttgatctcttggagctagatctgatcacaacaagtgaagggctacaagctgccttggaagaacaaaggattactctagctgccgctgcggctgcagccactaattcaactgccacagaatcgtcacctgttgctggccctcaagaggatgataaaatcgacaaaatctatgagcctctcggcattaacatcattcctcgagacggttctgccatatcaacggaccaacccaacgaggatgtggaagagctaaacctgatgtctccaatgcgcaatggtgaagaaggcaacggtgacttcaataacttgatggacttggaatcggaaaattcacctgatggtatttctattgctctgaacctgggagagcgggagccagaaagactccgctctgtttctgattcgatgctggacatagacttgcagaaatgaggctgcccgctgctatgctgcagacgtattgcaggaggctccgtatcattcagctttttttatcgatcattgcaggtatggccacaaaggaaataatctgtttctaggcgactggaccggttgttctgcttgaaacccggtctgggttaagctgtgaagctcctgcagccgcttgctcctgcagttttgcgtcaagtgtctaccaactctagcatatgtagtgctgcgtaagatgtcggcacctcagatagacagaggcgccatatttcttgctcatgtaatgttatttgttgtatgctcgtttgtatgtactgcatgaagcattgtaaaattgagcaacagcaaccagagctcgagaatcttaggcgcaaccaaccaaccccgtatcgatgaattgacaataaagctgaatattttaggtgtttagaaagtattttctctt

SEQ ID NO: 211702 - DNA, 2461 bp, Zea Mays
ccagtcttgttgactcttgagtcttccaccttcctcctcccgtctcgtctccaacggtgtgcttcttcctccggacgcctcgctcgtccgaccgctttacctccctcctccggcgagctccctccgctgttcctggtgtgtctacgcgccagctcctcctcttgtcgattttgggcgcgctcccctccgccgccgggctgtgctgcgcggacgcggttcgtggattcggcagaaggatctgcaccgtcctcgccgccgatatgcaggagcactagcaaagcggcttcgccatccctccggagtccggagcagccagttgtgcatcaattctaaaacagagttgataccttttttccatcttcaaggttctgctctctcatgccgcagttttacaacgttgaaggcttaaaaattctacagaactagatgatacttgcataatgcagccctcagatatttggaaggcgcatgctggttcatcacagtcagaggcttcgggtctggatatggagaggaacggatgcaatcataattgctgtccatctcctctccagccaattgcttcagctggtcagcactctgaaagcagcgctgcatacttttcttggcctacatctactctaatgcacggctcagctgaaggccgtgctaattactttgggaatctacagaagggtgtactaccaggacatcttggtcgcttgccaaatggccagcaagccaccaccttacttgatttaatgattataagagcattccacagcaagattctccgccggtttagtcttggtacagcaataggctttagaatcaggaaaggaacattgactgacacacctgccatccttgtgtttgttgctcgaaaggttcacaggaagtggctcagccctactcaatgtcttccaggtgcccttgagggacctgggggtgtgtggtgtgatgttgatgttgttgaattttcttattatggtgcaccagccccaacaccgaaggaacaactttatgatgagcttgttgatggattgcgtggtagcgaccctagtataggctcaggttcacaggtggctagtcttgagacctatgggactttgggtgccattgtgaagagtcgaactggcaacaagcaagttgggttccttacaaacaggcatgttgcggttgatctggattatcccaaccagaagatgttccatccgttgcctcctaatcttggacctggagtttacctaggtgctgttgagagagcaacatcatttataacagatgatgtttggtacgggatatatgcaggaacaaacccagaaacttttgtccgagctgatggtgcatttataccgtttgctgatgactttgaaattgctagtgtcagcacctccgttaaaggagttggagtcattggtaatgtaaaggcaattgacttgcaatccccaattggcagtctcattgggagacaagttgtcaaagttggaagaagttctggtatgacaactgggactgttgtcgcatacgcacttgagtacaatgatgagaagggaatatgtttcttcactgactttcttgtcgttggggagaaccaacaaacatttgatcttgaaggggacagtggaagcctcataatcttaacaggacaagacggtgagaagccgcaacctataggaattatatggggtggtacagctaaccggggaaggttgaaacttaaaagtggccagggtccggagaactggacaagtggagttgatcttggccgccttcttgatctcttggagctagatctgatcacaacaagtgaagggctacaagctgccttggaagaacaaaggattactctagctgccgctgcggctgcagccactaattcaactgccacagaatcgtcacctgttgctggccctcaagaggatgataaaatcgacaaaatctatgagcctctcggcattaacatcattcctcgagacggttctgccatatcaacggaccaacccaacgaggatgtggaagagctaaacctgatgtctccaatgcgcaatggtgaagaaggcaacggtgacttcaataacttgatggacttggaatcggaaaattcacctgatggtatggccacaaaggaaataatctgtttctaggcgactggaccggttgttctgcttgaaacccggtctgggttaagctgtgaagctcctgcagccgcttgctcctgcagttttgcgtcaagtgtctaccaactctagcatatgtagtgctgcgtaagatgtcggcacctcagatagacagaggcgccatatttcttgctcatgtaatgttatttgttgtatgctcgtttgtatgtactgcatgaagcattgtaaaattgagcaacagcaaccagagctcgagaatcttaggcgcaaccaaccaaccccgtatcgatgaattgacaataaagctgaatattttaggtgtttagaaagtattttctctt

SEQ ID NO: 211703 - DNA, 2642 bp, Zea Mays
ccagtcttgttgactcttgagtcttccaccttcctcctcccgtctcgtctccaacggtgtgcttcttcctccggacgcctcgctcgtccgaccgctttacctccctcctccggcgagctccctccgctgttcctggtgtgtctacgcgccagctcctcctcttgtcgattttgggcgcgctcccctccgccgccgggctgtgctgcgcggacgcggttcgtggattcggcagaaggatctgcaccgtcctcgccgccgatatgcaggagcactagcaaagcggcttcgccatccctccggagtccggagcagccagctcatcaatcgttcctccttagatacattcccattatatatcatgtgccgagtgccctccaagatggtttactacagtaatatagttttacaacgttgaaggcttaaaaattctacagaactagatgatacttgcataatgcagccctcagatatttggaaggcgcatgctggttcatcacagtcagaggcttcgggtctggatatggagaggaacggatgcaatcataattgctgtccatctcctctccagccaattgcttcagctggtcagcactctgaaagcagcgctgcatacttttcttggcctacatctactctaatgcacggctcagctgaaggccgtgctaattactttgggaatctacagaagggtgtactaccaggacatcttggtcgcttgccaaatggccagcaagccaccaccttacttgatttaatgattataagagcattccacagcaagattctccgccggtttagtcttggtacagcaataggctttagaatcaggaaaggaacattgactgacacacctgccatccttgtgtttgttgctcgaaaggttcacaggaagtggctcagccctactcaatgtcttccaggtgcccttgagggacctgggggtgtgtggtgtgatgttgatgttgttgaattttcttattatggtgcaccagccccaacaccgaaggaacaactttatgatgagcttgttgatggattgcgtggtagcgaccctagtataggctcaggttcacaggtggctagtcttgagacctatgggactttgggtgccattgtgaagagtcgaactggcaacaagcaagttgggttccttacaaacaggcatgttgcggttgatctggattatcccaaccagaagatgttccatccgttgcctcctaatcttggacctggagtttacctaggtgctgttgagagagcaacatcatttataacagatgatgtttggtacgggatatatgcaggaacaaacccagaaacttttgtccgagctgatggtgcatttataccgtttgctgatgactttgaaattgctagtgtcagcacctccgttaaaggagttggagtcattggtaatgtaaaggcaattgacttgcaatccccaattggcagtctcattgggagacaagttgtcaaagttggaagaagttctggtatgacaactgggactgttgtcgcatacgcacttgagtacaatgatgagaagggaatatgtttcttcactgactttcttgtcgttggggagaaccaacaaacatttgatcttgaaggggacagtggaagcctcataatcttaacaggacaagacggtgagaagccgcaacctataggaattatatggggtggtacagctaaccggggaaggttgaaacttaaaagtggccagggtccggagaactggacaagtggagttgatcttggccgccttcttgatctcttggagctagatctgatcacaacaagtgaagggctacaagctgccttggaagaacaaaggattactctagctgccgctgcggctgcagccactaattcaactgccacagaatcgtcacctgttgctggccctcaagaggatgataaaatcgacaaaatctatgagcctctcggcattaacatcattcctcgagacggttctgccatatcaacggaccaacccaacgaggatgtggaagagctaaacctgatgtctccaatgcgcaatggtgaagaaggcaacggtgacttcaataacttgatggacttggaatcggaaaattcacctgatggtatttctattgctctgaacctgggagagcgggagccagaaagactccgctctgtttctgattcgatgctggacatagacttgcagaaatgaggctgcccgctgctatgctgcagacgtattgcaggaggctccgtatcattcagctttttttatcgatcattgcaggtatggccacaaaggaaataatctgtttctaggcgactggaccggttgttctgcttgaaacccggtctgggttaagctgtgaagctcctgcagccgcttgctcctgcagttttgcgtcaagtgtctaccaactctagcatatgtagtgctgcgtaagatgtcggcacctcagatagacagaggcgccatatttcttgctcatgtaatgttatttgttgtatgctcgtttgtatgtactgcatgaagcattgtaaaattgagcaacagcaaccagagctcgagaatcttaggcgcaaccaaccaaccccgtatcgatgaattgacaataaagctgaatattttaggtgtttagaaagtattttctctt

SEQ ID NO: 211704 - DNA, 2579 bp, Zea Mays
ccagtcttgttgactcttgagtcttccaccttcctcctcccgtctcgtctccaacggtgtgcttcttcctccggacgcctcgctcgtccgaccgctttacctccctcctccggcgagctccctccgctgttcctggtgtgtctacgcgccagctcctcctcttgtcgattttgggcgcgctcccctccgccgccgggctgtgctgcgcggacgcggttcgtggattcggcagaaggatctgcaccgtcctcgccgccgatatgcaggagcactagcaaagcggcttcgccatccctccggagtccggagcagccaggttctgctctctcatgccgcagttttacaacgttgaaggcttaaaaattctacagaactagatgatacttgcataatgcagccctcagatatttggaaggcgcatgctggttcatcacagtcagaggcttcgggtctggatatggagaggaacggatgcaatcataattgctgtccatctcctctccagccaattgcttcagctggtcagcactctgaaagcagcgctgcatacttttcttggcctacatctactctaatgcacggctcagctgaaggccgtgctaattactttgggaatctacagaagggtgtactaccaggacatcttggtcgcttgccaaatggccagcaagccaccaccttacttgatttaatgattataagagcattccacagcaagattctccgccggtttagtcttggtacagcaataggctttagaatcaggaaaggaacattgactgacacacctgccatccttgtgtttgttgctcgaaaggttcacaggaagtggctcagccctactcaatgtcttccaggtgcccttgagggacctgggggtgtgtggtgtgatgttgatgttgttgaattttcttattatggtgcaccagccccaacaccgaaggaacaactttatgatgagcttgttgatggattgcgtggtagcgaccctagtataggctcaggttcacaggtggctagtcttgagacctatgggactttgggtgccattgtgaagagtcgaactggcaacaagcaagttgggttccttacaaacaggcatgttgcggttgatctggattatcccaaccagaagatgttccatccgttgcctcctaatcttggacctggagtttacctaggtgctgttgagagagcaacatcatttataacagatgatgtttggtacgggatatatgcaggaacaaacccagaaacttttgtccgagctgatggtgcatttataccgtttgctgatgactttgaaattgctagtgtcagcacctccgttaaaggagttggagtcattggtaatgtaaaggcaattgacttgcaatccccaattggcagtctcattgggagacaagttgtcaaagttggaagaagttctggtatgacaactgggactgttgtcgcatacgcacttgagtacaatgatgagaagggaatatgtttcttcactgactttcttgtcgttggggagaaccaacaaacatttgatcttgaaggggacagtggaagcctcataatcttaacaggacaagacggtgagaagccgcaacctataggaattatatggggtggtacagctaaccggggaaggttgaaacttaaaagtggccagggtccggagaactggacaagtggagttgatcttggccgccttcttgatctcttggagctagatctgatcacaacaagtgaagggctacaagctgccttggaagaacaaaggattactctagctgccgctgcggctgcagccactaattcaactgccacagaatcgtcacctgttgctggccctcaagaggatgataaaatcgacaaaatctatgagcctctcggcattaacatcattcctcgagacggttctgccatatcaacggaccaacccaacgaggatgtggaagagctaaacctgatgtctccaatgcgcaatggtgaagaaggcaacggtgacttcaataacttgatggacttggaatcggaaaattcacctgatggtatttctattgctctgaacctgggagagcgggagccagaaagactccgctctgtttctgattcgatgctggacatagacttgcagaaatgaggctgcccgctgctatgctgcagacgtattgcaggaggctccgtatcattcagctttttttatcgatcattgcaggtatggccacaaaggaaataatctgtttctaggcgactggaccggttgttctgcttgaaacccggtctgggttaagctgtgaagctcctgcagccgcttgctcctgcagttttgcgtcaagtgtctaccaactctagcatatgtagtgctgcgtaagatgtcggcacctcagatagacagaggcgccatatttcttgctcatgtaatgttatttgttgtatgctcgtttgtatgtactgcatgaagcattgtaaaattgagcaacagcaaccagagctcgagaatcttaggcgcaaccaaccaaccccgtatcgatgaattgacaataaagctgaatattttaggtgtttagaaagtattttctctt

SEQ ID NO: 211705 - DNA, 2078 bp, Zea Mays
ccagtcttgttgactcttgagtcttccaccttcctcctcccgtctcgtctccaacggtgtgcttcttcctccggacgcctcgctcgtccgaccgctttacctccctcctccggcgagctccctccgctgttcctggtgtgtctacgcgccagctcctcctcttgtcgattttgggcgcgctcccctccgccgccgggctgtgctgcgcggacgcggttcgtggattcggcagaaggatctgcaccgtcctcgccgccgatatgcaggagcactagcaaagcggcttcgccatccctccggagtccggagcagccaggttcacaggaagtggctcagccctactcaatgtcttccaggtgcccttgagggacctgggggtgtgtggtgtgatgttgatgttgttgaattttcttattatggtgcaccagccccaacaccgaaggaacaactttatgatgagcttgttgatggattgcgtggtagcgaccctagtataggctcaggttcacaggtggctagtcttgagacctatgggactttgggtgccattgtgaagagtcgaactggcaacaagcaagttgggttccttacaaacaggcatgttgcggttgatctggattatcccaaccagaagatgttccatccgttgcctcctaatcttggacctggagtttacctaggtgctgttgagagagcaacatcatttataacagatgatgtttggtacgggatatatgcaggaacaaacccagaaacttttgtccgagctgatggtgcatttataccgtttgctgatgactttgaaattgctagtgtcagcacctccgttaaaggagttggagtcattggtaatgtaaaggcaattgacttgcaatccccaattggcagtctcattgggagacaagttgtcaaagttggaagaagttctggtatgacaactgggactgttgtcgcatacgcacttgagtacaatgatgagaagggaatatgtttcttcactgactttcttgtcgttggggagaaccaacaaacatttgatcttgaaggggacagtggaagcctcataatcttaacaggacaagacggtgagaagccgcaacctataggaattatatggggtggtacagctaaccggggaaggttgaaacttaaaagtggccagggtccggagaactggacaagtggagttgatcttggccgccttcttgatctcttggagctagatctgatcacaacaagtgaagggctacaagctgccttggaagaacaaaggattactctagctgccgctgcggctgcagccactaattcaactgccacagaatcgtcacctgttgctggccctcaagaggatgataaaatcgacaaaatctatgagcctctcggcattaacatcattcctcgagacggttctgccatatcaacggaccaacccaacgaggatgtggaagagctaaacctgatgtctccaatgcgcaatggtgaagaaggcaacggtgacttcaataacttgatggacttggaatcggaaaattcacctgatggtatttctattgctctgaacctgggagagcgggagccagaaagactccgctctgtttctgattcgatgctggacatagacttgcagaaatgaggctgcccgctgctatgctgcagacgtattgcaggaggctccgtatcattcagctttttttatcgatcattgcaggtatggccacaaaggaaataatctgtttctaggcgactggaccggttgttctgcttgaaacccggtctgggttaagctgtgaagctcctgcagccgcttgctcctgcagttttgcgtcaagtgtctaccaactctagcatatgtagtgctgcgtaagatgtcggcacctcagatagacagaggcgccatatttcttgctcatgtaatgttatttgttgtatgctcgtttgtatgtactgcatgaagcattgtaaaattgagcaacagcaaccagagctcgagaatcttaggcgcaaccaaccaaccccgtatcgatgaattgacaataaagctgaatattttaggtgtttagaaagtattttctctt

SEQ ID NO: 211706 - DNA, 2070 bp, Zea Mays
ccagtcttgttgactcttgagtcttccaccttcctcctcccgtctcgtctccaacggtgtgcttcttcctccggacgcctcgctcgtccgaccgctttacctccctcctccggcgagctccctccgctgttcctggtgtgtctacgcgccagctcctcctcttgtcgattttgggcgcgctcccctccgccgccgggctgtgctgcgcggacgcggttcgtggattcggcagaaggatctgcaccgtcctcgccgccgatatgcaggagcactagcaaagcggcttcgccatccctccggagtccggagcagccaggaagtggctcagccctactcaatgtcttccaggtgcccttgagggacctgggggtgtgtggtgtgatgttgatgttgttgaattttcttattatggtgcaccagccccaacaccgaaggaacaactttatgatgagcttgttgatggattgcgtggtagcgaccctagtataggctcaggttcacaggtggctagtcttgagacctatgggactttgggtgccattgtgaagagtcgaactggcaacaagcaagttgggttccttacaaacaggcatgttgcggttgatctggattatcccaaccagaagatgttccatccgttgcctcctaatcttggacctggagtttacctaggtgctgttgagagagcaacatcatttataacagatgatgtttggtacgggatatatgcaggaacaaacccagaaacttttgtccgagctgatggtgcatttataccgtttgctgatgactttgaaattgctagtgtcagcacctccgttaaaggagttggagtcattggtaatgtaaaggcaattgacttgcaatccccaattggcagtctcattgggagacaagttgtcaaagttggaagaagttctggtatgacaactgggactgttgtcgcatacgcacttgagtacaatgatgagaagggaatatgtttcttcactgactttcttgtcgttggggagaaccaacaaacatttgatcttgaaggggacagtggaagcctcataatcttaacaggacaagacggtgagaagccgcaacctataggaattatatggggtggtacagctaaccggggaaggttgaaacttaaaagtggccagggtccggagaactggacaagtggagttgatcttggccgccttcttgatctcttggagctagatctgatcacaacaagtgaagggctacaagctgccttggaagaacaaaggattactctagctgccgctgcggctgcagccactaattcaactgccacagaatcgtcacctgttgctggccctcaagaggatgataaaatcgacaaaatctatgagcctctcggcattaacatcattcctcgagacggttctgccatatcaacggaccaacccaacgaggatgtggaagagctaaacctgatgtctccaatgcgcaatggtgaagaaggcaacggtgacttcaataacttgatggacttggaatcggaaaattcacctgatggtatttctattgctctgaacctgggagagcgggagccagaaagactccgctctgtttctgattcgatgctggacatagacttgcagaaatgaggctgcccgctgctatgctgcagacgtattgcaggaggctccgtatcattcagctttttttatcgatcattgcaggtatggccacaaaggaaataatctgtttctaggcgactggaccggttgttctgcttgaaacccggtctgggttaagctgtgaagctcctgcagccgcttgctcctgcagttttgcgtcaagtgtctaccaactctagcatatgtagtgctgcgtaagatgtcggcacctcagatagacagaggcgccatatttcttgctcatgtaatgttatttgttgtatgctcgtttgtatgtactgcatgaagcattgtaaaattgagcaacagcaaccagagctcgagaatcttaggcgcaaccaaccaaccccgtatcgatgaattgacaataaagctgaatattttaggtgtttagaaagtattttctctt

SEQ ID NO: 211707 - DNA, 1978 bp, Zea Mays
caaaatcaccggcaggttttcctcggttcccgttacgtatgtggacacctgaactcaacgcaaagaccacgaactgccgtcagagaagacgctagtaaaccgcccgccgccccaactcacgaatcggcaccgccacccaacggggctggtagagtactactagtagtatccattcatacgcgcgtggccggtaggcgctgtaaccactttcttcttctcttccagaaggcccagccctccaccctccgggcaccagtgcgtgcgccgtcgacttcctctcaccttctcgctcctcgagaacgactccatagcgcaccacaccagcgcggcgacagacagcccgcgaggagaaaaggtagaagaggaggggcagggagagccatacatactcaccggttggattcggtccaatccaatccagccggccgcggcgtgaccagccgatccagagggcgccgaatcgatctgcgggggcggcgcggcgatgcggagggctaccgctggggatcccggtcgccgcgggggatgcgcatgagggcgtccggcccgcgaatcttctggtttggcgggagcccagggggcgcgcaccccggatcggcggcgcgcggcgcgggcaggatcgtgtcggtggggctgcggcagtgaccgcgggcgcgggggagggtgagaagcggcaactagcacttcgagtcgagcgggcgcgatggtgagcggccacatcttccactgccggaagaactcgtggccggcggaggagtacgtcggccggaccgcgctgcagctgttggatttcgatggcggggcgccgccggagcaggcgtggcggaggcggctcaacagccacgcgaacatcctcaaggagttcagtgtcactttcatggaggcaatgaggatgatgagccttggcctgagactatggtcgtatgttcgggaggaggcgtcacatggacggaaagcaccgatcgatccgttcacaaaagagcgctgtaaaccgtcagcttcccagggtgtgccacttggtgggatggggagcggaagcatttcgagaggtttcaggggagagttcaagaattggcacatcatacctggtctttgtgaaagttcgccggtcatggagaaccagttctctatatttgtatctcgagacgggggtaataagaaatactcatcagttttggctcctggacatcatgaaggtctgaagaaaaatagtgactctggaatttcttcatgggactggaatttaagtggtcaacactcgacctatcatgcattgttccctcgggcatggactgtttatgatggtgaacctgatccagaccttaaaatctcatgtcgtcaaatatcacctttcattcctcatgattacaaggatagcagtcttccaacatctgtatttgtgtatactctagtaaacactgggagagatcgtgcaaaagtaagcctgttaatgacatgggcgaattctattggaggtttttcgcataattcaggaggccactacaatgagcccttcattgcggaagatggagtatcaggagtgcttctgcatcacaaaacagccaaggataatccacctgtcacttttgctgttgctgcctgcgaaactcagaatgtgaatgtgacagtcttgccagtgtttggtctttctggagaaaaccatgtttccgcaaaggaaatgtggaacaccatgctacagaatggtcactttgatcgggaaaatttcagtgctggtcccagtatgccttcttctccaggacagaaactctgtgcagctgtctcagcctcaacttgggttgagccacatggtagatgtactgttgtgtttgctctggcttggtcctcacctaaagtaaagtttcaaaaaggatgcacatataacaggaggtacacccaattctacggaacttctgagaaatcggctgttaatttggtacatgatgccttaacaagggggcggggtgcagacccagtgcta

SEQ ID NO: 211708 - DNA, 3944 bp, Zea Mays
caaaatcaccggcaggttttcctcggttcccgttacgtatgtggacacctgaactcaacgcaaagaccacgaactgccgtcagagaagacgctagtaaaccgcccgccgccccaactcacgaatcggcaccgccacccaacggggctggtagagtactactagtagtatccattcatacgcgcgtggccggtaggcgctgtaaccactttcttcttctcttccagaaggcccagccctccaccctccgggcaccagtgcgtgcgccgtcgacttcctctcaccttctcgctcctcgagaacgactccatagcgcaccacaccagcgcggcgacagacagcccgcgaggagaaaaggtagaagaggaggggcagggagagccatacatactcaccggttggattcggtccaatccaatccagccggccgcggcgtgaccagccgatccagagggcgccgaatcgatctgcgggggcggcgcggcgatgcggagggctaccgctggggatcccggtcgccgcgggggatgcgcatgagggcgtccggcccgcgaatcttctggtttggcgggagcccagggggcgcgcaccccggatcggcggcgcgcggcgcgggcaggatcgtgtcggtggggctgcggcagtgaccgcgggcgcgggggagggtgagaagcggcaactagcacttcgagtcgagcgggcgcgatggtgagcggccacatcttccactgccggaagaactcgtggccggcggaggagtacgtcggccggaccgcgctgcagctgttggatttcgatggcggggcgccgccggagcaggcgtggcggaggcggctcaacagccacgcgaacatcctcaaggagttcagtgtcactttcatggaggcaatgaggatgatgagccttggcctgagactatggtcgtatgttcgggaggaggcgtcacatggacggaaagcaccgatcgatccgttcacaaaagagcgctgtaaaccgtcagcttcccagggtgtgccacttggtgggatggggagcggaagcatttcgagaggtttcaggggagagttcaagaattggcacatcatacctggtctttgtgaaagttcgccggtcatggagaaccagttctctatatttgtatctcgagacgggggtaataagaaatactcatcagttttggctcctggacatcatgaaggtctgaagaaaaatagtgactctggaatttcttcatgggactggaatttaagtggtcaacactcgacctatcatgcattgttccctcgggcatggactgtttatgatggtgaacctgatccagaccttaaaatctcatgtcgtcaaatatcacctttcattcctcatgattacaaggatagcagtcttccaacatctgtatttgtgtatactctagtaaacactgggagagatcgtgcaaaagtaagcctgttaatgacatgggcgaattctattggaggtttttcgcataattcaggaggccactacaatgagcccttcattgcggaagatggagtatcaggagtgcttctgcatcacaaaacagccaaggataatccacctgtcacttttgctgttgctgcctgcgaaactcagaatgtgaatgtgacagtcttgccagtgtttggtctttctggagaaaaccatgtttccgcaaaggaaatgtggaacaccatgctacagaatggtcactttgatcgggaaaatttcagtgctggtcccagtatgccttcttctccaggacagaaactctgtgcagctgtctcagcctcaacttgggttgagccacatggtagatgtactgttgtgtttgctctggcttggtcctcacctaaagtaaagtttcaaaaaggatgcacatataacaggaggtacacccaattctacggaacttctgagaaatcggctgttaatttggtacatgatgccttaacaaaatataaactttgggaagaagaaattgagaagtggcaaaaccccatactgaaggatgaaaggcttccagaatggtataagttcactctttttaatgagctttactttctggtagctggggggactgtttggacagatggtcaacccccagcaatcgatgagaaaaagagtcctggttttaatcaccagaagtcctcaaagaggggtactaaagacaccaatcagggatctgttaaagatagacatgtcaacctggcagtggagcaagtacctcatggtggttacatggctaatggtgatgatcacagtgtatccaagttcgcagcagttcatggatcagaaatgcaagaacaaatcaatggactcaagtcagaagagccaattccttacttgatttcaaaggatggccctgaacacgttggcaagtttttgtatctagaaggagtggaatacatcatgtggaacacatatgatgtgcatttctatgcatcttttgctctccttgatttgttcccaaaaatagagttgagtatccaacgtgattttgccaatgctgtgctgtatgaagatcggcgcaaagtaaaatttttggctgatggtacatccggaatccgcaaggttaaaggtgcagtgcctcatgacctcggaacgcatgatccgtggcatgaaatgaatgcatataacatacacgatacaagcaaatggaaagatttgaaccccaaatttgtgctccagatatacagagactttgctgctacaggtgatatgcaattcggtcgagatgtttggcctgcagtctgtgctgctatggactatatggatcagtttgaccgtgatggtgatggtctcattgagaatgatggatttcctgatcaaacctatgatgcttggactgttcatggaatcagtgcttactgtggttgtctttggcttgctgcacttcaagctgcagctacaatggctcatcgccttggggatcggcactttgctgagaagtacaagctcaagtttataaaagccaaagcagtatatgaggcgaagttatggaatgggtcatatttcaattacgacagcggcacaagtagcaacagtagatccattcaggctgatcagctggcaggacagtggtatgctgcctcgtcgggcttgcccccgcttttcgatgagcacaagataagaactgctctgcaaaaaatatttgaattcaacgtgatgaaggttaaaggaggacggatgggagctgtaaatggtatgactccaaagggaaaggtggacgagacatgcatgcaatcacgtgaaatctggactggtgttacatacgctgttgctgcaaatatgctgctccatggaatggagcatcaaggctttacgaccgcagaaggaatttttactgcgggatggtcagaagaaggatatgggtattggttccaaacaccagaaggatggaccacagatgggcattatagatccctcgtatacatgcggcctcttgccatttgggcgatccagtatgcagtttctcctcccaaggctattcttgaggcccccaaagttaacctaatggaccgaatacatatctcccctcacatggtccgagcaattagcgagataagcattagaaaggtagcacccgacaatagatgtttccctagctctgccttccactgtgaatgctgatccgaaggtaaacatgcagctgctgagcaacttgcaaccttttttttggcttttttcggtttctccttgccccccccccccctttcaaggtccaggtgggggggctcaggagttcttttcttggatcagagggcttatccaaaccaccaccaaactcgtgactcaagagagttcatgttgtataattgtacagcaaactgttagtcacataatctttttttttcactttgaaagttttgtgctgttcacttgaatagagctagaaataaaagaactgggaagctggtgtctacggctaaccgtagggctgttggaa

SEQ ID NO: 211709 - DNA, 3655 bp, Zea Mays
caaaatcaccggcaggttttcctcggttcccgttacgtatgtggacacctgaactcaacgcaaagaccacgaactgccgtcagagaagacgctagtaaaccgcccgccgccccaactcacgaatcggcaccgccacccaacggggctggtagagtactactagtagtatccattcatacgcgcgtggccggtaggcgctgtaaccactttcttcttctcttccagaaggcccagccctccaccctccgggcaccagtgcgtgcgccgtcgacttcctctcaccttctcgctcctcgagaacgactccatagcgcaccacaccagcgcggcgacagacagcccgcgaggagaaaaggtagaagaggaggggcagggagagccatacatactcaccggttggattcggtccaatccaatccagccggccgcggcgtgaccagccgatccagagggcgccgaatcgatctgcgggggcggcgcggcgatgcggagggctaccgctggggatcccggtcgccgcgggggatgcgcatgagggcgtccggcccgcgaatcttctggtttggcgggagcccagggggcgcgcaccccggatcggcggcgcgcggcgcgggcaggatcgtgtcggtggggctgcggcagtgaccgcgggcgcgggggagggtgagaagcggcaactagcacttcgagtcgagcgggcgcgatggtgagcggccacatcttccactgccggaagaactcgtggccggcggaggagtacgtcggccggaccgcgctgcagctgttggatttcgatggcggggcgccgccggagcaggcgtggcggaggcggctcaacagccacgcgaacatcctcaaggagttcagtgtcactttcatggaggcaatgaggatgatgagccttggcctgagactatggtcgtatgttcgggaggaggcgtcacatggacggaaagcaccgatcgatccgttcacaaaagagcgctgtaaaccgtcagcttcccagggtgtgccacttggtgggatggggagcggaagcatttcgagaggtttcaggggagagttcaagaattggcacatcatacctggtctttgtgaaagttcgccggtcatggagaaccagttctctatatttgtatctcgagacgggggtaataagaaatactcatcagttttggctcctggacatcatgaaggtctgaagaaaaatagtgactctggaatttcttcatgggactggaatttaagtggtcaacactcgacctatcatgcattgttccctcgggcatggactgtttatgatggtgaacctgatccagaccttaaaatctcatgtcgtcaaatatcacctttcattcctcatgattacaaggatagcagtcttccaacatctgtatttgtgtatactctagtaaacactgggagagatcgtgcaaaagtaagcctgttaatgacatgggcgaattctattggaggtttttcgcataattcaggaggccactacaatgagcccttcattgcggaagatggagtatcaggagtgcttctgcatcacaaaacagccaaggataatccacctgtcacttttgctgttgctgcctgcgaaactcagaatgtgaatgtgacagtcttgccagtgtttggtctttctggagaaaaccatgtttccgcaaaggaaatgtggaacaccatgctacagaatggtcactttgatcgggaaaatttcagtgctggtcccagtatgccttcttctccaggacagaaactctgtgcagctgtctcagcctcaacttgggttgagccacatggtagatgtactgttgtgtttgctctggcttggtcctcacctaaagtaaagtttcaaaaaggatgcacatataacaggaggtacacccaattctacggaacttctgagaaatcggctgttaatttggtacatgatgccttaacaaaatataaactttgggaagaagaaattgagaagtggcaaaaccccatactgaaggatgaaaggcttccagaatggtataagttcactctttttaatgagctttactttctggtagctggggggactgtttggacagatggtcaacccccagcaatcgatgagaaaaagagtcctggttttaatcaccagaagtcctcaaagaggggtactaaagacaccaatcagggatctgttaaagatagacatgtcaacctggcagtggagcaagtacctcatggtggttacatggctaatggtgatgatcacagtgtatccaagttcgcagcagttcatggatcagaaatgcaagaacaaatcaatggactcaagtcagaagagccaattccttacttgatttcaaaggatggccctgaacacgttggcaagtttttgtatctagaaggagtggaatacatcatgtggaacacatatgatgtgcatttctatgcatcttttgctctccttgatttgttcccaaaaatagagttgagtatccaacgtgattttgccaatgctgtgctgtatgaagatcggcgcaaagtaaaatttttggctgatggtacatccggaatccgcaaggttaaaggtgcagtgcctcatgacctcggaacgcatgatccgtggcatgaaatgaatgcatataacatacacgatacaagcaaatggaaagatttgaaccccaaatttgtgctccagatatacagagactttgctgctacaggtgatatgcaattcggtcgagatgtttggcctgcagtctgtgctgctatggactatatggatcagtttgaccgtgatggtgatggtctcattgagaatgatggatttcctgatcaaacctatgatgcttggactgttcatggaatcagtgcttactgtggttgtctttggcttgctgcacttcaagctgcagctacaatggctcatcgccttggggatcggcactttgctgagaagtacaagctcaagtttataaaagccaaagcagtatatgaggcgaagttatggaatgggtcatatttcaattacgacagcggcacaagtagcaacagtagatccattcaggctgatcagctggcaggacagtggtatgctgcctcgtcgggcttgcccccgcttttcgatgagcacaagataagaactgctctgcaaaaaatatttgaattcaacgtgatgaaggttaaaggaggacggatgggagctgtaaatggtatgactccaaagggaaaggtggacgagacatgcatgcaatcacgtgaaatctggactggtgttacatacgctgttgctgcaaatatgctgctccatggaatggagcatcaaggctttacgaccgcagaaggaatttttactgcgggatggtcagaagaaggatatgggtattggttccaaacaccagaaggatggaccacagatgggcattatagatccctcgtatacatgcggcctcttgccatttgggcgatccagtatgcagtttctcctcccaaggctattcttgaggcccccaaagttaacctaatggaccgaatacatatctcccctcacatggtccgagcaattagcgagataagcattagaaaggtagcacccgacaatagatgtttccctagctctgccttccactgtgaatgctgatccgaagcaccaatggcggaggaggag

SEQ ID NO: 211710 - DNA, 2922 bp, Zea Mays
gtcagcttcccagggtgtgccacttggtgggatggggagcggaagcatttcgagaggtttcaggggagagttcaagaattggcacatcatacctggtctttgtgaaagttcgccggtcatggagaaccagttctctatatttgtatctcgagacgggggtaataagaaatactcatcagttttggctcctggacatcatgaaggtctgaagaaaaatagtgactctggaatttcttcatgggactggaatttaagtggtcaacactcgacctatcatgcattgttccctcgggcatggactgtttatgatggtgaacctgatccagaccttaaaatctcatgtcgtcaaatatcacctttcattcctcatgattacaaggatagcagtcttccaacatctgtatttgtgtatactctagtaaacactgggagagatcgtgcaaaagtaagcctgttaatgacatgggcgaattctattggaggtttttcgcataattcaggaggccactacaatgagcccttcattgcggaagatggagtatcaggagtgcttctgcatcacaaaacagccaaggataatccacctgtcacttttgctgttgctgcctgcgaaactcagaatgtgaatgtgacagtcttgccagtgtttggtctttctggagaaaaccatgtttccgcaaaggaaatgtggaacaccatgctacagtgctggtcccagtatgccttcttctccaggacagaaactctgtgcagctgtctcagcctcaacttgggttgagccacatggtagatgtactgttgtgtttgctctggcttggtcctcacctaaagtaaagtttcaaaaaggatgcacatataacaggaggtacacccaattctacggaacttctgagaaatcggctgttaatttggtacatgatgccttaacaaaatataaactttgggaagaagaaattgagaagtggcaaaaccccatactgaaggatgaaaggcttccagaatggtataagttcactctttttaatgagctttactttctggtagctggggggactgtttggacagatggtcaacccccagcaatcgatgagaaaaagagtcctggttttaatcaccagaagtcctcaaagaggggtactaaagacaccaatcagggatctgttaaagatagacatgtcaacctggcagtggagcaagtacctcatggtggttacatggctaatggtgatgatcacagtgtatccaagttcgcagcagttcatggatcagaaatgcaagaacaaatcaatggactcaagtcagaagagccaattccttacttgatttcaaaggatggccctgaacacgttggcaagtttttgtatctagaaggagtggaatacatcatgtggaacacatatgatgtgcatttctatgcatcttttgctctccttgatttgttcccaaaaatagagttgagtatccaacgtgattttgccaatgctgtgctgtatgaagatcggcgcaaagtaaaatttttggctgatggtacatccggaatccgcaaggttaaaggtgcagtgcctcatgacctcggaacgcatgatccgtggcatgaaatgaatgcatataacatacacgatacaagcaaatggaaagatttgaaccccaaatttgtgctccagatatacagagactttgctgctacaggtgatatgcaattcggtcgagatgtttggcctgcagtctgtgctgctatggactatatggatcagtttgaccgtgatggtgatggtctcattgagaatgatggatttcctgatcaaacctatgatgcttggactgttcatggaatcagtgcttactgtggttgtctttggcttgctgcacttcaagctgcagctacaatggctcatcgccttggggatcggcactttgctgagaagtacaagctcaagtttataaaagccaaagcagtatatgaggcgaagttatggaatgggtcatatttcaattacgacagcggcacaagtagcaacagtagatccattcaggctgatcagctggcaggacagtggtatgctgcctcgtcgggcttgcccccgcttttcgatgagcacaagataagaactgctctgcaaaaaatatttgaattcaacgtgatgaaggttaaaggaggacggatgggagctgtaaatggtatgactccaaagggaaaggtggacgagacatgcatgcaatcacgtgaaatctggactggtgttacatacgctgttgctgcaaatatgctgctccatggaatggagcatcaaggctttacgaccgcagaaggaatttttactgcgggatggtcagaagaaggatatgggtattggttccaaacaccagaaggatggaccacagatgggcattatagatccctcgtatacatgcggcctcttgccatttgggcgatccagtatgcagtttctcctcccaaggctattcttgaggcccccaaagttaacctaatggaccgaatacatatctcccctcacatggtccgagcaattagcgagataagcattagaaaggtagcacccgacaatagatgtttccctagctctgccttccactgtgaatgctgatccgaaggtaaacatgcagctgctgagcaacttgcaaccttttttttggcttttttcggtttctccttgccccccccccccctttcaaggtccaggtgggggggctcaggagttcttttcttggatcagagggcttatccaaaccaccaccaaactcgtgactcaagagagttcatgttgtataattgtacagcaaactgttagtcacataatctttttttttcactttgaaagttttgtgctgttcacttgaatagagctagaaataaaagaactgggaagctggtgtctacggctaaccgtagggctgttggaa

SEQ ID NO: 211711 - DNA, 1834 bp, Zea Mays
gaacgaaataattacgcaaacagccacctgaatcgttgtagcgtacgtgccgaaaattggttttttcacgcacattgatgggcaaaaccgttctcccccttctgtaattgtcattgggggagggatttcaggcatcgcagctgcacgtgctttgtcgactgcttcatttaaggtcacactcttggagtccagggaccgacctggtggccgtgtgcacactgactattctttcggttgcccaattgacatgggagcatcatggttgcatggtgtttgcaatgagaattctttggcaccactgattaggatgcttgggcttaggttatatcgcacaagcggtgataactctgttctgtatgaccatgatttggaaagttatgctctttttgataagcatggtcagcaagttccccaggagatagtaagcaaagttggagagacatttgagagaattcttaaggagactgtcatagtaagagatgagcatgcaaatgacatgcctctttttcaagccatagcgatcgtgcttgacaggaatccgcatatgaaggcctggaatatgaagtactgcagtggtgcatatgtaggctggaggcatggttcgctactgacatggacaatatatctctgaaaacttgggatcaggaacatgtgcttaccggtggacatggtcttatggtgaatggctacgaccctgtcatcagagctctcgctcaaggtctcgatattcacctcaaccacagggtcacaaagatcatacaacgctataacaaggttattgtctgtgtggaagatggggcgagttttgtcgcagacgctgctatagtaaccgtccctctcggggtactcaaggcaaacatcatcaagtttgagcctgagctaccgaaagagaagctctcggcaatcgccgaccttggcgtcggtatcgagaacaagatagctctcaagttcgacactgtgttttggcccgacgttgaagtgataggtagggtggccccgacgtcaaacgcctgtggctactttctcaaccttaacaaagccacaggaaacccggtcctggtgtgcatggtggccggaaggttcgcgtacgagatcgagaagctgtcggacgaagagtccgtgaacttcgtcatgtcccagctcaggaacatgctgccgcaggcaactgacccggttcagtatctggtctcgcgctggggtagtgaccccaactcacttggctcctactcgtgcgacctggtggggaaaccagctgacctgtatgaaaggttctgcgctccggtgggcagcctgttcttcgccggggaggccgcctgcattgaccactccggatcggtgcacggagcttactcgtcaggcatcgctgccgcagaggactgccgaaggcgtctgtcggcgcagctaggcatctcggccggcctgttccaggtcgggaaggctgccatgagggaggagatgacggctgaagccatggtccccttccagatatccaggttgtaagagagaatctattcaacaccgtctttgtgtcaccggtttgttgcttgatgtaattgtaaaatggtgtaagaccttgtttgttggaatattcgatggtggatgctgtttttcgtcaggtaaacgtcagcgtcagctgggccagatgaatgaatattcgcattgcgcgctgaacggattccaatccacgagctctcgctgcactgcagcttgccgaccactccaatccacgagctctcgctgcactgcagcttgccgaccactccactccacgtacacaatgcaaaagcccgagagggaacccttccacaatccacacccgtaccatgaatctaat

SEQ ID NO: 211712 - DNA, 1820 bp, Zea Mays
cgtcgattctgacggcctgaggttgcagctggcacgtatgcgttggttttttcacgcacattgatgggcaaaaccgttctcccccttctgtaattgtcattgggggagggatttcaggcatcgcagctgcacgtgctttgtcgactgcttcatttaaggtcacactcttggagtccagggaccgacctggtggccgtgtgcacactgactattctttcggttgcccaattgacatgggagcatcatggttgcatggtgtttgcaatgagaattctttggcaccactgattaggatgcttgggcttaggttatatcgcacaagcggtgataactctgttctgtatgaccatgatttggaaagttatgctctttttgataagcatggtcagcaagttccccaggagatagtaagcaaagttggagagacatttgagagaattcttaaggagactgtcatagtaagagatgagcatgcaaatgacatgcctctttttcaagccatagcgatcgtgcttgacaggaatccgcatatgaaggcctggaatatgaagtactgcagtggtgcatatgtaggctggaggcatggttcgctactgacatggacaatatatctctgaaaacttgggatcaggaacatgtgcttaccggtggacatggtcttatggtgaatggctacgaccctgtcatcagagctctcgctcaaggtctcgatattcacctcaaccacagggtcacaaagatcatacaacgctataacaaggttattgtctgtgtggaagatggggcgagttttgtcgcagacgctgctatagtaaccgtccctctcggggtactcaaggcaaacatcatcaagtttgagcctgagctaccgaaagagaagctctcggcaatcgccgaccttggcgtcggtatcgagaacaagatagctctcaagttcgacactgtgttttggcccgacgttgaagtgataggtagggtggccccgacgtcaaacgcctgtggctactttctcaaccttaacaaagccacaggaaacccggtcctggtgtgcatggtggccggaaggttcgcgtacgagatcgagaagctgtcggacgaagagtccgtgaacttcgtcatgtcccagctcaggaacatgctgccgcaggcaactgacccggttcagtatctggtctcgcgctggggtagtgaccccaactcacttggctcctactcgtgcgacctggtggggaaaccagctgacctgtatgaaaggttctgcgctccggtgggcagcctgttcttcgccggggaggccgcctgcattgaccactccggatcggtgcacggagcttactcgtcaggcatcgctgccgcagaggactgccgaaggcgtctgtcggcgcagctaggcatctcggccggcctgttccaggtcgggaaggctgccatgagggaggagatgacggctgaagccatggtccccttccagatatccaggttgtaagagagaatctattcaacaccgtctttgtgtcaccggtttgttgcttgatgtaattgtaaaatggtgtaagaccttgtttgttggaatattcgatggtggatgctgtttttcgtcaggtaaacgtcagcgtcagctgggccagatgaatgaatattcgcattgcgcgctgaacggattccaatccacgagctctcgctgcactgcagcttgccgaccactccaatccacgagctctcgctgcactgcagcttgccgaccactccactccacgtacacaatgcaaaagcccgagagggaacccttccacaatccacacccgtaccatgaatctaat

SEQ ID NO: 211713 - DNA, 1488 bp, Zea Mays
ggcgaggcgagccctgggtcaaactaacttcagagaccggctgctggttctccaccaaactaaccaaccatgcgtccgtcgtcgcgttacccgccgcaacccgcgctacctgcccctagccggggagcagctccccgacgccgtggactggcgcgagcgcggcgccgtcgccgaggtgcgtgctgggcgttctcggcggtggcagcggtggaagggatcaacaagatcgtgacaggcagcctcatctcgctgtcggagcaggagcttatcgactgcgataagttccaggaccagggctgcgatggcggcttaatggacaatgctttcgtgttcatgatcaagaacggcgggatcgacaccgaggccgactacccgttcactggccacgacgggacgtgcgatctcaaactgaaaaatacaagggttgtatccatagattcgttcgagcgtgtgcccatcaactacgagagagcgctgcagaaggccgtggcgcaccagcctgttagtgccagcattgaagcatctcggcgcgcgttccagctctacagttctggcatcttcgacgggagatgcgggacgtacctggaccacggtgtgacggtggtggggtacggcagcgagggcggcaaggactactggatcgtgaagaactcgtggggcacccagtggggcgaggccgggtacgtccggatggcgcgcaacgtcagggtgagggccggcaagtgcggcatcgccatggagccgctgtacccggtgaaggagggcccgaacccgccgccgggcccgacgccgccgtcgcccgtgaagccgcctaacgtgtgcaacgcggagtactcgtgcccggaggccaccacctgctgctgcgtctccgagtaccgcggcaaatgcctcgcatacggctgctgcgagctggagaacgccacctgctgcgaggaccactcgtcctgctgcccgcacgactaccccgtctgcagcgtccgggacgggacctgccgtaagagcgccaacagcccgatgatggtgaaggctctgcagcgcaagccggcgatgtatactggcggcggcggcggcggcgagcaaagcgggaggagcagctggtgaggagattgagactgtggtggtgcgtggcgtgtactgttcatcgttcagacagatgacttgctggccatgctgtgggctcaggaactgcttcttcacagtggcgatgttctgatctgtaatgcacgaagcacgatactatttgttgtatatgtatgtatgtgtaactacagataagattaggaacggtgtgaaagaataaagaaaccgatggaataagtgatttgggaacaatctcagaatcaatttatgcagccctttaggataacttcgggaacagtcttgcacaaacaacaaggtaataatgcattcactcgtcgtgttatgtaaaacatgttctccagaacaaagctcagatttgcagtgaatatattcctgaattcaagttcg

SEQ ID NO: 211714 - DNA, 3372 bp, Zea Mays
gacagatcgatccgtccgtcctccgtcgtgttcgttcaggccgagcgagatccactgctgactgctcactgcaccgaaccgagagagcgtggcaggcaggcgggcggccgatcaccgacgccgacgcggcgtccacacgcgccaacggccgaacgcactctctcccacccctccgtcgtgctccacggcccaacccaaccctacgcactcctcccccctccccccccgcagctacatctcccctcccgcttcgccagtcgccaccgcgcggcgggagctcgctgaagagcttcccccctctccccccaggcccgcggcggcgccggctcggcccccgtcatcgcgctatcgtaggctcgcgggctcagctgatctggtcagcgaggcgaggttgccggggggccagattccgctcccgcccgcgcgtggtctggggtgtgggcggtggatcggctgcgcgggtcattagatctatgcccgagatctaaggcgccagcgccaggtgcggaggcggaggccgtgagccggtggcggtcggaggccggggacagggatggcgtggtggtccgggaaggtgtcgctcagcggcctgcaggacatcgccggagccgtcaacaagatcagcgagagcgtgaagaacatcgagaagaacttcgacagcgcgctcggcctagaggagaagcgcgacgatgaagaagcatcaggatcgcggacatccaactctgatggaataggattcttcaatcctgtcatggctttcatgggacacaatggtgaagaagatggcactgaagtatcagaaaagccacaatttccaaaggatctgtcagtagaggaagaaaatcatagcaccccaactaagaaacagacatccgaggtagatcattcagaagtatcagtaacaacatttccagaacagccttcaaaatcagaagaagctcatagtatctccaatgagtcacctgtttctaaggcagatgtttctgagcagtccataacaccacaaactccagcacatccttcagtagcagaagaaaagcttgatggctgcactgaggcacttgcatctaaggtgggtgatgatgaagcatcagaaacatcacaatctccaggacatccttcaacagttgaagaaaaccaggaccatcaatatagtaaacattcttgtcctagtgatgaagcagagccaaatcagcttagagagtctgctggagacttacctgatggtagtgcattttcttcgcctatcaaaatagataaatcaggtgacaccgaaacaggtgaatctattgatacaggaaaggaagacacatctgatgggaatgcctctcagtcacaaccagcagaatccatgctagctagttccgataatataactgaagttgaggacaagattgctcaagaatacaatgtcccaaaagaacttagtagcccacaggagaattgcgatacagtagacaaagttactcgtcttgaagtcaaattacatgatggcaatattgataccaaaaaaagtgaggaagaaagcaataagatggaggcaggggaagtatctgttgttgtacaggaggataatgtaatggagcaacctgaagatttaatgtcaaagtccataactgcagctcatgattcacattcgcagaatgagtcagtggtcagtttgaccgatgtacctgctggactagggggagtaggccccgcagataattttacagaagaagaaaagattgctagaatcacagattttcagattgtggactctgttgtttctgttggtgagctagagaaattaagacgtgaaatgaagatgatggaagctgcattgcaaggtgctgcaagacagtcacagtccaaagctgatgaaattgcaaggttgatgaatgagaatgaacaactaaaatcaacgatcgatgatctcaagagtaagtcttctgaagccgaaatggatgcacttaaagatgaatatcaccaaagagtagcaactcttgaaaggaaggtgtatgcattaaccaaagagcgtgatacactaaggagagaacagaataaaaaaagtgacgcagctgcccttttgaaagaaaaggatgagatcatcaatcaggtcatggctgaaggtgaagaactatccaaaaaacaagctgcccaagaagctacaatacgaaaactgagagcacagattcgtgagtttgaagaagagaaacaacgtctgaactcaaagatccaggttgaggaggctaaggtcgaaagcattaagagagacaagatggcaaccgagaagttgcttcaagaaacaatagaaagaaatcagactgaacttgcagctcagaaggagttctacaccaatgctcttaatgcagctaaagaggctgaggcattggctgaagcaagagtcaacagcgaagccaaagttgaactggagaaccttttaagagaagctggcgaaaaagaaaatatgctgattaagacaatcgaggagttgaggctttctctcacccgacaagaacaagaggctgctttcagggaagaaagactaaaaagggactatgacgatcttcaaaagcggtatcaagctagtgaacttcgttataatgaactggtgacacaagttcccgagtctaccagacccctcctaaggcaaattgaagccatgcaggagacatctgctcaaagggaagaagcttgggctggcgtggagagaaccttaaactctcgccttcaggaagcagaagctaaagctgctgcttcagaagaaaaggagcggtctgtaaatgaacgactgtcgcaaagtttatcccgcataactgttcttgagacccagattacaattcttaggacagagcaaacacagctgagccgatctcttgaaaaggagaggcagagagcatctgaaagtagacaggagtacctagcaattaaagaggaggcagcaatgcaagaagggcgggctaagcagctcgaagaagagataaaggatcttagagttaagcacaaggaggagctgcaagaagcagcagaacacagggaacttcttgagaaggaccttgaaagggaaaaggctgccagggcagaaattgagaaaacatcttcccgtgaagcgcctaaagtcccacttcccgatcagacaagaaatgcccctctcagaaagctgcctagttctggcagtataaatagtctagaagaaagccatttccttcaggcttcgttggatttatctgacaatgcttcattagagaggcgaatgtcttcagaaagtaatatgtcatattatctgaggaccatgactccaagtgcttttgagtcagcacttcgtcaaaaggatggagagcttgcttcttacatgtctcgcttgacatgatttgacaacatttttttggc

SEQ ID NO: 211715 - DNA, 2250 bp, Zea Mays
gccaacatttattcgggtgcgagacccaaactggctcatatggacgaaccagatgggtaatgaatgcgattttcgtcacagtgagggtgctaggatgaaccctagggactgttggtactggttgaatggcagttgtttgaatcccaagtgtgcatttcgccatccgccaattgatggtctctttggtgccccaacttctggactacctccagtttctgcgcactacggtgcctataacttgggcaagcagatggtcccatgctattacttccagaaagggaactgcttgaagggtgatagatgccctttctatcatggaccacaaacagctagtaatgatcttgcagagcaagcggcgaaggtttcttcctttcctttggaaccgtcccaggctcaaaataacgaagaggctgtagctccaaataattcaacgcagcaagaggcccgaatgactgaaaacaggacttcgattcatgtttccaagagtggtgtgggtgcaactcccgctgatgtagcttccaatgcattgaagcctgggaccaacttcgagcaggcacccagtaatacgcttgcagcaaagaaaagttccacaactgaggatcatcctatgcactatcagaaccaggttcctgtggagatcgatcctgtcaaagactggaaccaaaattttgaagtgtctcctactgattacctgccacaggatagtagggaggctgatgatattttgggggagtcctctcctggttttgatgttcttgtagacaatgatgtagatgttgctgaagattttgcaagggatatgtacccggtagaagattacgagtatgttacatctgattttgatgctcgggcccatcatgaaagtgagcagttcaacgatggaatgggtgtgaatggacggattggacagtatgatggctatgagaggaaacgccgtagatcttcatctgagaggaacctagacagacattaccatccagatggaaggtttcttcacagagagcttgatcgtggcgagatagatggatcagatctacgccatcagctccgcaggagaagaataaatgggccctcaacaaccattagcccagaacgggctaatggggaccgacatgggagggatgaaccctacagagaaagggcacatggtggtcaccacacgtacagagatcgctatcagggcccacgaggaagcaatctaagttcccgtctgcaggccagaataaagcttcctcgaagatcacctgatagagttgatactcgcttcgaggatgagcgagacaggagaagattcagggatatgttttctccaatgaggcgtatggatttccatggtggtaggcatcaagaggctggacataatcaagaaaggggccacaggaagttaagcgagcttgtctctactgtcaggcatgcagatggcctctctgctagaagagatgcagtgggttcaactcattttgctgctcgcagaaacttgggagagccaaggaaggcaaatggtcttgtggaatccgaagcatctcttgattttgagggcccaaaaccccttagtgtcatcttacagagaaaaagggaggcagcacagggcaataactatgagaaatttgctgaggttgcagtcacgcagacaggttctctggatgaaactgagaagaaaagctgtgacaacgttaccaggtttgcagattgcaagagtggttcaggtgacgaagagtataaagagcaagatcatatccttgtggatgcacacaggcagtcttcggatcatggtgataagtttgaggctgggtatgctgctgaagtggatgcagaaggaaaacaagaggcagatgactatgaccagagagagggcgagtccgacgactacgagacatttgaaggccatgactacaaatctgaagatgaaaatgtgtaccaagacgacgaggatttcgatgataatgatgactttgctcggaaagtaggggttttattgccttagacgccgcggtgtcattggttctgttgcttgaggcaacgagctctagtttttgccatcggttctgttgcttgaggcaaagctgaaatgccgatcataatcgatttgaggtttacatgtaaactgctgtgtgatgttcagcacatctgacctctccttggactttgttatattagtttccgtactaacagcaggatatattccttaatcaatttgtgcccggaacgaaatataatcaactccacaatgggggggggggcgttttgctt

SEQ ID NO: 211716 - DNA, 826 bp, Zea Mays
atcgagctaggatcgcagcagcaccgaagcatttgccgatcatcagttcttccatccagcatgcaagggatcacgaaggcgctgcggctccacgggaggcagctgaggcacgcggtcctgcagcacatgaacatgaacaaggggatcttctcctgggccaccctgatctcgcgcatacagagcgagtcgccagccgtgatcataccgcacatggggctcgagaacatcaccgtcaacgagattctcagggccaagggggaggccgaggccggagcggtctactggtgcagcaccgcccatctggtgcacgaagcggtgcagcacatggcggcacacaacgttggagctctcgtggttctcaagtcgggggacatgaaccagctcgcaggaattgtgaccgagagagattttgccagaaagatcctcttgccagggcgaccttcacagcaaacaagggtagaggatatcatgacagaagaggacaaggtgatcacggtgtccggtcgtaccaatattctgcgtgcaatggaggttatgacagacaagcgtatcaggcatgttcctgttttcgacgacaaggtagttggaatgatatccatcggtgatgttgttagaacaatcgtggaccagcagcaccaagaagtaaaacagctcaagaagtatatcagaggagactattattagaacactttttaattattattttttacattcggtgtataaacgtaatttggatgtaatcgtttatagatatttaactacaatgtatatttttctctgcgaaaacatggttgatatgtgcccttctgtgtcaagttatgacgag

SEQ ID NO: 211717 - DNA, 386 bp, Zea Mays
gtctagggttttaccctctccaacacgacgaggttttgctccgacaccgacgcgacagccgacaaggcagggggagaggccgagaggggaaatggcatcgttgtcccgcaccgctgctgccgctgtcgtggccctgaggtcggcggtccgctccgcgccccttaccggccgcgtcctcggagcgccactaccttcctttgcctcgccttccgctacccgctccgcccggatcctccgcaggtcggcggccgcggcgtcggcggggctggaaacgctaatgccgctgcacagcgcggtggctgccgcgcggcttaggtcctgcatcgccgtcgactcctcctgctggtgctcgctctcacaaggtttttcgggtttcggataaggtt

SEQ ID NO: 211718 - DNA, 1078 bp, Zea Mays
ccagcgggcggccgcgggtacaagatccccaaagtagcgccgaaccggcgcccccgcgtgcggagcgtgcttgcctcgcactgtcacagtcgtgcactccctgtccccgtggactgtggagagtttctgtcggtggtcgccccgcttcatctgtctcatcttccccagcgcagcccctcccccctgtagcctgtatccgccccccacactctgcgtctgtagtcttctttctcgcgtcggcagtcagcttggcagggccgaaccaatggcggtcgacccgcggcaggtggtggcgggcttcctcaccctctccatgttcgtcatgctcggcaacatgatcaagcacgaccacttctctcccgtcaccgaggagctgggcttcgaggcaacaggtgtggtgtcgaacacaaggaagcttgacaacgatgctgaaatgagcagcgtcgatacggctggagtggaggacctgatggacgctgtcgaggaagttaaaccttgctggaccaaaccaagtccaaagacgtcgtggtacaaaggcctggatgttctgaaggaagaattcccaaacacttggtataagggtgacattatgccagccgagaacaaagctgaattcctgaaatccagcaatgcagacctagcaagggctctggaccttgagatctgttcgcagagcgacgtgttcgtccctgccgtcgctggcctgttctacgggcatgtcacgggtaagaggatcgcgtccggacgcacccagatcgttgtgccttcccagtccagcacctcgacacatgcgtcagacttcatctccacctacatctccaacaagaaccaccttgcctacgcgtgctactgctaagcatccttttgtacggccgttaataagatcagctgaagggaaagtgctctgggtgcatatacaagtacctctcgtggacatgaatgatgttgtacactagctaatgttttgttatgaggaatattagcatacgactgtgtgttggttacttgtttggatattaaactctggaacagcagcaaggagcatatactgcacaataaaatgaaactaattaataaa

SEQ ID NO: 211719 - DNA, 1431 bp, Zea Mays
tcctctgtcttttccaacaataatagtataatacaggcagctcacctccaagataaaatggcctgacgaaatgagcttcagggaaggccgccgccgcctactcctcgtcctcctcttcctggggtgtcgacaagccgcggcacgctcccacggtcggagacgaccaagatttcctcttttccgaggggagcacgagcacgagcaccaacgccgaccccgacctgacgcatttccaagggactcccctctgcaaatagacctgtccaccgcaatcctgacactgtcggagaacggggagctgcagcggatccatgacaagtggctcaagacaggcgactgctcaacggacaatgctgagttcgtggactcgaaccagctccgcctcgagagcttcatgggcctgttcctcatctgcggcgcggcatgcgtcctcgccctgctcatctacctcggcatcacgatacgccagtacctgagacacgaacagccggaaaaagaaagagaggggtggaaatgggatattccattcctggtacccttccaggcttccacctgtgctttctttatggataacgatgatgatgactatgaggcggccgttgtgggcgcgccattccggaccctacactccagctccactctcccatggcttcctccgccctgccttccagaaccttgcaccgccgcgcgctcccctcgtctacgccgtgccaccctgcgacggagaccttcgcccccggcgccgtctcccggcggcgagcagccgtgcggctcctctccgccgggttcctgaccgccgtcgcgccgccgccgtcgctcgccgcgaggaggggacgcgttgtcgtgccaccggaggactacgccactgcacaccaggatccttttcttttactgcaaataatgctggtgcttctaactcgtatgcgtctgcaacgccataccctacctgagtattccctgtgttaactgaccgattgaaattccatttcgagttcccgcgaatgatctgacgtgatgacgttctgaaagcagccgatggtctcaagtactacgatcttgtcgaagggaagggaccaactgctgagaagggctcaaccgtgctggtccacttcgactgcatttaccgtggcatcaccgcggtgtcgagccgtgagtcgaagctcctggcggggaaccggagcatcgcccagtagccttacgagttcatcgttgggtcgctgcctgggaaagaacgcaagcgggatttcgcggacaacgccaacgggctgtactcggcgcaggcggctccgaagcctccggccgccatgtacaccataaccgaggggatgaaggtggggggaaagaggagagtgattgtccctccagagctggggtatgggaagaggggaatgagtgagataccgcctgacgctcctttgaactggacctcga

SEQ ID NO: 211720 - DNA, 3341 bp, Zea Mays
tcctctgtcttttccaacaataatagtataatacaggcagctcacctccaagataaaatggcctgacgaaatgagcttcagggaaggccgccgccgcctactcctcgtcctcctcttcctggggtgtcgacaagccgcggcacgctcccacggtcggagacgaccaagatttcctcttttccgaggggagcacgagcacgagcaccaacgccgaccccgacctgacggctcgcacacacatcgataatttgccaacttctgcataagttcgtagcagcctctgtaacattttggccaaaatgaggatagcttttctcgtgctgttggttctctccctgtttctcctccctaatgggatcggcaaaagcttagccgcaaggccttcggtcgtgaatattgggtcgattcttcggttgaactccaccactggaggtgtttcagatgttgccatccgtgcagcagtggaggatatcaactcagaccccacagttctaaatggaacaacgttacatgttcaaacgagggatacaaactgcgacgacggttttcttggcatggttcaagctttgcagttcatggagactgatgttattgcgatcattgggccacaatgctctcctattgcacatatcatttcgtatgtcgcaaatgagctccaagttcctttgatgtcctttgcatcggatgcaactctgtcatcaatccagttcccgttcttcgtgcggactatgcccagcgatctctaccaaatggcagctgtggcggcagttattgattactaccaatggaagatagtcactgccatatacgttgatgatgattatggccgaaacggcattgctgctttggatgatgaacttactgcaagacgctgcaaaatttcattcaagattgggttccgttccaatgctaaaaaaagtgatcttctgaatctgttggttactgttagtaatatggagtctcgtgttattattctccatactggttcggaacctggactcaagcttctgtcacttgctaatggactaaacatgatgggcaacggctatgtatggattgctactgattggctttctgcttatcttgatgctaattcatcggtatctgctgaaactataaatggcatgcaaggtgttctgactgtacgtccacacacccctaaatcaaaggtgaagagtaatctggtgtccaagtggagcagcttaagcaagaaatacaaccacagcgatctccgcaccagtgcttacggtttttatgtttatgatagtgtgtggactgtagctcgggccctggatgccttctttgatgatggtgggaggatttcctttacaaatgactcaaggctgcgtgacgaaaccgggggaactcttcaccttgaagccatgagtgtttttgacatgggaaacaaattactgaataagattagaaatgtgaacttcactggggtgtctggccaagtgcaatttaatgctcagtttgaactcattcatcctgcctatgatatcataagcataattggcaacggcatgcggaccattggtttttggtcaaactatacaagattgctatcgaccgtccttcctgaagacctatattcgaagcctcctaatacttcgcttgccaaccaacaactctatgatgtcatttggcctggtgagactgcacagaggcctcgaggttgggcttttccttccaatgccaaggagttgaaaattggtgtccctaacagatttagctttaaagactttgttagcaaagataatgctactgggtcaatgaagggctattgcatcgatgtcttcactcaagcattggcattgcttccttatccagttacatacaggtttataccttttggcaatggtactgaaaaccctcattatagccaacttgtgcagatggttgctgacaatcaataggggatatcgtaattacaatgagccgaactaaagctgttgatttcacccagcccttcattgagtcaggcctggttatcttgtctccaataaaaaagcatataacaaattcttgggcattcttgcagccatttacattggggatgtggtgtgttacagggttgtcttttcttgttgtgggtgtggttatttggattcttgagcatcgaataaataatgatttccgcggctcgccgcgacaacaaataataactattgtttggttcagtttttcgactctgttttttgcacatagagaaaacacaatgagtaccttaggacgtggtgttttgctcatatggctatttgttgtattgatcattcaatcaagctacactgcaagtcttacttccatcctaaccgtgcaacagcttgatacatctataagaggacttgatgacctgaaaaatagtgattatcctattggtttccaagttggttcttttgtcgaagaatacatgattaaggaactgaacatctcacagtcgaggctaaaagctcttggttctcctgaagagtatgctgaaaatctcaagctaggtcccaagaaaggaggtgttatggctattgttgatgagcgcccctatgttgagctgtttttgtcaacttactgcaagattgctgttgctggctcagatttcaccagcggtggatggggctttgcatttccaagggactcccctctgcaaatagacctgtccaccgcaatcctgacactgtcggagaacggggagctgcagcggatccatgacaagtggctcaagacaggcgactgctcaacggacaatgctgagttcgtggactcgaaccagctccgcctcgagagcttcatgggcctgttcctcatctgcggcgcggcatgcgtcctcgccctgctcatctacctcggcatcacgatacgccagtacctgagacacgaacagccgggaccagcgatctccgtggacgcagggtcgtcgacgtcgaagcgcagtctccgaaaattcatctctttcgccgatgacaagcagccgccaccgaagaaaaagcgggccatgagcctctcgagaagttcaatgccaacgatgccgatgagtaaccgtcctggggctgatattgatgtagaaagctagtgcttgtgtatacgttttttacctgggatacatcatctttgggccaatctatgcgtccttcatatatattatgtataggaaattagagccaaaggctgtgtagtggattgtatttgttggtttttagcaccccaaccgcccacggttaacaagtcgtccgagtttggcagaactgtcaaattgtatagagtgagtcaagtagtcaacccttgttcacgaaccattgtgaatggaatatatgtttgtttcagttgatttgttctttcagatttct

SEQ ID NO: 211721 - DNA, 1067 bp, Zea Mays
atttatatttgctataaaaaacgaatacatatagaaatcattcgaactgtcaacgaattgaattggccgcgagtttcctacctataaaacgacccggatcccccacccccacatttcctcatcgtcacaacgcgtcctcgaataaaaatccagacgaaacccaaaatccccaccgaacgcaacctaaaatctccccatccctcctcgatccagccccgcggagaagagccatggccgattccgcaaccaacgacgcccccctggtcgccagcaaccagcccacggaggttggtgagtccgttgaggagatagaccgccgcgtccctccagtggtgaaggaagccccaaccttggcccgctcggctgcgaaggaggttcgccaggccggcctggtgggcacggccactggccttgccaagtcagccatcgcccgcgccgagccaaaggcccgggagctctacacccgctacgagcctgtggcagagcggcgtgccgccgaggcctgggtggccctgaaccgtctccctctggtgccctcggtcaccagggccgtcctccccactgccgcacagctctctgccaggtacaattcggcggtgcgtgatggtgccaagcgcgggaacgccgtggccacctatctcccgctggtgcccactgagcggctcgcccgcgtgttcaggtaccccgtggctgacgttgctgcagcaccagagatgcagcccattccttcccagtagaagatgaaatggaatgtgaactgcataaaccaatatcaagaagtattactgtgttttgtctttgcgtaccttatggtgaactcatgcgtggttcagtatcgtttcattcctttttgttgcagtgagcctacacaagttcgtctttgttttatggataatatgtataacattatctattggaatagcaatgttgatgcttgtgctttgtcatcattttgagtacccaacgcgtatgtgcctattggcatttcggctgttgtgttccaagtaaatttaacagaatttaggatgcaaaaaagaagataataaagagatcacaattagtgctct

SEQ ID NO: 211722 - DNA, 3303 bp, Zea Mays
gacaggaaaccgcatctcccgttcccggccgtttattattagctgagctcgtgcctcgtacacgaggccggccctctcgctctcggtgcgtgcgtgggctgaggccgctgagaggcaatacgcggtgcgtggggtgtggggagcgaggcggcggcgacgagggttttgctgctccgcacaccgcgcgcagcggcgacgcgaccgcagctcgtcgccgccccggttcgaggaggaggaggaggagccggctgaggcgcctgtggtggctgctgcggcgggagcgggagcgccatgaggggcggcggcgggaggcagccttcctatgcggcgtcggacggggcggatgcggatgcggcggcggtcccggctgcttccaggaagatggtgcagagcctcaaggggatcctggccgaccgctcggagggcgagatctacgccaccctctgcgactgcggcatggaccccgacatagccgtagagaggctcatctcccaggatacttttcatgaggtgagaagaaagcgggataagaaaaaggagactaaagttaatcaggaaacaaggcctcgtccattccagaaatctatatatggaggatataaggctggttcagatcgaagtgggagagcaaactctataggcggtttcaaaggccctgccaaaaaagaaccagagttacatgcttcaataaactcgtcagccttagatgtcaacacaagtgccacttcagaaacattttctgctactggcaatgttgcccaggctgatgctaagaacactttccagcctccatctcaagtgaaacatggttggggtggtgttccaggtcgcccttccatggctgaaatagtgaagatgggccggcctcaagctaaagttgggagcagatctgttgcaagtagcattgtcatgccagctattggtgattcagccattcccaatacaccaaatcttgcgcccaatgaatacaaccaaactgtatttgcatcagaagtaggccatggtgcagcagataaattgccaaatgttgccgatgaggtgcactctgtatctaaagatgcttcctcacttgatatgttaccttcagcagagggaacagatgttgaagccccttccatgagtgctaacatgcaaggttcatcaacgccagatgccaatgaagatgacgttgaaaaagacacaaatttggaagagggcaatacagaaagcttgacgactcctggacaagtttctgcttctggtaaaggtatacattcagaatatactgaacttgtcagtcatctggatgaaggctcgatggagaaaacagatgactttcagctcgatgctctttcatttgaacacaatctaaatctgaatggagatgtgtctacaacgacaacacaatttgatcatttgactctgcttgatggaccaaaattgtctgatgagaatccggctgtaataatccctggccatcttcaggtttcaaacgctgattgtgcgcacttgacatttggtagttttgtgtatggaacacttgatgcgtccttgacaacaaaacctcttgagagtcatggggatatcgtaacaattcctgacgatgattatgaccaatcagagggcagaatccatgacgatgaaagcaagcaatctgaagtcactagatccaatttcctggatgtcacgagcaatacggaatacaacctatcatcacccccagattatgcaacttcaagtgcagcgctgcaagattctacttcacagagttatctacaggaaaatcgacaattccagagcatttctcctctcccaagcttcatgcaaatacaaaatggtctcatgtcaccagcaattccaccattgcgcgaatttgatccagcattctcactattgctcactaatcctcctattatgcatggtacaacgtcatcatccatgagcagtgcaactgtttctacgcagccccaagagaatgccaatccagttggtttacccaaccctcaattgactcaatctcagccaagcaccagcattgctccagggcctccactccctcagcatcttcttcatccctatgctcaaacaacccttcctcttggatacgcaagcatgattggctatccatctcttccaccaagctatgcatatctcccacctgctgcttttcagcaaccatacatgaacagtggcatgttcctccaccaagcagcagcagcagttcccaactcaagtgtgaaataccctctgccgcagtacaaaagcaacattgcccttgctagcttaccacagccaggctctttgctctcaagctatgtcgggggctttggaactgcaaacaacatgcctggaaatttccctctgaaccaaagtacaacgtcggcaaccgcaactcttgggtttgatggaacggtcccgtcacatttggaagatggaaaccagtttgtttgtcttcagcagaacgagaaccctgcaatgtggatgcatggagctggttcacgagggatgcccccacttgcagccagtaccatgtatggctatcaagggcagagtcatcagaccggccttcggcagggccagctaccttcacaatatggctctgctctagggcagtcacagccgggcctgggccccgaacaccgaaatcctagcgatagtaacctaagtggtgctgctcaggctaaccagatgtggccaaacagctactgatccacccgaccaccccccttatcaacatctgtggaagacggtcttgttgttgtgtgcgcaaacgccagaggccatgcaaatgcctgtggcctgatccaggcacgcggataccagctgcgtgtgcatgagttactgtcgtgacattttgagaggcgcaagagatatatgttggagcatgttccacctgtagggtttgtaggatatggccaaaaatgtagctggatctgttcattcaaattctgatagggaaagggccggtcgtttttcgttctatttcccccctttttttgtcgtttgcatatcttgtgacaataaaaccggaatatctaacacatcagcaccattagttccccgaggggagtgaaagatagtctgttgtctttgcatcaccagtattgcgcctgcctcgcttaaattttatgattgagatggttatttgatggatgagaatttcccaacctgtgccttgtctgatgagatgtatcgttgtatttgaacattgaatgcataaaaaagagagattgcagcacacatttgccagccaaatgttgattattcgctgaagtatgtaaatagctctcattatattgattgatttggtcaaattgtttggtt

SEQ ID NO: 211723 - DNA, 1227 bp, Zea Mays
agaattccactctgttttcggacttaaaaaatttcagatatcgaagactagtgaatacaatcctcttgatctattttctgagtcgaaagaaagaataagcatggccatcaagtcatttttctcaactcctcagaacaacttcaggatttttgtcaatggatctttagcttttggtggcatgggaggtggtgcagatagtgttcatcctgctgacactgataagtgcattaaagatctcagcaaggtcagtggcctggaactccctgacttcactgagctcctgtcagagacaattttcaaatctggggtattgggcaaactgttgaccactcaaaagctggatgatcatgacattgaaggggcaattcatctgtactacaacataatttctcagccttgtttagtctgcaaaaacctaactgatgtagagctattgcggaagtacacactcttgcattctcttccgttggacaagagcttgaagattgtcagaaacttcctcatttctgctactgcaaaggactgtagcctgatgatcagctttcggccaagagagaatggaagtacagattctgagtatgattcagtgtttcttgaatcagcgaagcgaacctatgagtacaagacatatttcgttgatctggatgtgaaacctctggacaagatggtacattattttaaactggatcagaggatagtcaattcctacacaagatatggggaggtcttgccacctccaaagggcaagtaataccaaagacacttcggcgattcagctccaacaatgaggagcctctcttcttactatatacgtctggactatggagaagggtgcatcagagagctccagcccactacgcccttaggttctgtgcatatattgttgtatctcttaactgtttgatgatatggaatattcttttcccaatatggtaccgagcctttcttgagcctcctcctcgctgccgctcttcttcggaatgccgcggcatttgccctcccctcatgtttggcgagccggctgcacgtacagcacgacagtgagtgccagggacatgcacatcatggcgacggtttaagcttgtggacactcagcagatagggtgatgaccgccattccctgtatgacagacacgatgtgcatgcaacatgatcagccattcgatgcatttgatttgatggatccatcgatgttaaccaatcttataatatgctatcctagtccag

SEQ ID NO: 211724 - DNA, 587 bp, Zea Mays
ccactaggttggatatgacacatatgtttccaagggaaggtgcctcatctagctcaacctcaatgagcagccagaggagtgaaactcatgatgataggatgattgcaatggttctctccgaagaatatgccaagttagatggtgctatggccaagcatcttattaatttaacatcaattcctcatgttccccgtattaacacatagtttccaacatatagtgatgccactatggaccattatcgcctccttgataggctaaatgcatacggcttgtttgaggtgagagtatctggtgatggaaattgtcagtttcgtgcattctcagaccaactatatagatcacctgattattacgagcgtgttcgaaaggagattgtaaagcagtttgctgcaaagatatgtctcctaacatcattcagagatacatgttttgttgaaattgttccgcaatatcaagctccacagagagagatttggctgagtttctggtctgaaattcactataactcactgtacgatgctcgagtacagcagttgtggtacaacctgccaagtggtggaaaccctgagtggctgagtgactga

SEQ ID NO: 211725 - DNA, 1153 bp, Zea Mays
tcaccgccctcggcagttgaatagcaagtattgaatggacggctgatccagcggcgcttgatcctatcggacggtcgcgaggatcccaggagccctatatccccatcctcgccccccacctccttcgcttcactcgcgtccgcccccgccgccgcctttcgtcccagcccctaaaccattctccattcctctcctcagtttagcacaatggcactggctaataagcttggtggtctgctcaagaaagccacaagttcaaatccgtctgtctaccaagcaatcagatgcatgtcatccaagctctttgttggagggatttcttatcaaactgatgatcacagtctcagggacgagtttgccaaatatgggcaagtcattgaagctaggattatcattgaccgtgagtctgggaggtctagaggttttggctttgtaacttacacgtcttctgaggaggcttcagctgccattactgccttggatggaaagactctcgatggacggagcatacgggttaatcatgctaacgagaagaccggtggctttcgtggcggcggtggatacggtggcggccactatggtggtggtggtggcagcggtggatacggtggcggcgactatggtggcaactttactgctggaggtagcgacagctttgccaacagtaactttggttctgacagtagttttggtggaaacggtgctggtggctttgatgcaaccggcggttccacaggcgatgatgggttctctggcacacctgatgataactttggtggtaacaagaatgaagaaaccatggatgatatcttcaaggacgatgagccggacagctacgccgacaagaggagctagtttgtgccttctccaaagagtgctcatcaatacgattccagaacgatatgtattggctagtgtttgctgttaacatcatagcggcctgtatgttcaaataatggagcgagtaattctgatgagtttgagttgtcgggggctgtggaactttcaaacatggcgtgcatccacgttataatgtcgttttgctagatgctatgctttcatcgtggcttggaaatcggggtcttgtcaagcttcagctcagacggatctgtaaatggtaccgtaagtcaaattcaaattatgtgcaaaggca

SEQ ID NO: 211726 - DNA, 1099 bp, Zea Mays
tcaccgccctcggcagttgaatagcaagtattgaatggacggctgatccagcggcgcttgatcctatcggacggtcgcgaggatcccaggagccctatatccccatcctcgccccccacctccttcgcttcactcgcgtccgcccccgccgccgcctttcgtcccagcccctaaaccattctccattcctctcctcagtttagcacaatggcactggctaataagcttggtggtctgctcaagaaagccacaagttcaaatccgtctgtctaccaagcaatcagatgcatgtcatccaagctctttgttggagggatttcttatcaaactgatgatcacagtctcagggacgagtttgccaaatatgggcaagtcattgaagctaggattatcattgaccgtgagtctgggaggtctagaggttttggctttgtaacttacacgtcttctgaggaggcttcagctgccattactgccttggatggaaagactctcgatggacggagcatacgggttaatcatgctaacgagaagaccggtggctttcgtggcggcggtggctatggtggcggcaactttactgctggaggtagcgacagctttgccaacagtaactttggttctgacagtagttttggtggaaacggtgctggtggctttgatgcaaccggcggttccacaggcgatgatgggttctctggcacacctgatgataactttggtggtaacaagaatgaagaaaccatggatgatatcttcaaggacgatgagccggacagctacgccgacaagaggagctagtttgtgccttctccaaagagtgctcatcaatacgattccagaacgatatgtattggctagtgtttgctgttaacatcatagcggcctgtatgttcaaataatggagcgagtaattctgatgagtttgagttgtcgggggctgtggaactttcaaacatggcgtgcatccacgttataatgtcgttttgctagatgctatgctttcatcgtggcttggaaatcggggtcttgtcaagcttcagctcagacggatctgtaaatggtaccgtaagtcaaattcaaattatgtgcaaaggca

SEQ ID NO: 211727 - DNA, 1663 bp, Zea Mays
cgatgctctccgtggaggcgcggacggtccgcggcacagggccggacggtccacgagtggctcctcctctgcgtacgtccggacggtctgtgcctgggactcggacggtccgtgatggcgcaaaggatcgtcttcttcgcagcagagacctcgtcggggaggagagatcatatggtgtgtattggcgtcggcaggccatccaagacgtctctagtcgacgtagagctgaagagagctgaagatttgagtttgtaataggcagtggcagtaacatgtctgactttacctatgtggaaaatgtggcccatgccaatatttgtgctgagcaagccttgtcttcaaatgcagcttctgtagctgggaagcccttttttgttaccaatgacgaacctatggaaacatgggagtttatgaattgcatgatggaagccatgggttgtcagaggcccaggattaatcttcctgccaagatgttattgtttgcagccttgttctccaaaatgattcatcacaggcttggttttcaaatgctttccacccctcttcttcatccagatacaatatacttcttgtcgtgtacgagaacctttaacacttcaagagccagaagattacttggataccacccaattgtatcattggaggatggaattatgagaactcttgggtcattttcagaactagcagataatttggggttgtcaagaaaacagggctcctgtggatcctcgaaggcagataagctgctaggaagtggaacagctgctgatattcttctttggagggatgaaaagagaaccttttcatttgtcacagtattgtttctgcttttctactggttcctgctttcagacagaacttttgtttcatcagctgccaaatttcttctagtgctctcgcttgctctctttatccatggtgtgctgccttcagaagtgtttggttttacagtcgagaaggtcacatctgatcattttgaagtatcacactcagcattgaggaattcacttatgtgtgtggcttctgcatggaatgggagttttcataaactaaggcttttagcagaaggtgaagactggagtttacttttgaaggtatttgcatttctgtacagcatcaaactaatgctgaactttcagttcagatttttgatgggacttgtactggcatccttgttcattgtcttcattgtctatgaacaatgcgaggaagaaattgacagtttggtggcaaacgcttctgtcaaagtcaagtggctaacagacagagtagtcagaaatttgccggcctttttgaaggcgtatatagcctagaggagacatctgaaggatgtctcgccaactcgccatggtgctcctatctgtaaaaaaccttagttcttttaagctaacatgtactgtgcgatttacccaaatgtttgactagcacttttatattcttgttcaagtttcaccttttttttaattgagaatcctttcccacccctttttacaactcgtgacttggcatacaactgcctgcgttttatgctcatgcatgggtaccaaactactaagtcaattttctttagctttaaccaaatttatagaaaatatataaatatctataacacgaaataagatttgttagatataccatgaaatatatttttatgtatttattt

SEQ ID NO: 211728 - DNA, 563 bp, Zea Mays
tgcaaatccccctggctccgagtgcataagtaccggcctaagcatgccgtagtcccatctaatcgaaacaaagcgagagatctcaacgccaccgctgcagagcaaaatcggggagagcgaagagagagattgtgagccgcagcgcctgggatcccctcagcgccgtttctccaccctcggtgagcggccgcggtgcttcactgtggtgcggggaggatatccgaggcttcggtatgaagggtgggacatcggtgctggccagattgcttgccggagtcgctgggttgccgcggatccgccctgcgtcaaggatagcagtccctacggcatcatcaccaaagcgaggttgcgagaaacctggatcttgcattggagaagtacttggaatcgcaagtaaaaggtcaacaacaggtaccgctggaggaacatgaaggatgctacgatgagttcggagaggtctaggtcgtcgtctcccagtcaactagggattgtggaggatcgtcgtcgtcatatgatgtatttatttagctattttgtatagaactcctatatataataaagat

SEQ ID NO: 211729 - DNA, 2030 bp, Zea Mays
gggaggggcaacatggtctaaagaaaaccttaacgactctcagtgaggcttaaagccgcgctatgccgtgctggagatcgtcacatgtcacaggaatccggaggtagcttctggggagaagaagatcagatggtcatcaagggctgtgcggtcttttgcgatggcagagctggaggcccggaagatgaggtaccctaccacaggcaccgaggggctcctcatgggcattcttgttgaaggaactagtggcgcagcaaaacttttgcgtgctaatggaaccacacttctcaaagtgcgtgaggaggcagcgaatgttcttgggaaatcagaaatgttttactttagtcccatgcatccaccattgacagaagctgcacaacgagcccttgattgggctgtcaatgaaaaattgaaatcaggtgaggatggagaagtaaccgccaatcatttgctactggggatatggtcagataaagagtcggctggtcataaaatcctgtattcgcttggatttgacgatgagaaagccagtttactggccaaaacggctggtgaagaggctgcaatgagtcttagagagcaaggagagcacctaatttattcgtcaacttaagttggtattgtgcactagcttttatgcacttcttggtgcctcgagacgttgacctggagaggctgcctctacaaactttagaacttattatggagatatgttaggtcagatacgatatttgtactctcacgattgccgatgcctgtgaaaacgttgcgctttgtttgtcacggtgaatgcttgtgttcctttatcagctggatttgggaactgctcgtagaaaacaagtcaacaacaacaaaacttgtagggtccagtgggcctgacgagtccttaaaaaaatttgttcacttgcagcctaaatcctgacagtcgagaatttcatctgaagtcactgatatccgcaaattctgaaggaagctattgggacacattcataggatgcaaatgacataccacatggaagtctttttttaggctagtttgggaacaccattttcccaagggattcttattttctcaagagagttatgtgccatttgtcagggaaaagaatatattactactgccttttctttatcaggctccaggcaggaaaagctgcacgcactttacaccaaacctgcacgaggttgaattctgcttgtttgcccgggcactaataagctgatggagactatcaggcagttcttggacggcgaagcgtcacgctctgacacgaagcatgcacagactgaaagccgacgccacgccatgccggtggcctggcgcagtcctgcgcttaggtttcagctccggagtccccgtcaggtatcaagttcatctgccatcgaaagaacatctcctccttcctattgggtaggaactcggagagatggatggaacgggccgggggcacgcacacgtgcttgccgcatgcttcccgcgcgcgtttgggctagcgtgggaagcaacaggaataatggcaggattactcttgcgtgtcagcaaccgcacagaagcttagctagagccaaatctggtgtcgtcgtttcagcttctgggacatctacgcatcagactcgttgattccagcttccatgctgctgacagtacatgcatgtatatatgcgcctgtaagactgtctccaacagatcgttgcactgtatatagcattgtttgtagaatgaaattttgaataggaggtgagatagaaaatgagatagaaaatgtgttggagatagcataaggagcgctgtagcaggctatgcagcgacatgtactgctgcaggggaagtgtaaaaacttgaagcctcgtgctgaactagtactagtagctgggattaaacaaacctccaattgaatgaacaataacagatgagcaagcaagaattgacgtgcaactccgtgttgacttctttcttgtcatgtaacatgtccaagcgtgtggaggcataatggcagggtatataatataatatataagcaacaggagag

SEQ ID NO: 211730 - DNA, 2391 bp, Zea Mays
cttacggcgcattttttcgttgaggaggatatagataggcctcttctttccgaaaatcgggacgatcactctagacaaagtaattattttcttggaagttctgtaggagaaccttcaaagattcaatcaaataggagtaacatttcgcctagaagtcatgcaattgctgatacagggaggacttatccagatgaatgttgtgctacacaaggagaaactcatgtaatcaatattgaaaatgatacttctgaagagtttcgattaggaagcacgttaagacggacatcaccagcaaaattgacaacacctgctcagaagcacagaagggtttctggagatgactatcataatggaagtgttcctctgaaggatagtacatatctgcagatagtagcctagatttagaggtcatagctggtccatctcatggaataagctgttctcggcagtcaagtaggccttctatgctcccaataactcttggaagggttcccccaagtgatttagtgttaaaggactctgaagtatctgggaaacatgctcagataaactggaatgcaaagacattaaaatgggaacttgtggacatgggcagcttgaatggaactttcttgaactcccaggcagttcatcatccagatgctgagtctaggcattggggtgaacctgctgaacttgcacatggtgatattataactctagggacttcatctaaactatctgttcaaattacactgcaaaatcaacgagttcctgctggtgttggtatggcatccgatccaatggtggcacgtagaagtggaaagaaacttccaatggaagacataagcttttgccagtgtcctctgcagggtgttgaacattttgggctctttggaatttttgatggacatggtggggatggagctgccaaagctgtcagcaagattcttccagaaaatctgggatacatgttatctcatcctgaaacaaaagaacgagtgcagtcatgttctgatgcttctgatgttcttagatatgcttttactttgacagaagatgcaatcgatcatcagtacgagggatgtacaggcacagcacttcttatttggtttgatcaaaataaagattgttttgcccagtgtgctaatcttggtgattctgcttgcgtaatgagtgtcaatggaaagacgatcgatatgactgaagatcaccgggtagctagcgcaactgaaagagctaggatagcaagaactgggcagcccctgaaagatggggaagtccgtcttaatggactgaatcttgcgaggatgtttggagacaagtttcttaaggagcaagactcacgcttcagctcagaaccatatctgagccaagctgttcgtatcaccaaagcgtgcacagcttttgccgttattgctagtgacgggctttgggatgtcatcagcacgaaaagggcggtacagcttgttgttgagggaacggagaggtactctggtgacagcgcctcagcggctaaagtagccaaccgcgtgttggacgaagctaggagcttgcgaaccaaggacaacacatccttaatatttgtagattttgacattctgagaacagatccttgtatcgccaaatgacatgtcagattcaagacacctttccgtgaaccatcttcctggctgcttatatagctccaagttttggtccacccattcagttttttagtgagatgtgatatatatattcagctgtagattggcataggagcagagtccataccatgtaatctggtgcatgcttttagactctagtgcgtgcgcgctgcctgcgtgtgggtgtgtgtgtgagggggattgtcaatgagaaggtcttcatggagaaacttcctggtcaattttcaatagagttagaattttggaacaagagtttcttggccactgaccccctcaatcttgtctgaagaacgtcgggagaaacttggtgctagacccagttgctgccacgtggacagcattgagcctgagtttttgtcaagtctggaatccttttaccgcattggtgaacttcggtgttggatcactcatccattctaaatttgaaactagtttttgttctatgaattcaggaagttttggctcatttttttaccacaaaaaaatatcaacacttgtgccagaagtattcaagggacaatctagatattggcaaccaacgtgcaactgaattcctactccctagataggccttgcagagataagagaagatggggatgtacaagatcgaattagggtttaggttgatgagttacgtctaataataatatattaattccctgagaaactgaggagccgggtggccaaatccatgcaggaaaatttgatgaaagactatgatttaatcgtcgtcatcaggcatggg

SEQ ID NO: 211731 - DNA, 1075 bp, Zea Mays
gatcttttcgttcacatgattcggtggccaatgataatgttggcggtcagagggctgaacagtaaaatgctggagaaaagactgcacggatgcctgctcctgctcgtcttccttctggcagacgtatcaggcagccgtgctgaaactgccgtcgatctgggtccagactcggaggacggcagcaagaggaggtcgctggccaccaccatgttctgtgtggcgaaacagggcgcggacgcgacggcgctgcaggcagggctcaactgggcgtgcgggcagggccgagcgaactgtgcgcccatccagcccggcgggccgtgctacaagcagaacgacctggaggcgctagcgtcctacgcctacaacgactactaccagaagaactttgctaccggcggctcctgcggcttcaacggcacagctacgaccaccaccagtgatcccagctcggggcagtgcgtcttcacaggaagctccatggcaggaggcggcacgccggctgcgagcgcccccagcggcctctccccgccgtcgtcgttcacgccgggcattgggagcccctccaacaccctgatccctctggacggcgccgagagcctggtgtccagcgtctggtcggcgatttgcgccccgctgctggcgttgccgctcttcttcctctgaccaccagcggcggcagatgagtggccggtgcttgctagtagagcgcttattatgtttttttgttcttgttcctgggtagatcgctctcgtgtggcggtgttgatgtacatgtcagagtcgtgttggatgcgctgggatgggagattacataagatgctacagagatctattcatacgtagaaagtggaccggactccaccgtgtttccgtgtgttctggtctcagatctgttcgtggcagaaaccagatgtaaatgtatcatgttcactactctctgtgcacagaccaagggaagctgcagtccactgaccacacacacaccacgctaggattcagactcagaggcttcgtctctgtccgatgccgtcgcgcccagcgtcggcgtggccctggacgctgctgccttctcccg

SEQ ID NO: 211732 - DNA, 1577 bp, Zea Mays
ttccccactgttttataggcagctggtgctcctccgaaagcgaagtccagcgccccccgctcccccgttcgcgcaaagacgccaaacccacccaccgaaatctctccccgaacttacccctcgccggcgccggcgatgtgcccgacgaagcccggtcgccctgcccaggcggccgccggctccggcgagaagagctggcgggagcaggccgtggccgccagctcgctgcggccggtcgacctggaccggggcaccaacggctgggcctcgccgccgggggacctcttccacctgcgcgcgcgcggctacttctcctgcggcggcgggaagcgcggcaaggcgccgtccgccgcggagtggctgctccgccccgccggcgtcgactggctccgctctcacgcgcgcctcgaccacgtgctcgcccgccatgacaaccgcgtcgccgccgcattccgccgcgcgcgcctcaggaacgaccccaccgcgcacttcctcctcgccgtcaatctccaggtgccgggccggccggacgcgtacagcgcggtgttctacttcgcggcggaggcacccatcgcgccggactcgctgctcgggcgcttcgtccagggcgacgacgcgtaccgcaacgcgcgcttcaagatcgccaaccgcatcgtcaacggcccctggctcttgcgcgccaccgtcggcaactacgcggcctgcctgctcgggcgcgcgctcacgtgccgctaccacaggggcgtcgactacctggagatcgacgtggacatcggcagctcggcgatcgccagcgccatcctgcacctcgcgctcggcgccgtcacgtcggtcaccatcgacatggggttcctcgtcgagtcccagtccgaggaggagctgcccgagaggctgttcggcgccgtgcgcatcgcgcggatggagatgggcgcggccaggtacgtggagctgcctcctaatgaggccatgcctgagacggtctgcagcggcagggccggggccggtttcagggtaagctccgggaaggtggtcaaccatagccgccaacaagaccgtgccggcggtaaggtgggcaggtcgatgagttgcccggagcgagagcgcggagggaaataggcctccttttttccagagaaataggtgcaaagtacgcgggtgcagtgcagaaagaaaccatccaccggtgggagcgagagcggtggcgagaaaaggccgggtaacccgacacataaggcgctcaagctggtgccattaccacgaatggcacacctcgttcacgaagtactcgtcgaccccggcttggcttgagcagctcagctgcagccatccacatacatgagggcatgtatagctctaagacggtggttcggttttctaaatataaaagacagttaagaaactgatataactacgagactttacactataaatataattaagaaataatattaattctaagactctagaccataaatatagttagaaaccaatatatatggagatggaatatgtatggagatgggctgctcaggaagggctcgtgctcgtgtcttgtatttttttttcagttatcccag

SEQ ID NO: 211733 - DNA, 5459 bp, Zea Mays
catcgactacggatccgcctgctccttcagaacagagatctgtactcgagaaggttgcttcgcagcagactgctgaaggccggtggtcaggcggccggacgcagggtggggcgtgggggacagggagggtctccggccaggcaaattcggctcagggtggcagccaaacaagcccctgatgccggagcagtctagatccggcgccccgatggagtggacgacggtgcagcacctggatctccgccactccggcggccgccgcggtgcctcggcccgccctatgcagccgcacgccgctgccttccgctcctcccaggccatcgtcgctgtggccatcggcacccacgtcgtcgagttcgatgctctgtcgggaagcaagatagcttctattgaccttggtgcccgtgttgttcgtatggcatatagccctacaactagtcatgttgtcattgctattcttgaggatgctacaatcagatcctgtgatttcgccacggagcagacacttgtgctgcattcgcctgagaaaaaaacagatcatgtttcaatagatactgaagtccatcttgcattgacacctcttgagcctattgtattttttggtttccacaaaagaatgagtgtaacagttgtagggactgttgatggagggagaccgccaacaaaaataaagactgatcttaaaaaacccattgttaacctggcttgccatccccgcctccctgtcttgtatgtagcttatgctgaaggcttgatacgcgcctacaatatccagacatatgctgtacactataccttacaacttgctgttgacagtacaattaagctaattggagctggtgcttttgggtttcacccgaccctagagtggatatttgttggtgatagaggtggtactctcctggcatgggatgtatcaactgagaggccaagtatgattggcattacacaggctggttcccatcctatcacatctgtatcctggcttcctacactgcggctgcttgttactatttcaaaggatggagcactccaagtgtggaagacacgagttataataaaccctaacagacaaccaatggaaactcatttctttgagcgtgcagctgttgaaacaatggatatcacaaaaatactaactcttcaaggtggagaagcagtgtacccattaccccgaattaaaaatttggcagtgcatcccaaattcaatttggctgcagtaatttttgcggatatgtctgggacagaagctgcaaagaacaaagctgcatacacaagagaagggaggagacaactttttgctcttcttcagggagctaggggatcaactgctgctgttttaaaggagaaactattagccttgggatcatctggaatattagcagagcatcaacttcaggcacaactacaagagcagcacttgaagggagccagctgactatttcagatgttgcaaggaaggcattccttcacagtcatttcatggaagggcatgctcaaagcggtccaatccctcgcctacctcttgttacaatttcagattctagcaaccttttgcgagatgttcctgtttgtcagccattccatctagagctgaatttcttcaacaaggaaacccgtgttgttcagtatccagttagagctttctatttggatggatttaacctgatggcccataacttatcatctggggctgacaatctctataagaagctttactcaacgattccttcgaatgtggaatgccatcccacgaatatgtcatacagcccaaaacagcatttatttcttgtcgtgtttgaattaagtggtacaaatggagtggtacatgaagttgttctttactgggagcagactgatctacagacagtgaacagcaaaggaagttccataagaggtcgagatgctgcttttttgggcccagatgataatcaatatgctattctggaggaagatagaactggtctgaatctctttagtctcaaagctgtagctacaaaggaagctcttgaaaataatgctgctgtgcttgaagaaaacacttttgctgataatgctgctagtgctacctcaacggaacgtcaaggtcctctacagtttacttttgaatcagaggttgatcgcatattttcttctcctctagaatcaaccttgttgtatgttatttctggaaagcatattggacttgcgaagcttctgcagggatataggctgtctgcagacaacgggctatccattacaacaaaaactgatgggaagaagtttattaagttgaaaccaaatgagactgttcttcaggcccactggcaaacaaccctaagaggtcctgtggtaggaatattgacaaatcagagggtgctaattgcttctgctgatcttgatatactatcaagcagctcaacaaagtttgatcgtggtctcccatcatatcggtcaatgttgtgggttggaccagcacttatcttctcaagcgcaactgcaataagtatgcttgggtgggacaacaaagtccgatcaatcctctccactagcttccctcgctcagtattacttggtgcattgaatgaccgcctactgcttgtaaatccgacggatataaacccaagacagaaaaagggagtggaaataagggcctgtttagttgggcttcttgaacctcttctcattggatttgctaccatgcagcaacacttcgagcaaaaacttgatctttcagaagtcctgtaccaaataacctcgaggtttgatagtttacggatcactccaaggtcattggacatattaactaaaggacctcctgtttgtggagaccttgctgtatcattatctcaagcaggacctcagtttacccaaatcatgcgctgcaattatgcaatcaaagctctccggttctctactgcgctgtcaattttgaaagatgagttcctgcgctccagagattatcctcaatgccctcccacttctcatctgttccagcgtttccgagaattgggatatgcatgtataaagtatggtcagtttgacagtgcaaaagaaacttttgaggttattacagatcacgagagcatgctggatctatttatttgtcacctgaacccaagtgcattgcgacgccttgcacaaaagttagaggaatctgctacagattctgagctgaggcgataccttgagagaatattaagagttcgttcgactggatggacacagggtgtattcgccaattttgctgctgaaagtatggttcctaaaggccctgaatgggcaggaggaaactgggagatcaaaacacctaccaacattaagaatatacctcagtgggagcttgcaggagaagtcatgccttatatgaagacaactgatgctggtatcccatctgttgttgcagatcatattggtgtgtacctgggtgtgatgaaaggaaggggtaatgttgtggaagtaagtgaaaagagtttggttaaagctatagctgcagctagcagtgagaacacacagccggtgtcttctgcatcagcagagaaaagtaaggcaattcctcgtggtgattcggttggtgatactttggcaaggcaactgggagtccagattgcatcttctgatgaacaggcaaaagctgccgaggacttcaagaagactttatatggtgttgttgatgatggaagtagtgatgaagacgagtcaacctcaaagactaaaaagatacatataaggatacgtgataaaccggctgcacctactgtagatgtcaacaaattgaaagaagccactaaacagctaggcttgggtcctccgctgagtaggacaaggtcattatcagggacacctcaagacttcaatcaggctcctacacaaccaggaggtccagccgcagctgtttccccagcaatgccaaattctgcgattgatttatttggaacaaatactttagtgcagccgcaagcaccctctagttccacaggtcctgttattgcaggcatgggagtgacggctgggccgatccctgaggacttcttccagaacactattccatcgcatcaacttgcggctcaactacctcctcctggaatagtcctgtcacggatggctcaacccgctcctggcattgaacaaggccgaccagtacctaatcaaatgatggctaatgttggtcttccagatgatggggtgccaccacaagcaccaccgcagcagtcccagtttcctccgcagcagtcccagtttcctcagcaaccaggcattcctatggattctattggcctgcctgatggtggtgtccccccacagagtcagccacttccttcacaaggccagtttcttccttcacaggcacagggctttcaacttggtattcctgctccatcacaaccaattgatctcagcgctctcgagggtcctggagcggcgaagcaagctgctcgccctccagcacctactgctgtgcggcctggccaggtaccacgcggggcccctgctgcagaatgctacaagatggctcttgctcatcttgagcagaatcagcttaccgatgcactatcttgtttggacgaagcattcttagcccttgcaaaggaccagtcacgtgaagccgacatcaaagcgcaggccaccatttgtgctcagtacaagatcgcagttgctctgctgcaggaaattgctcgtctgcaaagggttcaaggagctggtgctctcagtgcgaaggaggaaatggccaggctatctcggcaccttgcttccctgcccatccaggccaagcacaggatcaactgcatcaggaccgccatcaagcggaacatggaggtccagaactacgcctacgccaagcagatgctggacctcctctactccaaggcgcccccgacgaagcaggacgagctcaagagcctgatcgacatgtgcgtccagaggggcctgacgaacaaatccatcgacccgttcgaggacccctcgcagttctgctccgtgaccctcagccggctgtcgaccatcggccacgacgtgtgcgacctctgcggcgccaagttctcggcgctctccgcacccggttgcgtcatctgtggcatggggagcatcaagagatccgacgccctcgctggtgggcctggacccgtgccgtcacctttcggctgaaggtcgagtctgctcctttcgtcctccatcggtcctgatattgtatctatagtgttcagtttgcgttcattacattcgattcgttgcagcttgtattgtatgtagcctttttgacgtgtagcacgcttggtgttgagagcaatgtacacctgtactgttgggttggttgtgattatacacgcggttttttttggagctagcaatgtaaggtgcatgtgcatatctgagacgcgaacgtcgacgtgaaacgttctagtctccatagttggtaaatacagttactgcagaaactcgcatctatacgataataacagtgatagagagacctaagg

SEQ ID NO: 211734 - DNA, 5439 bp, Zea Mays
ctgctccttcagaacagagatctgtactcgagaaggttgcttcgcagcagactgctgaaggccggtggtcaggcggccggacgcagggtggggcgtgggggacagggagggtctccggccaggcaaattcggctcagggtggcagccaaacaagcccctgatgccggagcagtctagatccggcgccccgatggagtggacgacggtgcagcacctggatctccgccactccggcggccgccgcggtgcctcggcccgccctatgcagccgcacgccgctgccttccgctcctcccaggccatcgtcgctgtggccatcggcacccacgtcgtcgagttcgatgctctgtcgggaagcaagatagcttctattgaccttggtgcccgtgttgttcgtatggcatatagccctacaactagtcatgttgtcattgctattcttgaggatgctacaatcagatcctgtgatttcgccacggagcagacacttgtgctgcattcgcctgagaaaaaaacagatcatgtttcaatagatactgaagtccatcttgcattgacacctcttgagcctattgtattttttggtttccacaaaagaatgagtgtaacagggactgttgatggagggagaccgccaacaaaaataaagactgatcttaaaaaacccattgttaacctggcttgccatccccgcctccctgtcttgtatgtagcttatgctgaaggcttgatacgcgcctacaatatccagacatatgctgtacactataccttacaacttgctgttgacagtacaattaagctaattggagctggtgcttttgggtttcacccgaccctagagtggatatttgttggtgatagaggtggtactctcctggcatgggatgtatcaactgagaggccaagtatgattggcattacacaggctggttcccatcctatcacatctgtatcctggcttcctacactgcggctgcttgttactatttcaaaggatggagcactccaagtgtggaagacacgagttataataaaccctaacagacaaccaatggaaactcatttctttgagcgtgcagctgttgaaacaatggatatcacaaaaatactaactcttcaaggtggagaagcagtgtacccattaccccgaattaaaaatttggcagtgcatcccaaattcaatttggctgcagtaatttttgcggatatgtctgggacagaagctgcaaagaacaaagctgcatacacaagagaagggaggagacaactttttgctcttcttcagggagctaggggatcaactgctgctgttttaaaggagaaactattagccttgggatcatctggaatattagcagagcatcaacttcaggcacaactacaagagcagcacttgaagggccagagccagctgactatttcagatgttgcaaggaaggcattccttcacagtcatttcatggaagggcatgctcaaagcggtccaatccctcgcctacctcttgttacaatttcagattctagcaaccttttgcgagatgttcctgtttgtcagccattccatctagagctgaatttcttcaacaaggaaacccgtgttgttcagtatccagttagagctttctatttggatggatttaacctgatggcccataacttatcatctggggctgacaatctctataagaagctttactcaacgattccttcgaatgtggaatgccatcccacgaatatgtcatacagcccaaaacagcatttatttcttgtcgtgtttgaattaagtggtacaaatggagtggtacatgaagttgttctttactgggagcagactgatctacagacagtgaacagcaaaggaagttccataagaggtcgagatgctgcttttttgggcccagatgataatcaatatgctattctggaggaagatagaactggtctgaatctctttagtctcaaagctgtagctacaaaggaagctcttgaaaataatgctgctgtgcttgaagaaaacacttttgctgataatgctgctagtgctacctcaacggaacgtcaaggtcctctacagtttacttttgaatcagaggttgatcgcatattttcttctcctctagaatcaaccttgttgtatgttatttctggaaagcatattggacttgcgaagcttctgcagggatataggctgtctgcagacaacgggctatccattacaacaaaaactgatgggaagaagtttattaagttgaaaccaaatgagactgttcttcaggcccactggcaaacaaccctaagaggtcctgtggtaggaatattgacaaatcagagggtgctaattgcttctgctgatcttgatatactatcaagcagctcaacaaagtttgatcgtggtctcccatcatatcggtcaatgttgtgggttggaccagcacttatcttctcaagcgcaactgcaataagtatgcttgggtgggacaacaaagtccgatcaatcctctccactagcttccctcgctcagtattacttggtgcattgaatgaccgcctactgcttgtaaatccgacggatataaacccaagacagaaaaagggagtggaaataagggcctgtttagttgggcttcttgaacctcttctcattggatttgctaccatgcagcaacacttcgagcaaaaacttgatctttcagaagtcctgtaccaaataacctcgaggtttgatagtttacggatcactccaaggtcattggacatattaactaaaggacctcctgtttgtggagaccttgctgtatcattatctcaagcaggacctcagtttacccaaatcatgcgctgcaattatgcaatcaaagctctccggttctctactgcgctgtcaattttgaaagatgagttcctgcgctccagagattatcctcaatgccctcccacttctcatctgttccagcgtttccgagaattgggatatgcatgtataaagtatggtcagtttgacagtgcaaaagaaacttttgaggttattacagatcacgagagcatgctggatctatttatttgtcacctgaacccaagtgcattgcgacgccttgcacaaaagttagaggaatctgctacagattctgagctgaggcgataccttgagagaatattaagagttcgttcgactggatggacacagggtgtattcgccaattttgctgctgaaagtatggttcctaaaggccctgaatgggcaggaggaaactgggagatcaaaacacctaccaacattaagaatatacctcagtgggagcttgcaggagaagtcatgccttatatgaagacaactgatgctggtatcccatctgttgttgcagatcatattggtgtgtacctgggtgtgatgaaaggaaggggtaatgttgtggaagtaagtgaaaagagtttggttaaagctatagctgcagctagcagtgagaacacacagccggtgtcttctgcatcagcagagaaaagtaaggcaattcctcgtggtgattcggttggtgatactttggcaaggcaactgggagtccagattgcatcttctgatgaacaggcaaaagctgccgaggacttcaagaagactttatatggtgttgttgatgatggaagtagtgatgaagacgagtcaacctcaaagactaaaaagatacatataaggatacgtgataaaccggctgcacctactgtagatgtcaacaaattgaaagaagccactaaacagctaggcttgggtcctccgctgagtaggacaaggtcattatcagggacacctcaagacttcaatcaggctcctacacaaccaggaggtccagccgcagctgtttccccagcaatgccaaattctgcgattgatttatttggaacaaatactttagtgcagccgcaagcaccctctagttccacaggtcctgttattgcaggcatgggagtgacggctgggccgatccctgaggacttcttccagaacactattccatcgcatcaacttgcggctcaactacctcctcctggaatagtcctgtcacggatggctcaacccgctcctggcattgaacaaggccgaccagtacctaatcaaatgatggctaatgttggtcttccagatgatggggtgccaccacaagcaccaccgcagcagtcccagtttcctccgcagcagtcccagtttcctcagcaaccaggcattcctatggattctattggcctgcctgatggtggtgtccccccacagagtcagccacttccttcacaaggccagtttcttccttcacaggcacagggctttcaacttggtattcctgctccatcacaaccaattgatctcagcgctctcgagggtcctggagcggcgaagcaagctgctcgccctccagcacctactgctgtgcggcctggccaggtaccacgcggggcccctgctgcagaatgctacaagatggctcttgctcatcttgagcagaatcagcttaccgatgcactatcttgtttggacgaagcattcttagcccttgcaaaggaccagtcacgtgaagccgacatcaaagcgcaggccaccatttgtgctcagtacaagatcgcagttgctctgctgcaggaaattgctcgtctgcaaagggttcaaggagctggtgctctcagtgcgaaggaggaaatggccaggctatctcggcaccttgcttccctgcccatccaggccaagcacaggatcaactgcatcaggaccgccatcaagcggaacatggaggtccagaactacgcctacgccaagcagatgctggacctcctctactccaaggcgcccccgacgaagcaggacgagctcaagagcctgatcgacatgtgcgtccagaggggcctgacgaacaaatccatcgacccgttcgaggacccctcgcagttctgctccgtgaccctcagccggctgtcgaccatcggccacgacgtgtgcgacctctgcggcgccaagttctcggcgctctccgcacccggttgcgtcatctgtggcatggggagcatcaagagatccgacgccctcgctggtgggcctggacccgtgccgtcacctttcggctgaaggtcgagtctgctcctttcgtcctccatcggtcctgatattgtatctatagtgttcagtttgcgttcattacattcgattcgttgcagcttgtattgtatgtagcctttttgacgtgtagcacgcttggtgttgagagcaatgtacacctgtactgttgggttggttgtgattatacacgcggttttttttggagctagcaatgtaaggtgcatgtgcatatctgagacgcgaacgtcgacgtgaaacgttctagtctccatagttggtaaatacagttactgcagaaactcgcatctatacgataataacagtgatagagagacctaagg

SEQ ID NO: 211735 - DNA, 4119 bp, Zea Mays
ctcagtgctgcagaaaacaaataaattaggaatgcttgacaatgaggccttccaaagaatcttgtgcatactttagtgctgccatcctgccatgtcacccgtgttgccacattcaagcacaggctttcctaatgtgcatttcatggaagggcatgctcaaagcggtccaatccctcgcctacctcttgttacaatttcagattctagcaaccttttgcgagatgttcctgtttgtcagccattccatctagagctgaatttcttcaacaaggaaacccgtgttgttcagtatccagttagagctttctatttggatggatttaacctgatggcccataacttatcatctggggctgacaatctctataagaagctttactcaacgattccttcgaatgtggaatgccatcccacgaatatgtcatacagcccaaaacagcatttatttcttgtcgtgtttgaattaagtggtacaaatggagtggtacatgaagttgttctttactgggagcagactgatctacagacagtgaacagcaaaggaagttccataagaggtcgagatgctgcttttttgggcccagatgataatcaatatgctattctggaggaagatagaactggtctgaatctctttagtctcaaagctgtagctacaaaggaagctcttgaaaataatgctgctgtgcttgaagaaaacacttttgctgataatgctgctagtgctacctcaacggaacgtcaaggtcctctacagtttacttttgaatcagaggttgatcgcatattttcttctcctctagaatcaaccttgttgtatgttatttctggaaagcatattggacttgcgaagcttctgcagggatataggctgtctgcagacaacgggctatccattacaacaaaaactgatgggaagaagtttattaagttgaaaccaaatgagactgttcttcaggcccactggcaaacaaccctaagaggtcctgtggtaggaatattgacaaatcagagggtgctaattgcttctgctgatcttgatatactatcaagcagctcaacaaagtttgatcgtggtctcccatcatatcggtcaatgttgtgggttggaccagcacttatcttctcaagcgcaactgcaataagtatgcttgggtgggacaacaaagtccgatcaatcctctccactagcttccctcgctcagtattacttggtgcattgaatgaccgcctactgcttgtaaatccgacggatataaacccaagacagaaaaagggagtggaaataagggcctgtttagttgggcttcttgaacctcttctcattggatttgctaccatgcagcaacacttcgagcaaaaacttgatctttcagaagtcctgtaccaaataacctcgaggtttgatagtttacggatcactccaaggtcattggacatattaactaaaggacctcctgtttgtggagaccttgctgtatcattatctcaagcaggacctcagtttacccaaatcatgcgctgcaattatgcaatcaaagctctccggttctctactgcgctgtcaattttgaaagatgagttcctgcgctccagagattatcctcaatgccctcccacttctcatctgttccagcgtttccgagaattgggatatgcatgtataaagtatggtcagtttgacagtgcaaaagaaacttttgaggttattacagatcacgagagcatgctggatctatttatttgtcacctgaacccaagtgcattgcgacgccttgcacaaaagttagaggaatctgctacagattctgagctgaggcgataccttgagagaatattaagagttcgttcgactggatggacacagggtgtattcgccaattttgctgctgaaagtatggttcctaaaggccctgaatgggcaggaggaaactgggagatcaaaacacctaccaacattaagaatatacctcagtgggagcttgcaggagaagtcatgccttatatgaagacaactgatgctggtatcccatctgttgttgcagatcatattggtgtgtacctgggtgtgatgaaaggaaggggtaatgttgtggaagtaagtgaaaagagtttggttaaagctatagctgcagctagcagtgagaacacacagccggtgtcttctgcatcagcagagaaaagtaaggcaattcctcgtggtgattcggttggtgatactttggcaaggcaactgggagtccagattgcatcttctgatgaacaggcaaaagctgccgaggacttcaagaagactttatatggtgttgttgatgatggaagtagtgatgaagacgagtcaacctcaaagactaaaaagatacatataaggatacgtgataaaccggctgcacctactgtagatgtcaacaaattgaaagaagccactaaacagctaggcttgggtcctccgctgagtaggacaaggtcattatcagggacacctcaagacttcaatcaggctcctacacaaccaggaggtccagccgcagctgtttccccagcaatgccaaattctgcgattgatttatttggaacaaatactttagtgcagccgcaagcaccctctagttccacaggtcctgttattgcaggcatgggagtgacggctgggccgatccctgaggacttcttccagaacactattccatcgcatcaacttgcggctcaactacctcctcctggaatagtcctgtcacggatggctcaacccgctcctggcattgaacaaggccgaccagtacctaatcaaatgatggctaatgttggtcttccagatgatggggtgccaccacaagcaccaccgcagcagtcccagtttcctccgcagcagtcccagtttcctcagcaaccaggcattcctatggattctattggcctgcctgatggtggtgtccccccacagagtcagccacttccttcacaaggccagtttcttccttcacaggcacagggctttcaacttggtattcctgctccatcacaaccaattgatctcagcgctctcgagggtcctggagcggcgaagcaagctgctcgccctccagcacctactgctgtgcggcctggccaggtaccacgcggggcccctgctgcagaatgctacaagatggctcttgctcatcttgagcagaatcagcttaccgatgcactatcttgtttggacgaagcattcttagcccttgcaaaggaccagtcacgtgaagccgacatcaaagcgcaggccaccatttgtgctcagtacaagatcgcagttgctctgctgcaggaaattgctcgtctgcaaagggttcaaggagctggtgctctcagtgcgaaggaggaaatggccaggctatctcggcaccttgcttccctgcccatccaggccaagcacaggatcaactgcatcaggaccgccatcaagcggaacatggaggtccagaactacgcctacgccaagcagatgctggacctcctctactccaaggcgcccccgacgaagcaggacgagctcaagagcctgatcgacatgtgcgtccagaggggcctgacgaacaaatccatcgacccgttcgaggacccctcgcagttctgctccgtgaccctcagccggctgtcgaccatcggccacgacgtgtgcgacctctgcggcgccaagttctcggcgctctccgcacccggttgcgtcatctgtggcatggggagcatcaagagatccgacgccctcgctggtgggcctggacccgtgccgtcacctttcggctgaaggtcgagtctgctcctttcgtcctccatcggtcctgatattgtatctatagtgttcagtttgcgttcattacattcgattcgttgcagcttgtattgtatgtagcctttttgacgtgtagcacgcttggtgttgagagcaatgtacacctgtactgttgggttggttgtgattatacacgcggttttttttggagctagcaatgtaaggtgcatgtgcatatctgagacgcgaacgtcgacgtgaaacgttctagtctccatagttggtaaatacagttactgcagaaactcgcatctatacgataataacagtgatagagagacctaagg

SEQ ID NO: 211736 - DNA, 2328 bp, Zea Mays
atctgttttggtgccccttggtttgcctgcttctggtgttctttatgggtatcgcattaatggtcctcaagggtggcaacaaggtcatagatttgatgacagcgttattcttctggacccctatgcaaaattagtttatggtcgaaagcactttgctgttgaaaaagagaagccaagccagcttttcggaacatatgatttcgatagctcaccttttgactggggtgacaattataagcttcctaatttgcctgagacagatcttgttatatatgaaatgaatgtccgtgccttcactgccgacgagtcaagcaggcttgctccagctattcgtggaagttaccttggtgtcattgataaaattcctcatttgctggaacttggcgttaatgcagtggaactacttcctgtttttgagttcgatgagctggagttgaagaggttccctaacccaagggaccacatggtaaatacatggggatattctacaatcaacttttttgcgcccatgagtcgttatgctagtgctggtggtggacctgtggctgcttccaaagagctcaaacagatggtcaaggcatttcataattctggaattgaggtctattacatgttagatctcaacaacagtgcacagctgctgaacttctcgggttgcgggaatacactaaactgcaaccatcctgttgtcaaggagcttgtacttgacagtttaagacattgggttaaggagtatcacatagatggatttcggtttgaccttgcgagtgttctttgtcgtggaccagatggcagtcctcttgatgcacctccacttattaaggaaattgccaaagactctgtattgtctagatgtaagatcattgctgaaccttgggactgtggtggcctttatctagtagggaggttccctaattgggacaggtgggctgaatggaacgggaagtacagagatgatattcgaagatttattaagggagatcctggtatgaagggggtgtttgcaactcgcgtttctggttctgcagatctctaccaggtgaacaatcggaagccttaccatagtgtgaactttgtaattgctcatgatggatttactttatgtgaccttgtttcatataactccaagcacaatgatgcaaatggagaaggtggtcgtgatgggtgcaatgacaactacagctggaactgtggcattgaaggagaaacaaatgatttgaatgtgctaagtcttcgttcaaggcaaatgaagaacttccatgtggcattaatgatttcccagggtactccaatgatgctgatgggagatgaatatggtcacacacgttatggaaacaacaatagctatggacatgatactcacataaataattttcagtggggccagttggaagaaaggaaggatggccatttcaggtttttctcagagatgatcaagtttcggcataaccatcctatattgagacgagacaggtttctcaacaaaaatgatgtcacttggcatgaaaatcgttgggagaaccaggacagcaaatttttggcatttacgatacatgatcacagttctggtggagacatctatttggcattcaatgctcatgagtattttgtggatgctgtaattcccccaccaccacaccataaatcttggagtcgtgtggtggataccaacctggaatcaccaaaggatattgtcccagaaggggtgccattcacaggttcagggtacaggattgctccctactcttccatcttgcttaaggcaaagccttagaatggcggaggcaagtcattctcaagtaagcacgaataatggtgttgtgatccctaactttccaagctcttagccaactgtactgcaagtatagcaaactttggtatgtgaagtcggaccaacccttgcggaaatcaacggaagccatggtttgctaaaggtatactcatggagaattggagatatggcaaacacatacgcaagtaacctccacacatctaagcaagaagagcctttcattaggggatgcatggctcgaggaaactatatttgcatttggttgattcatttttatttgttgcacatgtcagtatgtcacctgtgtgtgtcaagctcttatttgcttaaaaattggacattcctttgttacatatttgtgttgtactgtgttggagctagcgttcctggtatattgcacgggggtgggaggacgggggacgctttgtcgccgtggtcttaggctaccagcaatggttttctctatatttctgctcctgtatcacttttttgcgtcacattatcaatatttcatcctctacttttttctatctcta

SEQ ID NO: 211737 - DNA, 2733 bp, Zea Mays
ggtgtctcgatttttggtacagggatttgatgccttgcggagtaccacgacgaaagttcagagcgggaaggcggggaggagtgtgaccaaggaaatgggacacacttcatctggcaatgaagtgcccttgaaatattcttcaggcaaagccttccccctaggagtgtcacaagttgacgatgggttaaattttgcaatattctcacaacatgcttcttctgtcaccctttgcttgaattttcctgagagaggcaaccaagatgatgtggacattgtagagtttgctttagaccgccagaagaacaaaactggagatatatggcatgtgtcagtggagggtttgcctgcttctggtgttctttatgggtatcgcattaatggtcctcaagggtggcaacaaggtcatagatttgatgacagcgttattcttctggacccctatgcaaaattagtttatggtcgaaagcactttgctgttgaaaaagagaagccaagccagcttttcggaacatatgatttcgatagctcaccttttgactggggtgacaattataagcttcctaatttgcctgagacagatcttgttatatatgaaatgaatgtccgtgccttcactgccgacgagtcaagcaggcttgctccagctattcgtggaagttaccttggtgtcattgataaaattcctcatttgctggaacttggcgttaatgcagtggaactacttcctgtttttgagttcgatgagctggagttgaagaggttccctaacccaagggaccacatggtaaatacatggggatattctacaatcaacttttttgcgcccatgagtcgttatgctagtgctggtggtggacctgtggctgcttccaaagagctcaaacagatggtcaaggcatttcataattctggaattgaggttattttggatgtagtttacaaccatacaaatgaagctgatgatgttaacccttacatgacttcctttcgtggtattgataacaaggtctattacatgttagatctcaacaacagtgcacagctgctgaacttctcgggttgcgggaatacactaaactgcaaccatcctgttgtcaaggagcttgtacttgacagtttaagacattgggttaaggagtatcacatagatggatttcggtttgaccttgcgagtgttctttgtcgtggaccagatggcagtcctcttgatgcacctccacttattaaggaaattgccaaagactctgtattgtctagatgtaagatcattgctgaaccttgggactgtggtggcctttatctagtagggaggttccctaattgggacaggtgggctgaatggaacgggaagtacagagatgatattcgaagatttattaagggagatcctggtatgaagggggtgtttgcaactcgcgtttctggttctgcagatctctaccaggtgaacaatcggaagccttaccatagtgtgaactttgtaattgctcatgatggatttactttatgtgaccttgtttcatataactccaagcacaatgatgcaaatggagaaggtggtcgtgatgggtgcaatgacaactacagctggaactgtggcattgaaggagaaacaaatgatttgaatgtgctaagtcttcgttcaaggcaaatgaagaacttccatgtggcattaatgatttcccagggtactccaatgatgctgatgggagatgaatatggtcacacacgttatggaaacaacaatagctatggacatgatactcacataaataattttcagtggggccagttggaagaaaggaaggatggccatttcaggtttttctcagagatgatcaagtttcggcataaccatcctatattgagacgagacaggtttctcaacaaaaatgatgtcacttggcatgaaaatcgttgggagaaccaggacagcaaatttttggcatttacgatacatgatcacagttctggtggagacatctatttggcattcaatgctcatgagtattttgtggatgctgtaattcccccaccaccacaccataaatcttggagtcgtgtggtggataccaacctggaatcaccaaaggatattgtcccagaaggggtgccattcacaggttcagggtacaggattgctccctactcttccatcttgcttaaggcaaagccttagaatggcggaggcaagtcattctcaagtaagcacgaataatggtgttgtgatccctaactttccaagctcttagccaactgtactgcaagtatagcaaactttggtatgtgaagtcggaccaacccttgcggaaatcaacggaagccatggtttgctaaaggtatactcatggagaattggagatatggcaaacacatacgcaagtaacctccacacatctaagcaagaagagcctttcattaggggatgcatggctcgaggaaactatatttgcatttggttgattcatttttatttgttgcacatgtcagtatgtcacctgtgtgtgtcaagctcttatttgcttaaaaattggacattcctttgttacatatttgtgttgtactgtgttggagctagcgttcctggtatattgcacgggggtgggaggacgggggacgctttgtcgccgtggtcttaggctaccagcaatggttttctctatatttctgctcctgtatcacttttttgcgtcacattatcaatatttcatcctctacttttttctatctcta

SEQ ID NO: 211738 - DNA, 2964 bp, Zea Mays
caactccaactccgcgcatggacaaccacgtgtcccggaggcctggagtccccgtccgtcccttccgcgcgcgctccccaagcgtccgatcacactcctcggtcccacgcttggatggattccgtcggtacaaatcggcccccgctgcgccccgttgccgccgcagctactcgacgcagcgcgctcctgcgcccccctagccacctcgggctcggcaatcgttttgcggagactaagcttgggatcgcgtcagggtgtggaggaggaggagggtattttggaaaggtacagggatttgatgccttgcggagtaccacgacgaaagttcagagcgggaaggcggggaggagtgtgaccaaggaaatgggacacacttcatctggcaatgaagtgcccttgaaatattcttcaggcaaagccttccccctaggagtgtcacaagttgacgatgggttaaattttgcaatattctcacaacatgcttcttctgtcaccctttgcttgaattttcctgagagaggcaaccaagatgatgtggacattgtagagtttgctttagaccgccagaagaacaaaactggagatatatggcatgtgtcagtggagggtttgcctgcttctggtgttctttatgggtatcgcattaatggtcctcaagggtggcaacaaggtcatagatttgatgacagcgttattcttctggacccctatgcaaaattagtttatggtcgaaagcactttgctgttgaaaaagagaagccaagccagcttttcggaacatatgatttcgatagctcaccttttgactggggtgacaattataagcttcctaatttgcctgagatcttgttatatatgaaatgaatgtccgtgccttcactgccgacgagtcaagcaggcttgctccagctattcgtggaagttaccttggtgtcattgataaatggaactacttcctgtttttgagttcgatgagctggagttgaagaggttccctaacccaagggaccacatggtaaatacatggggatattctacaatcaacttttttgcgcccatgagtcgttatgctagtgctggtggtggacctgtggctgcttccaaagagctcaaacagatggtcaaggcatttcataattctggaattgaggttattttggatgtagtttacaaccatacaaatgaagctgatgatgttaacccttacatgacttcctttcgtggtattgataacaaggtctattacatgttagatctcaacaacagtgcacagctgctgaacttctcgggttgcgggaatacactaaactgcaaccatcctgttgtcaaggagcttgtacttgacagtttaagacattgggttaaggagtatcacatagatggatttcggtttgaccttgcgagtgttctttgtcgtggaccagatggcagtcctcttgatgcacctccacttattaaggaaattgccaaagactctgtattgtctagatgtaagatcattgctgaaccttgggactgtggtggcctttatctagtagggaggttccctaattgggacaggtgggctgaatggaacgggaagtacagagatgatattcgaagatttattaagggagatcctggtatgaagggggtgtttgcaactcgcgtttctggttctgcagatctctaccaggtgaacaatcggaagccttaccatagtgtgaactttgtaattgctcatgatggatttactttatgtgaccttgtttcatataactccaagcacaatgatgcaaatggagaaggtggtcgtgatgggtgcaatgacaactacagctggaactgtggcattgaaggagaaacaaatgatttgaatgtgctaagtcttcgttcaaggcaaatgaagaacttccatgtggcattaatgatttcccagggtactccaatgatgctgatgggagatgaatatggtcacacacgttatggaaacaacaatagctatggacatgatactcacataaataattttcagtggggccagttggaagaaaggaaggatggccatttcaggtttttctcagagatgatcaagtttcggcataaccatcctatattgagacgagacaggtttctcaacaaaaatgatgtcacttggcatgaaaatcgttgggagaaccaggacagcaaatttttggcatttacgatacatgatcacagttctggtggagacatctatttggcattcaatgctcatgagtattttgtggatgctgtaattcccccaccaccacaccataaatcttggagtcgtgtggtggataccaacctggaatcaccaaaggatattgtcccagaaggggtgccattcacaggttcagggtacaggattgctccctactcttccatcttgcttaaggcaaagccttagaatggcggaggcaagtcattctcaagtaagcacgaataatggtgttgtgatccctaactttccaagctcttagccaactgtactgcaagtatagcaaactttggtatgtgaagtcggaccaacccttgcggaaatcaacggaagccatggtttgctaaaggtatactcatggagaattggagatatggcaaacacatacgcaagtaacctccacacatctaagcaagaagagcctttcattaggggatgcatggctcgaggaaactatatttgcatttggttgattcatttttatttgttgcacatgtcagtatgtcacctgtgtgtgtcaagctcttatttgcttaaaaattggacattcctttgttacatatttgtgttgtactgtgttggagctagcgttcctggtatattgcacgggggtgggaggacgggggacgctttgtcgccgtggtcttaggctaccagcaatggttttctctatatttctgctcctgtatcacttttttgcgtcacattatcaatatttcatcctctacttttttctatctcta

SEQ ID NO: 211739 - DNA, 2822 bp, Zea Mays
tccaactccaactccgcgcatggacaaccacgtgtcccggaggcctggagtccccgtccgtcccttccgcgcgcgctccccaaggtgagatcagcatctccgtctcttccccgccgctcctcactcccctaccgccacccctaaaactagccccattcccttaccagcgtccgatcacactcctcggtcccacgcttggatggattccgtcggtacaaatcggcccccgctgcgccccgttgccgccgcagctactcgacgcagcgcgctcctgcgcccccctagccacctcgggctcggcaatcgttttgcggagactaagcttgggatcgcgtcagggtgtggaggaggaggagggtattttggaaaggtacagggatttgatgccttgcggagtaccacgacgaaagttcagagcgggaaggcggggaggagtgtgaccaaggaaatgggacacacttcatctggcaatgaagtgcccttgaaatattcttcaggcaaagccttccccctaggagtgtcacaagttgacgatgggttaaattttgcaatattctcacaacatgcttcttctgtcaccctttgcttgaattttcctgagagaggcaaccaagatgatgtggacattgtagagtttgctttagaccgccagaagaacaaaactggagatatatggcatgtgtcagtggagggtttgcctgcttctggtgttctttatgggtatcgcattaatggtcctcaagggtggcaacaaggtcatagatttgatgacagcgttattcttctggacccctatgcaaaattagtttatggtcgaaagcactttgctgttgaaaaagagaagccaagccagcttttcggaacatatgatttcgatagctcaccttttgactggggtgacaattataagcttcctaatttgcctgagacagatcttgttatatatgaaatgaatgtccgtgccttcactgccgacgagtcaagcaggcttgctccagctattcgtggaagttaccttggtgtcattgataaaattcctcatttgctggaacttggcgttaatgcagtggaactacttcctgtttttgagttcgatgagctggagttgaagaggttccctaacccaagggaccacatggtaaatacatggggatattctacaatcaacttttttgcgcccatgagtcgttatgctagtgctggtggtggacctgtggctgcttccaaagagctcaaacagatggtcaaggcatttcataattctggaattgaggttattttggatgtagtttacaaccatacaaatgaagctgatgatgttaacccttacatgacttcctttcgtggtattgataacaaggtctattacatgttagatctcaacaacagtgcacagctgctgaacttctcgggttgcggtgggctgaatggaacgggaagtacagagatgatattcgaagatttattaagggagatcctggtatgaagggggtgtttgcaactcgcgtttctggttctgcagatctctaccaggtgaacaatcggaagccttaccatagtgtgaactttgtaattgctcatgatggatttactttatgtgaccttgtttcatataactccaagcacaatgatgcaaatggagaaggtggtcgtgatgggtgcaatgacaactacagctggaactgtggcattgaaggagaaacaaatgatttgaatgtgctaagtcttcgttcaaggcaaatgaagaacttccatgtggcattaatgatttcccagggtactccaatgatgctgatgggagatgaatatggtcacacacgttatggaaacaacaatagctatggacatgatactcacataaataattttcagtggggccagttggaagaaaggaaggatggccatttcaggtttttctcagagatgatcaagtttcggcataaccatcctatattgagacgagacaggtttctcaacaaaaatgatgtcacttggcatgaaaatcgttgggagaaccaggacagcaaatttttggcatttacgatacatgatcacagttctggtggagacatctatttggcattcaatgctcatgagtattttgtggatgctgtaattcccccaccaccacaccataaatcttggagtcgtgtggtggataccaacctggaatcaccaaaggatattgtcccagaaggggtgccattcacaggttcagggtacaggattgctccctactcttccatcttgcttaaggcaaagccttagaatggcggaggcaagtcattctcaagtaagcacgaataatggtgttgtgatccctaactttccaagctcttagccaactgtactgcaagtatagcaaactttggtatgtgaagtcggaccaacccttgcggaaatcaacggaagccatggtttgctaaaggtatactcatggagaattggagatatggcaaacacatacgcaagtaacctccacacatctaagcaagaagagcctttcattaggggatgcatggctcgaggaaactatatttgcatttggttgattcatttttatttgttgcacatgtcagtatgtcacctgtgtgtgtcaagctcttatttgcttaaaaattggacattcctttgttacatatttgtgttgtactgtgttggagctagcgttcctggtatattgcacgggggtgggaggacgggggacgctttgtcgccgtggtcttaggctaccagcaatggttttctctatatttctgctcctgtatcacttttttgcgtcacattatcaatatttcatcctctacttttttctatctcta

SEQ ID NO: 211740 - DNA, 3009 bp, Zea Mays
cgagtctgctccaactccaactccgcgcatggacaaccacgtgtcccggaggcctggagtccccgtccgtcccttccgcgcgcgctccccaagcgtccgatcacactcctcggtcccacgcttggatggattccgtcggtacaaatcggcccccgctgcgccccgttgccgccgcagctactcgacgcagcgcgctcctgcgcccccctagccacctcgggctcggcaatcgttttgcggagactaagcttgggatcgcgtcagggtgtggaggaggaggagggtattttggaaaggtacagggatttgatgccttgcggagtaccacgacgaaagttcagagcgggaaggcggggaggagtgtgaccaaggaaatgggacacacttcatctggcaatgaagtgcccttgaaatattcttcaggcaaagccttccccctaggagtgtcacaagttgacgatgggttaaattttgcaatattctcacaacatgcttcttctgtcaccctttgcttgaattttcctgagagaggcaaccaagatgatgtggacattgtagagtttgctttagaccgccagaagaacaaaactggagatatatggcatgtgtcagtggagggtttgcctgcttctggtgttctttatgggtatcgcattaatggtcctcaagggtggcaacaaggtcatagatttgatgacagcgttattcttctggacccctatgcaaaattagtttatggtcgaaagcactttgctgttgaaaaagagaagccaagccagcttttcggaacatatgatttcgatagctcaccttttgactggggtgacaattataagcttcctaatttgcctgagatcttgttatatatgaaatgaatgtccgtgccttcactgccgacgagtcaagcaggcttgctccagctattcgtggaagttaccttggtgtcattgataaaattcctcatttgctggaacttggcgttaatgcagtggaactacttcctgtttttgagttcgatgagctggagttgaagaggttccctaacccaagggaccacatggtaaatacatggggatattctacaatcaacttttttgcgcccatgagtcgttatgctagtgctggtggtggacctgtggctgcttccaaagagctcaaacagatggtcaaggcatttcataattctggaattgaggttattttggatgtagtttacaaccatacaaatgaagctgatgatgttaacccttacatgacttcctttcgtggtattgataacaaggtctattacatgttagatctcaacaacagtgcacagctgctgaacttctcgggttgcgggaatacactaaactgcaaccatcctgttgtcaaggagcttgtacttgacagtttaagacattgggttaaggagtatcacatagatggatttcggtttgaccttgcgagtgttctttgtcgtggaccagatggcagtcctcttgatgcacctccacttattaaggaaattgccaaagactctgtattgtctagatgtaagatcattgctgaaccttgggactgtggtggcctttatctagtagggaggttccctaattgggacaggtgggctgaatggaacgggaagtacagagatgatattcgaagatttattaagggagatcctggtatgaagggggtgtttgcaactcgcgtttctggttctgcagatctctaccaggtgaacaatcggaagccttaccatagtgtgaactttgtaattgctcatgatggatttactttatgtgaccttgtttcatataactccaagcacaatgatgcaaatggagaaggtggtcgtgatgggtgcaatgacaactacagctggaactgtggcattgaaggagaaacaaatgatttgaatgtgctaagtcttcgttcaaggcaaatgaagaacttccatgtggcattaatgatttcccagggtactccaatgatgctgatgggagatgaatatggtcacacacgttatggaaacaacaatagctatggacatgatactcacataaataattttcagtggggccagttggaagaaaggaaggatggccatttcaggtttttctcagagatgatcaagtttcggcataaccatcctatattgagacgagacaggtttctcaacaaaaatgatgtcacttggcatgaaaatcgttgggagaaccaggacagcaaatttttggcatttacgatacatgatcacagttctggtggagacatctatttggcattcaatgctcatgagtattttgtggatgctgtaattcccccaccaccacaccataaatcttggagtcgtgtggtggataccaacctggaatcaccaaaggatattgtcccagaaggggtgccattcacaggttcagggtacaggattgctccctactcttccatcttgcttaaggcaaagccttagaatggcggaggcaagtcattctcaagtaagcacgaataatggtgttgtgatccctaactttccaagctcttagccaactgtactgcaagtatagcaaactttggtatgtgaagtcggaccaacccttgcggaaatcaacggaagccatggtttgctaaaggtatactcatggagaattggagatatggcaaacacatacgcaagtaacctccacacatctaagcaagaagagcctttcattaggggatgcatggctcgaggaaactatatttgcatttggttgattcatttttatttgttgcacatgtcagtatgtcacctgtgtgtgtcaagctcttatttgcttaaaaattggacattcctttgttacatatttgtgttgtactgtgttggagctagcgttcctggtatattgcacgggggtgggaggacgggggacgctttgtcgccgtggtcttaggctaccagcaatggttttctctatatttctgctcctgtatcacttttttgcgtcacattatcaatatttcatcctctacttttttctatctcta

SEQ ID NO: 211741 - DNA, 3051 bp, Zea Mays
cgcccatcttgctatcctcccgagcggccgagtctgctccaactccaactccgcgcatggacaaccacgtgtcccggaggcctggagtccccgtccgtcccttccgcgcgcgctccccaagcgtccgatcacactcctcggtcccacgcttggatggattccgtcggtacaaatcggcccccgctgcgccccgttgccgccgcagctactcgacgcagcgcgctcctgcgcccccctagccacctcgggctcggcaatcgttttgcggagactaagcttgggatcgcgtcagggtgtggaggaggaggagggtattttggaaaggtacagggatttgatgccttgcggagtaccacgacgaaagttcagagcgggaaggcggggaggagtgtgaccaaggaaatgggacacacttcatctggcaatgaagtgcccttgaaatattcttcaggcaaagccttccccctaggagtgtcacaagttgacgatgggttaaattttgcaatattctcacaacatgcttcttctgtcaccctttgcttgaattttcctgagagaggcaaccaagatgatgtggacattgtagagtttgctttagaccgccagaagaacaaaactggagatatatggcatgtgtcagtggagggtttgcctgcttctggtgttctttatgggtatcgcattaatggtcctcaagggtggcaacaaggtcatagatttgatgacagcgttattcttctggacccctatgcaaaattagtttatggtcgaaagcactttgctgttgaaaaagagaagccaagccagcttttcggaacatatgatttcgatagctcaccttttgactggggtgacaattataagcttcctaatttgcctgagatcttgttatatatgaaatgaatgtccgtgccttcactgccgacgagtcaagcaggcttgctccagctattcgtggaagttaccttggtgtcattgataaatgctggtttcgtagattcctcatttgctggaacttggcgttaatgcagtggaactacttcctgtttttgagttcgatgagctggagttgaagaggttccctaacccaagggaccacatggtaaatacatggggatattctacaatcaacttttttgcgcccatgagtcgttatgctagtgctggtggtggacctgtggctgcttccaaagagctcaaacagatggtcaaggcatttcataattctggaattgaggttattttggatgtagtttacaaccatacaaatgaagctgatgatgttaacccttacatgacttcctttcgtggtattgataacaaggtctattacatgttagatctcaacaacagtgcacagctgctgaacttctcgggttgcgggaatacactaaactgcaaccatcctgttgtcaaggagcttgtacttgacagtttaagacattgggttaaggagtatcacatagatggatttcggtttgaccttgcgagtgttctttgtcgtggaccagatggcagtcctcttgatgcacctccacttattaaggaaattgccaaagactctgtattgtctagatgtaagatcattgctgaaccttgggactgtggtggcctttatctagtagggaggttccctaattgggacaggtgggctgaatggaacgggaagtacagagatgatattcgaagatttattaagggagatcctggtatgaagggggtgtttgcaactcgcgtttctggttctgcagatctctaccaggtgaacaatcggaagccttaccatagtgtgaactttgtaattgctcatgatggatttactttatgtgaccttgtttcatataactccaagcacaatgatgcaaatggagaaggtggtcgtgatgggtgcaatgacaactacagctggaactgtggcattgaaggagaaacaaatgatttgaatgtgctaagtcttcgttcaaggcaaatgaagaacttccatgtggcattaatgatttcccagggtactccaatgatgctgatgggagatgaatatggtcacacacgttatggaaacaacaatagctatggacatgatactcacataaataattttcagtggggccagttggaagaaaggaaggatggccatttcaggtttttctcagagatgatcaagtttcggcataaccatcctatattgagacgagacaggtttctcaacaaaaatgatgtcacttggcatgaaaatcgttgggagaaccaggacagcaaatttttggcatttacgatacatgatcacagttctggtggagacatctatttggcattcaatgctcatgagtattttgtggatgctgtaattcccccaccaccacaccataaatcttggagtcgtgtggtggataccaacctggaatcaccaaaggatattgtcccagaaggggtgccattcacaggttcagggtacaggattgctccctactcttccatcttgcttaaggcaaagccttagaatggcggaggcaagtcattctcaagtaagcacgaataatggtgttgtgatccctaactttccaagctcttagccaactgtactgcaagtatagcaaactttggtatgtgaagtcggaccaacccttgcggaaatcaacggaagccatggtttgctaaaggtatactcatggagaattggagatatggcaaacacatacgcaagtaacctccacacatctaagcaagaagagcctttcattaggggatgcatggctcgaggaaactatatttgcatttggttgattcatttttatttgttgcacatgtcagtatgtcacctgtgtgtgtcaagctcttatttgcttaaaaattggacattcctttgttacatatttgtgttgtactgtgttggagctagcgttcctggtatattgcacgggggtgggaggacgggggacgctttgtcgccgtggtcttaggctaccagcaatggttttctctatatttctgctcctgtatcacttttttgcgtcacattatcaatatttcatcctctacttttttctatctcta

SEQ ID NO: 211742 - DNA, 3007 bp, Zea Mays
cgcccatcttgctatcctcccgagcggccgagtctgctccaactccaactccgcgcatggacaaccacgtgtcccggaggcctggagtccccgtccgtcccttccgcgcgcgctccccaagcgtccgatcacactcctcggtcccacgcttggatggattccgtcggtacaaatcggcccccgctgcgccccgttgccgccgcagctactcgacgcagcgcgctcctgcgcccccctagccacctcgggctcggcaatcgttttgcggagactaagcttgggatcgcgtcagggtgtggaggaggaggagggtattttggaaaggtacagggatttgatgccttgcggagtaccacgacgaaagttcagagcgggaaggcggggaggagtgtgaccaaggaaatgggacacacttcatctggcaatgaagtgcccttgaaatattcttcaggcaaagccttccccctaggagtgtcacaagttgacgatgggttaaattttgcaatattctcacaacatgcttcttctgtcaccctttgcttgaattttcctgagagaggcaaccaagatgatgtggacattgtagagtttgctttagaccgccagaagaacaaaactggagatatatggcatgtgtcagtggagggtttgcctgcttctggtgttctttatgggtatcgcattaatggtcctcaagggtggcaacaaggtcatagatttgatgacagcgttattcttctggacccctatgcaaaattagtttatggtcgaaagcactttgctgttgaaaaagagaagccaagccagcttttcggaacatatgatttcgatagctcaccttttgactggggtgacaattataagcttcctaatttgcctgagacagatcttgttatatatgaaatgaatgtccgtgccttcactgccgacgagtcaagcaggcttgctccagctattcgtggaagttaccttggtgtcattgataaatggaactacttcctgtttttgagttcgatgagctggagttgaagaggttccctaacccaagggaccacatggtaaatacatggggatattctacaatcaacttttttgcgcccatgagtcgttatgctagtgctggtggtggacctgtggctgcttccaaagagctcaaacagatggtcaaggcatttcataattctggaattgaggttattttggatgtagtttacaaccatacaaatgaagctgatgatgttaacccttacatgacttcctttcgtggtattgataacaaggtctattacatgttagatctcaacaacagtgcacagctgctgaacttctcgggttgcgggaatacactaaactgcaaccatcctgttgtcaaggagcttgtacttgacagtttaagacattgggttaaggagtatcacatagatggatttcggtttgaccttgcgagtgttctttgtcgtggaccagatggcagtcctcttgatgcacctccacttattaaggaaattgccaaagactctgtattgtctagatgtaagatcattgctgaaccttgggactgtggtggcctttatctagtagggaggttccctaattgggacaggtgggctgaatggaacgggaagtacagagatgatattcgaagatttattaagggagatcctggtatgaagggggtgtttgcaactcgcgtttctggttctgcagatctctaccaggtgaacaatcggaagccttaccatagtgtgaactttgtaattgctcatgatggatttactttatgtgaccttgtttcatataactccaagcacaatgatgcaaatggagaaggtggtcgtgatgggtgcaatgacaactacagctggaactgtggcattgaaggagaaacaaatgatttgaatgtgctaagtcttcgttcaaggcaaatgaagaacttccatgtggcattaatgatttcccagggtactccaatgatgctgatgggagatgaatatggtcacacacgttatggaaacaacaatagctatggacatgatactcacataaataattttcagtggggccagttggaagaaaggaaggatggccatttcaggtttttctcagagatgatcaagtttcggcataaccatcctatattgagacgagacaggtttctcaacaaaaatgatgtcacttggcatgaaaatcgttgggagaaccaggacagcaaatttttggcatttacgatacatgatcacagttctggtggagacatctatttggcattcaatgctcatgagtattttgtggatgctgtaattcccccaccaccacaccataaatcttggagtcgtgtggtggataccaacctggaatcaccaaaggatattgtcccagaaggggtgccattcacaggttcagggtacaggattgctccctactcttccatcttgcttaaggcaaagccttagaatggcggaggcaagtcattctcaagtaagcacgaataatggtgttgtgatccctaactttccaagctcttagccaactgtactgcaagtatagcaaactttggtatgtgaagtcggaccaacccttgcggaaatcaacggaagccatggtttgctaaaggtatactcatggagaattggagatatggcaaacacatacgcaagtaacctccacacatctaagcaagaagagcctttcattaggggatgcatggctcgaggaaactatatttgcatttggttgattcatttttatttgttgcacatgtcagtatgtcacctgtgtgtgtcaagctcttatttgcttaaaaattggacattcctttgttacatatttgtgttgtactgtgttggagctagcgttcctggtatattgcacgggggtgggaggacgggggacgctttgtcgccgtggtcttaggctaccagcaatggttttctctatatttctgctcctgtatcacttttttgcgtcacattatcaatatttcatcctctacttttttctatctcta

SEQ ID NO: 211743 - DNA, 2150 bp, Zea Mays
ttgacacaatccattattccttccccttcgcttcgtttattccccacttccacacggccacaccgccacagccgccgccgccggacggcgctgtccttccctgggaggcgctccactaggctcggctcagctcacgcgcggcggcggtgtccgtggctgctgggcttgcgcgcgcacctgattccgtgctgggcttcgcgagcggctcgggcggctagcgggcgggccgcttggtgctcgtcagcgcgtgaggcggagattacccggcgccgatctggtgctcttgccgcccggagaggtggtgccgggggccattgccgggttctgattaggaggaggcggaggaggtaagtccctagtcttatggggctcgcgccgccggagctggggcagttcgacgggtgggagagctccggggaggagagggagcgctggggctggtgccgccgcagccgccgcggcagcagtaggcgccgcgcggaccccaagggcgccgacgacgacaccgccgtctccaccggttgctgcatccgcctctggcccgtcggaacatgcccgccgccgccgccgccgccgccgccgaggtccaaggtcgacacctccaccagcagcgccagcacgcacggcgcagaaaagtcaacagaaaatggtagcaggaatcaaccggtcgcattggtagtctcaggcctgaaagtctccttggagaagggggttttggatgtgtttttaaagggtggatcgaagagaacggaactgcacccgtgaaacctggtacaggtctcacggttgctgtcaagacactaaaccatgacgggcttcaagggcataaagaatgggtggctgaagttgattttcttggaaatcttcaccatcccaatttggtcaagttgattggatattgtgttgaagatgaccaaaggttgctggtgtatgaattcatgcctcgtggcagtttggataaccatctttttagaaggtctcttcctctcccatgggctatcagaatgaaggttgcactgggagcagcaaagggtctggctttccttcatgaagaagcagaaagtccagtcatttatcgtgattttaaaacatctaatatactactggatgcggagtataatgcaaaactctccgattttgggcttgcaaaagacggacctgtaggtgataaaactcatgtctctactcgagtaatgggaacctatggatatgcagcaccagaatatgtcatgactggtcatctgacatcaaagagcgatgtctacagcttcggggtcgtgcttcttgagatgatgtcggggcgcaggtcaatggacaagaatcggcccaacggggagcacaacctggtggaatgggcacggcccctcctaggggagaggcagcggttctacaagctggttgaccctcggctggagggcaacttctctgtgaagggcgcgcagaaggcggcgcagctagcgcgcgcctgcctcagccgggaccccaaggcgcggcccctgatgagccaggtggtggaggtcctcaggccgctgcagaacctgagggacatggcgagcgcctcctacttctaccagacgatgcacgccgagcgcatggcgcactcgagcagcatgaacggcaggagcagccacggccacggctcctccaaggcacagagcccgttcgggcggaacgggcagcagcagcccgtgcggagcctctcggacgggccccgcgcctccccgttccgctactcgccgaagccgaacgtgaaatgatgaggcacctggtccgggccgtgggcgtcgaagtcgaaccccattcgttgatgtgtgttgtgtacttgtgtagattgacatatgcacaaaggaaaagatgtaggcgaaagaggaggtgtaggttgaatgaatgctgatggatcgttgctatatatttttgcccccaaacaaggcaggtttaggtgtttttagccttgcaatgtgcggtgcctcgtgaatcttgatgctagatgtcgtgttaggtctggtgaagagaaagtgcttcggtacctgcctttcgaagcaaacggaagaggcgcaattaatcacgtttgcatctaaactgctctttttcttcgctttaaccaagttttaacattaaatttcacgtgttttgaccgattccacccccaa

SEQ ID NO: 211744 - DNA, 2210 bp, Zea Mays
acaagcaaattgattttcccgagccgctgccgaaaaattgccgctgcggcgctgccaccatcccacttctccgcgccgcctccagatcgagcgcgttattaggttttctctgtccctcacccgccgccgcagaacgctgatggcccagcgctggcgctccagggcgcggtgggactcagacctggacgaagatggttccccgccttttcggcagccgcgcaggggcgggagcgacgaggaggacgacgaggtggggaacgaggacctcagcctggagatcatcgcgcgcgcgcagcggaagcggcgttgggcgtcctgcggtggagtcaccgggttcgccaacctgctctcggtgtcctccggcgacgacgaggacgccgtggtggagctcgctgaggcggatgagccccggaggaaacagaagaagaggcagcactggaagcaaaggaaaaggcaacggaaggaggcgaccgctgctgctgcggctgcggctgccgtggacgaggaagagaaggaggttggtaccacccaggaggagcaaattgggacagcagaatcggtgctaactgaagatggggttgatgcccctacatctcacagtatgtttctgcggaagctccttgtaagtgacatgtgaatttattgggtttgttctactaaaggaagcttactattaaattgtatgcactgatcagtccaacaaaaaagcttgagttgatggtagaggtggacaattcacttatacttcaacaccacctcacgtagaggatctcttaggtctcagtcgtggaatataagtgatcaataattattttatttaattgtgcctgccaagattcgagcttgagacctctagctttgattgcatgcactgaccagttcaaccgaaagcttaagttgatagggagaggtgggtagttcacttatacttgaacacttaacattgtgctacttctacttgtgaccagcgcataccaagatactttgatcctggggaaacattgttggagacttgctttaattgtagcgaggaaggacatgtagctgcaaactgcccaatgggaaagcggaagaagccttgctttgtttgtgggttgtttgggcacaatgcaaagcagtgcaagcagggtcaagactgtttcatctgcaaaaaaggagggcatatggcgaaggattgtcctgataagcacaagaggaatgatcatcaatccacattatgtataagatgtggagaaacaggtcatgatatgtttggatgtgccaatgattacccaccagatgatatcgagcaaataagatgctacgcgtgtaatcagaagggccatctatgttgttccgacttctttgacaattctctggaacagggatgtgctaagcaacgcagggaagctagtgctgtcacaaccccaaccttatgcttcaaatgtggcgaggaaggtcacttcgcacgcggctgcacgaagaatgccaagtccgatgggccaaaaggctggtcgtcaccacacagtcagaggaagggaagatggaaaaacgatggcaagtcaccatcacacatccggaggaaggaaaaatggaagaaagattccagtgctagatcagctcctcatgatgcctgtacaacaagcaaaagcaatagcccctctttcgaggaaagaatgggcgcatctaatcataaatcgaaatggaggggtggttggactggtgatgacgatctaccatcgaagaagtacaaacccaatggatggggttcaccagctactcccaagaggtcttacacgaatcaccagtacttgtctggtggtggtgactacttcactccccagtcctcacgaaggcacaaccatggtaccgcgtcacccggtgctaggaaacacaggttctcgtcgtcaatattcgccgccagcaacacccatgtccggttcaaaagaagctagccggatgcacgtgtctgtttttgttgcttgtttagccattgataacagttatctcctggggttgaactctagctgctggttcatgcccttagataggtgtcttgtctgagattacatatttacatatgtaagcgcggttgaaactgattatttctactgtgaacaaagctttcatgccatggcgtcgccctccggataacaatgccttggtgcaaaaaaaaaacggcaactgaaaactgtttggtttgctgcctaaagcactacaatgtgcttaac

SEQ ID NO: 211745 - DNA, 1106 bp, Zea Mays
gttaggaaccgtggctgcaactgaactatatcttccactaatgtactggcatcagatatacgtcctttgccagttttacaagaaacaatggattatcttttgcatttactggattcttcagagcatccatttgagacaatacatgatttcatcttcgataggacgagatctataagacaagacttaagtatgcagaatatagtgaatgatcaagcagttcaaatatatgaggatgcggtaacatttcatatcaggtcccatcaaagactttccacgtcttgccaggattcagctgcatcttccctttgttacctaaacatggagcagctaacaaaatgcctgctttctctgtatgatatgtatcatgtacttcataagtgtgattcacacagcaaaaaggaggctgagtattattccttctatgtgcttctacatttgggatgcaagatacacaaaatgattcactctctttgtggtatggtcaattggctactccagtcagacggtcaaaggaaatgatatttgctagatctttattaagatgctatcgcctaggaaacttcaagcgtttcttttgcatggtagcagctgaagcaaccgatcttcagttgcgccttgtagaaccttttctcaacgaggtccgagctagagccttaatgtacttcaactatagtggctacaaactccaacatcaccctttggaacatctatcaggaatcctgatgatcgaggagtcggagctggaatctctgtgtggaatatgcggacttgaaatcaccaggagcgaaggtacgaaagcttttgtgcctaaacaaacaagcttcaacctaccgacatccatgccccaaagtaatggcatttatgtctcaagggagtttgaaagattaatatagcattgtagttcaggttttcaatggattgtataatgtgtcaggattcaggaaagagtttgtcacgcatgatatgtgtaatacttactgttacaagaaaaaggctgaatatctatctcgatgcgtttttacagactgcttagcattccggtgtgcttttacatactgggccattggctctttgtgccggacggcgtttgcgcatttactttttcc

SEQ ID NO: 211746 - DNA, 1118 bp, Zea Mays
gttaggaaccgtggctgcaactgttttgcagaactatatcttccactaatgtactggcatcagatatacgtcctttgccagttttacaagaaacaatggattatcttttgcatttactggattcttcagagcatccatttgagacaatacatgatttcatcttcgataggacgagatctataagacaagacttaagtatgcagaatatagtgaatgatcaagcagttcaaatatatgaggatgcggtaacatttcatatcaggtcccatcaaagactttccacgtcttgccaggattcagctgcatcttccctttgttacctaaacatggagcagctaacaaaatgcctgctttctctgtatgatatgtatcatgtacttcataagtgtgattcacacagcaaaaaggaggctgagtattattccttctatgtgcttctacatttgggatgcaagatacacaaaatgatagattcactctctttgtggtatggtcaattggctactccagtcagacggtcaaaggaaatgatatttgctagatctttattaagatgctatcgcctaggaaacttcaagcgtttcttttgcatggtagcagctgaagcaaccgatcttcagttgcgccttgtagaaccttttctcaacgaggtccgagctagagccttaatgtacttcaactatagtggctacaaactccaacatcaccctttggaacatctatcaggaatcctgatgatcgaggagtcggagctggaatctctgtgtggaatatgcggacttgaaatcaccaggagcgaaggtacgaaagcttttgtgcctaaacaaacaagcttcaacctaccgacatccatgccccaaagtaatggcatttatgtctcaagggagtttgaaagattaatatagcattgtagttcaggttttcaatggattgtataatgtgtcaggattcaggaaagagtttgtcacgcatgatatgtgtaatacttactgttacaagaaaaaggctgaatatctatctcgatgcgtttttacagactgcttagcattccggtgtgcttttacatactgggccattggctctttgtgccggacggcgtttgcgcatttactttttcc

SEQ ID NO: 211747 - DNA, 1115 bp, Zea Mays
catgcgttaggaaccgtggctgcaactgaactatatcttccactaatgtactggcatcagatatacgtcctttgccagttttacaagaaacaatggattatcttttgcatttactggattcttcagagcatccatttgagacaatacatgatttcatcttcgataggacgagatctataagacaagacttaagtatgcagaatatagtgaatgatcaagcagttcaaatatatgaggatgcggtaacatttcatatcaggtcccatcaaagactttccacgtcttgccaggattcagctgcatcttccctttgttacctaaacatggagcagctaacaaaatgcctgctttctctgtatgatatgtatcatgtacttcataagtgtgattcacacagcaaaaaggaggctgagtattattccttctatgtgcttctacatttgggatgcaagatacacaaaatgatagattcactctctttgtggtatggtcaattggctactccagtcagacggtcaaaggaaatgatatttgctagatctttattaagatgctatcgcctaggaaacttcaagcgtttcttttgcatggtagcagctgaagcaaccgatcttcagttgcgccttgtagaaccttttctcaacgaggtccgagctagagccttaatgtacttcaactatagtggctacaaactccaacatcaccctttggaacatctatcaggaatcctgatgatcgaggagtcggagctggaatctctgtgtggaatatgcggacttgaaatcaccaggagcgaaggtacgaaagcttttgtgcctaaacaaacaagcttcaacctaccgacatccatgccccaaagtaatggcatttatgtctcaagggagtttgaaagattaatatagcattgtagttcaggttttcaatggattgtataatgtgtcaggattcaggaaagagtttgtcacgcatgatatgtgtaatacttactgttacaagaaaaaggctgaatatctatctcgatgcgtttttacagactgcttagcattccggtgtgcttttacatactgggccattggctctttgtgccggacggcgtttgcgcatttactttttcc

SEQ ID NO: 211748 - DNA, 2157 bp, Zea Mays
cgcgaaccgactcgccgtcccgtcccgtctcgcctcgcttgcttgtccccatccggattactcttccgctcccttcccctcctcacctcaccaccatctccagctccatccgcaccaacatctccaccaaccgacacggcgaggagatgaacgcgtcgcagttcatggacaagcagatcctcggcctcgccgcctccgcctccccgtccggcggcggcgcggggggcggtgggggtgtggatctcagcgatctgatgatcccgatcccccaggaggacggcgaggaccgtctccgtcgccggcgtagcagtagcagcgtcaacggcacatcagacgacatgctacccagctacgatttccagccgatccgcaccggcggcgccaccgccgccgcccccgtgtctcaggcctcgtggggatcgctcgactccaaggcaccctccgcctctgcctctgcctccgccgccgcctcatacaacctcaagagtgctggtatattggagccacatgtgctgaagaaagttagtcatgaggaagacaggagtaacttccctacagttactatcgcagatattgatcgaaccatgaagaagtactctgataaccttttgcatgcactggaaggtgtaagctcaaggctttcacagatggagggcagaacacaccaactagaaaactctgttgatgagttgaagttaacaattggtaactataatggtagcactgatggaaaactcaggcaccttgagaacatgctcagagaggtccaagcaggtgtgcagattttacgagacaagcaggaaattgtcgaggcgcaactccaccttgcaaagctccagacaaccaaaactgatgcccactcatcagaaaatagtgggtctggacatgctggctctcagccggtgcctcctccacaagcagccattcagccacagcaagtcttaacccctttgcaaccacctgcacttcctgcccttcctgctccaaatgcaccacttccaacgcttcaaagccaaccaccatcacagtttccaagtcatttacaacattcacagccgaccgaaaccatgcaccagcagtatcaagctccgccagttccacagcctcaggcccctcctgcacctcagcaataccaatccccatcccagttccctcaatattcacagccatctcagccttcaaacgttaaccctccaactccacatgtgcctcctgcaccccagcaaccagaggaaactatgccttacccaccgcctcagagctatgcacctaatgcacgtcctccttcaccttatatgcaaccgcctagtggacctgctcctccttactatggacaacaaaaccctaccatgtatgaacctcccgcaggccgggctaaccctgggccgccatcatcatacggttctggtggctatggaccacagggtgggagtggtttctctgactcatatggttacgctggatctccttcccaccgcggcaatgctggaatgaagccgtctacaccttttgctcaatcctctgggggaagtggcggctatggcagtggcaggctccccacggctcagatactaccacaagcagtgccggtaagctcctccagcaccagcggtgcttcaggcaatagagtgccacttgacgatgtagttgagaaggttgccacgatgggattctcgagagagcaggtgagagcaaccgtgcggaggctgacggaaaatgggcagaatgtggacctgaacgtggttctcgacaagctgatgaacggcagataagttgagcagtagtgccatttcaacagtatgtgtatagtatggagacttgggaagtgtcagctgaaccgattttctgtctgcaactttgtaaacctggagaactctgatgaccgaacagccgctcatcctgattgccggtcatggttgctccacctgaaatggaaacagcccagtgtgcctgtcagtgaactatagtattattgcaatctgaatacgttattcatttgatgtatatgtggtgctgatgatattttaaaacatataccgtggtttcttgtgatatgttaataagaagcctttactgtgttttttaggctgcgctacagaaaaacggaacgtcaaccaagcccaaccaaacaagttttcgtgtcgtataattttcata

SEQ ID NO: 211749 - DNA, 562 bp, Zea Mays
gtcgtgctcgtgcatgcacgcgctgctggtggccctgcaacctgctggtggtcagagcggcacgtgccagttttgtagacgtcgctggctcactcactcgtgcagttgcaactgcatcgggtgcggacgtgcggtggatgcgcgtacatggtgttcgcgacgacggtggcggcgctgcaggcgtgcttcgtggggctgctcggcgtcgacgccctgcagtggagcaagctctgcaacatctacacccgcttctgcgagcaggcggccgccggcatggtctgcagcctgctggccgccgccggcatggccgtcctctccgcgttctcggctcgggacctcttccgccgcccctgctccccggagtatagatgaattccagtagtacaagaaacctcaccaagatatatagccacactttctgatgtgtaagaattggcgcttgggctttgatcaagttcataagaaaaatgagaaacagatctttatggaataatactttaattgcttctaagaccctgtttggcaactcggaaaggattcgattttccgaacagtaacagag

SEQ ID NO: 211750 - DNA, 765 bp, Zea Mays
ccagtgtgcgtgcccacgtctataataagaaagagagtgcctcgcgttgcgcttgcgccgaggaaaacagaaggaagctgaagctagcggccggcctaccgcacgcaacgcaagcagagtgcagaggaggattacagatcgaggcgtacggacgtcgagcgaggagtggtacatatggcagcgggaccgccgtcgtcggtgagggcggagcgcgtcctgcgggcggcgtgcgcggccatggcggcggcgggggcgctgctgctggggttcagcgcgcagaccaagaccgtgctcttcatccagaagaaggccgtccccaaggacgtgcaggccctctgggatgcgcgtacatggtgttcgcgacgacggtggcggcgctgcaggcgtgcttcgtggggctgctcggcgtcgacgccctgcagtggagcaagctctgcaacatctacacccgcttctgcgagcaggcggccgccggcatggtctgcagcctgctggccgccgccggcatggccgtcctctccgcgttctcggctcgggacctcttccgccgcccctgctccccggagtatagatgaattccagtagtacaagaaacctcaccaagatatatagccacactttctgatgtgtaagaattggcgcttgggctttgatcaagttcataagaaaaatgagaaacagatctttatggaataatactttaattgcttctaagaccctgtttggcaactcggaaaggattcgattttccgaacagtaacagag

SEQ ID NO: 211751 - DNA, 1453 bp, Zea Mays
gcctcgatttcgacctgtaatttttgatttttcaccaatttggcttgccggctgggatgagtggggagtggaggctcctgaagtatgtggaggaagcagaatttggcccggatgctggcattaacacggtgtacattgtcggatctcttgagttgagattggatgatctgccaggtcagatgcttaatgtttgaatgtttctcaaccgggaattgcttgaccatcatgcgttgcccatggcagagtcatgtaaatggatgtccaaggagtgtgcattgaggttgctttcggaagcgaaaccaggtaatgatcgcataggacagtatgcatatattggacttctgaattcggagctgtcatcaaactgcacagcttctcctgcattgcccttccagcttgcagatctcattgattcccttccaaaaaggttattagttcttgttacacatcatcatcaggatcacattgagggtctttcagtcgttcagagatgcaatcctaatgctgttcttctgacacaccaaagtacaatggatcgcattgggaaaggaacttggcagattgactacacttcagtaactggtggtgaaaagatatgcataggtgaccaagaactacaagttgtttttgcacctggtcatacagatggtcatatggggcttctccatgtaaataccaatacattggttgttggagatcattgtgtagggcatggaagtgcaaccttggacagtagaaatggtggcaacatgaaggattactttgaaactacatacaaattcttggagttgtcaccacatgtattaattccaatgcatggaaggattaatctatggcccaagtatatgctttgtggatacctcaggaatcgaagggctagagaagcgtccattctgcactctatagagaatggggcccaaactctttttgatatagtttcgaagacttacagtgatgttgacaggaagttgtggattcctgcttctttcaatgttcgccttcatgttgatcatctgaactccctacataaattgcccaaggacttctcattggagaactttaaggaaagctgtggagtgcatttcatgttgcgttgggcggtggcatatgtgcattcaaggagctccccagctatccttgcggcaagtgcccttgctggtggtcttgcaattgcttgtgctctcagaaggaactactgcaagcaatcataggttctctcggtcgataattttccagctagatgcacattatattattcacaagattctgctaccagtatgttgagtcgaacggtgaattgccagaactcttattctactattattgtccgtgattgccacatctatatacaagagaagtatctagactaggagcatgagaatcgaatgcaaccgagtcctaaaatcactgaaagcaattgcctcataaaaaacaggggcatgcaaggtgaaac

SEQ ID NO: 211752 - DNA, 2171 bp, Zea Mays
cacattctgccaacctgcctggtagggtgagccggcgccgcctctgcatctcccgtctctctcctcccttcccttcctctttctctctcatccccctccctgcccatatttagccgttgtagcttccgccctctctctctccctctccaggctcttagaacacgaaacgtgaaggagacataggaggaggaggaggaggaggaggaggatcaatctgccccgttcttggctgcgaggcgatctttgtgccacccaccagcgcgcgaggggcttcattcacctgatcctcgcttcttcttctttcgtcccactggttcgcgttgattgcatttggaggagggggcagtcaagatgaggcttcggctcctggcctgctgctacaatgatccggagatgcggatcgatccggacaccgtctaccccatccgccccgactgccgcgacgacgcccccaagacgcgcttcaagccccggcctggcctgacccttagtccaaagagatggaagcttctccacaacgaggaaggctgcgtggacatagctggaatgatcaagagagtgcaacgtgggggagtccacccaacaatcaaaggagaagtttgggaatttttgctgggctgctatgaccctaaaagcactaccgaacagtgcaaccaattgcgacagcagcgaaggttagagtacgagcaactgaaagctaagtgccgagaaatggacacagctgttggtagtggaagggtaatcactatgcctgtagtaacagaagatggtcaacctatcgaaaaccctaacggaggggcatcaggttctgagcagaaaaatagtggggcaccactcccgaaagaagttattgattggaagcttaccctacaccagattggtaagcactgttgctcttttttcagcatctcctatatcttgggcttcccagagccttgcatcaggagggaggcaagagacagagcaatacccagctaaacctgcctattcaataatgatatgtaattcggcctgcgtttgggacaaggaggtctcgatgttaaccgtactgatcgtttgcttgtttattatgagagacaagagaacttggcaaggttgtgggacattcttgcagtgtattcatggattgataaagacatagggtattgtcagggaatgagtgatctttgttcaccaatatcaatcattctggaaaatgaagcagatgctttttggtgctttgagcgtctaatgcgcagggtgcgaggaaatttcaaaagtacttctacttccattggagttcgagctcaactaactaccttgtctaccataatgaaatctgttgacccaaagctgcatgaacatttagaaaatcttgatggaggggaatacttatttgccttccgaatgctgatggttcttttccgtagggaattctcatttgttgatacgatgtacctttgggaactcatgtggtctatggagtacaatcctaatctcttttcaatgttggagagtgacactggcacatccagcgcaagcacaaaggatgaaagtgttctaggacagtgtggaaagtttgagcggaaaaaattgcaagcagctaagaaagatgaccagatccctctatctgtctttgttgttgctagtgttcttgaggctagaaacaagaagttattgggtgaggcaaaaggtctagacgatgttgtcaagattttaaatgaaatcactggtagtctggatgcaaaaaaggcatgcagagaagcattgcagattcacgagaagtatcttaaaacggtaaaagcatcataaggacatgtacagcttcacttggatgggctatttatttattttttggactagagaagatataccacagaacttttgttatcctttgtttgtgtattgtgtaattctgacacatttgtaacattgcatttacacaaccaaaagaaaggacgaggatttcattcaaaaataaaaaaaagaaggggaaaaaggatgctgatcttgtaaagacgcgagacaaaatgtttataccataataacgtcatcatgattcttttctgttcgtcgtcagctctaatattagttcactttatgtgaacaatatgttgtactttgaagataaatatcactgtatacgggtgtattgtgtgtcttaaaaggacctactatttcgtcgtccttgc

SEQ ID NO: 211753 - DNA, 1986 bp, Zea Mays
agggagtcgcgcacattctgccaacctgcctggtagggtgagccggcgccgcctctgcatctcccgtctctctcctcccttcccttcctctttctctctcatccccctccctgcccatatttagccgttgtagcttccgccctctctctctccctctccaggctcttagaacacgaaacgtgaaggagacataggaggaggaggaggaggaggaggaggatcaatctgccccgttcttggctgcgaggcgatctttgtgccacccaccagcgcgcgaggggcttcattcacctgatcctcgcttcttcttctttcgtcccactggttcgcgttgattgcatttggaggagggggcagtcaagatgaggcttcggctcctggcctgctgctacaatgatccggagatgcggatcgatccggacaccgtctaccccatccgccccgactgccgcgacgacgcccccaagacgcgcttcaagccccggcctggcctgacccttagtccaaagagatggaagcttctccacaacgaggaaggctgcgtggacatagctggaatgatcaagagagtgcaacgtgggggagtccacccaacaatcaaaggagaagtttgggaatttttgctgggctgctatgaccctaaaagcactaccgaacagtgcaaccaattgcgacagcagcgaaggttagagtacgagcaactgaaagctaagtgccgagaaatggacacagctgttggtagtggaagggtaatcactatgcctgtagtaacagaagatggtcaacctatcgaaaaccctaacggaggggcatcaggttctgagcagaaaaatagtggggcaccactcccgaaagaagttattgattggaagcttaccctacaccagattgacaagagaacttggcaaggttgtgggacattcttgcagtgtattcatggattgataaagacatagggtattgtcagggaatgagtgatctttgttcaccaatatcaatcattctggaaaatgaagcagatgctttttggtgctttgagcgtctaatgcgcagggtgcgaggaaatttcaaaagtacttctacttccattggagttcgagctcaactaactaccttgtctaccataatgaaatctgttgacccaaagctgcatgaacatttagaaaatcttgatggaggggaatacttatttgccttccgaatgctgatggttcttttccgtagggaattctcatttgttgatacgatgtacctttgggaactcatgtggtctatggagtacaatcctaatctcttttcaatgttggagagtgacactggcacatccagcgcaagcacaaaggatgaaagtgttctaggacagtgtggaaagtttgagcggaaaaaattgcaagcagctaagaaagatgaccagatccctctatctgtctttgttgttgctagtgttcttgaggctagaaacaagaagttattgggtgaggcaaaaggtctagacgatgttgtcaagattttaaatgaaatcactggtagtctggatgcaaaaaaggcatgcagagaagcattgcagattcacgagaagtatcttaaaacggtaaaagcatcataaggacatgtacagcttcacttggatgggctatttatttattttttggactagagaagatataccacagaacttttgttatcctttgtttgtgtattgtgtaattctgacacatttgtaacattgcatttacacaaccaaaagaaaggacgaggatttcattcaaaaataaaaaaaagaaggggaaaaaggatgctgatcttgtaaagacgcgagacaaaatgtttataccataataacgtcatcatgattcttttctgttcgtcgtcagctctaatattagttcactttatgtgaacaatatgttgtactttgaagataaatatcactgtatacgggtgtattgtgtgtcttaaaaggacctactatttcgtcgtccttgc

SEQ ID NO: 211754 - DNA, 1985 bp, Zea Mays
cagggagtcgcgcacattctgccaacctgcctggtagggtgagccggcgccgcctctgcatctcccgtctctctcctcccttcccttcctctttctctctcatccccctccctgcccatatttagccgttgtagcttccgccctctctctctccctctccaggctcttagaacacgaaacgtgaaggagacataggaggaggaggaggaggaggaggaggatcaatctgccccgttcttggctgcgaggcgatctttgtgccacccaccagcgcgcgaggggcttcattcacctgatcctcgcttcttcttctttcgtcccactggttcgcgttgattgcatttggaggagggggcagtcaagatgaggcttcggctcctggcctgctgctacaatgatccggagatgcggatcgatccggacaccgtctaccccatccgccccgactgccgcgacgacgcccccaagacgcgcttcaagccccggcctggcctgacccttagtccaaagagatggaagcttctccacaacgaggaaggctgcgtggacatagctggaatgatcaagagagtgcaacgtgggggagtccacccaacaatcaaaggagaagtttgggaatttttgctgggctgctatgaccctaaaagcactaccgaacagtgcaaccaattgcgacagcagcgaaggttagagtacgagcaactgaaagctaagtgccgagaaatggacacagctgttggtagtggaagggtaatcactatgcctgtagtaacagaagatggtcaacctatcgaaaaccctaacggaggggcatcaggttctgagcagaaaaatagtggggcaccactcccgaaagaagttattgattggaagcttaccctacaccagattggtctcgatgttaaccgtactgatcgtttgcttgtttattatgagagacaagagaacttggcaaggttgtgggacattcttgcagtgtattcatggattgataaagacatagggtattgtcagggaatgagtgatctttgttcaccaatatcaatcattctggaaaatgaagcagatgctttttggtgctttgagcgtctaatgcgcagggtgcgaggaaatttcaaaagtacttctacttccattggagttcgagctcaactaactaccttgtctaccataatgaaatctgttgacccaaagctgcatgaacatttagaaaatcttgatggaggggaatacttatttgccttccgaatgctgatggttcttttccgtagggaattctcatttgttgatacgatgtacctttgggaaagtgacactggcacatccagcgcaagcacaaaggatgaaagtgttctaggacagtgtggaaagtttgagcggaaaaaattgcaagcagctaagaaagatgaccagatccctctatctgtctttgttgttgctagtgttcttgaggctagaaacaagaagttattgggtgaggcaaaaggtctagacgatgttgtcaagattttaaatgaaatcactggtagtctggatgcaaaaaaggcatgcagagaagcattgcagattcacgagaagtatcttaaaacggtaaaagcatcataaggacatgtacagcttcacttggatgggctatttatttattttttggactagagaagatataccacagaacttttgttatcctttgtttgtgtattgtgtaattctgacacatttgtaacattgcatttacacaaccaaaagaaaggacgaggatttcattcaaaaataaaaaaaagaaggggaaaaaggatgctgatcttgtaaagacgcgagacaaaatgtttataccataataacgtcatcatgattcttttctgttcgtcgtcagctctaatattagttcactttatgtgaacaatatgttgtactttgaagataaatatcactgtatacgggtgtattgtgtgtcttaaaaggacctactatttcgtcgtccttgc

SEQ ID NO: 211755 - DNA, 1959 bp, Zea Mays
aacgaaataatgcgactctcggcagggagtcgcgcacattctgccaacctgcctggtagggtgagccggcgccgcctctgcatctcccgtctctctcctcccttcccttcctctttctctctcatccccctccctgcccatatttagccgttgtagcttccgccctctctctctccctctccaggctcttagaacacgaaacgtgaaggagacataggaggaggaggaggaggaggaggaggatcaatctgccccgttcttggctgcgaggcgatctttgtgccacccaccagcgcgcgaggggcttcattcacctgatcctcgcttcttcttctttcgtcccactggttcgcgttgattgcatttggaggagggggcagtcaagatgaggcttcggctcctggcctgctgctacaatgatccggagatgcggatcgatccggacaccgtctaccccatccgccccgactgccgcgacgacgcccccaagacgcgcttcaagccccggggagtccacccaacaatcaaaggagaagtttgggaatttttgctgggctgctatgaccctaaaagcactaccgaacagtgcaaccaattgcgacagcagcgaaggttagagtacgagcaactgaaagctaagtgccgagaaatggacacagctgttggtagtggaagggtaatcactatgcctgtagtaacagaagatggtcaacctatcgaaaaccctaacggaggggcatcaggttctgagcagaaaaatagtggggcaccactcccgaaagaagttattgattggaagcttaccctacaccagattggtctcgatgttaaccgtactgatcgtttgcttgtttattatgagagacaagagaacttggcaaggttgtgggacattcttgcagtgtattcatggattgataaagacatagggtattgtcagggaatgagtgatctttgttcaccaatatcaatcattctggaaaatgaagcagatgctttttggtgctttgagcgtctaatgcgcagggtgcgaggaaatttcaaaagtacttctacttccattggagttcgagctcaactaactaccttgtctaccataatgaaatctgttgacccaaagctgcatgaacatttagaaaatcttgatggaggggaatacttatttgccttccgaatgctgatggttcttttccgtagggaattctcatttgttgatacgatgtacctttgggaactcatgtggtctatggagtacaatcctaatctcttttcaatgttggagagtgacactggcacatccagcgcaagcacaaaggatgaaagtgttctaggacagtgtggaaagtttgagcggaaaaaattgcaagcagctaagaaagatgaccagatccctctatctgtctttgttgttgctagtgttcttgaggctagaaacaagaagttattgggtgaggcaaaaggtctagacgatgttgtcaagattttaaatgaaatcactggtagtctggatgcaaaaaaggcatgcagagaagcattgcagattcacgagaagtatcttaaaacggtaaaagcatcataaggacatgtacagcttcacttggatgggctatttatttattttttggactagagaagatataccacagaacttttgttatcctttgtttgtgtattgtgtaattctgacacatttgtaacattgcatttacacaaccaaaagaaaggacgaggatttcattcaaaaataaaaaaaagaaggggaaaaaggatgctgatcttgtaaagacgcgagacaaaatgtttataccataataacgtcatcatgattcttttctgttcgtcgtcagctctaatattagttcactttatgtgaacaatatgttgtactttgaagataaatatcactgtatacgggtgtattgtgtgtcttaaaaggacctactatttcgtcgtccttgc

SEQ ID NO: 211756 - DNA, 3025 bp, Zea Mays
ccgcgccgcgccgccgccaccccctttcccgttcgttcccaggacgagtcgcagcagccggccagccgcacagagtggtggagcctaggaacagaggaggcgccgagccatctccgcagcctgctaccggggaacgggcgggaacggactctaacttagagagagcgcgggcgagagaggtcaaccgcagccggaggcgatggaggtggtggcgctggtgagcggcggaaaggacagctgcttcgccatgatgcgatgcatggactacggccacaaggttgtcgctttggctaatcttatccccctcgacgacaccgtcgatgagctcgacagctacatgtaccaaactgttgggcaccagattgtggtgagctacgcgaaatgcatgggcttgcctcttttccggaggcgcattcgcggatccacaagggatcagggtctcaggtacagtgtcacggcaggtgatgaggtagaagatatgtttgctctgttgagcgaggttaaacgtcgaatcccatccatcagcgcggtgtcgtcaggtgcaatcgcatccgattaccagaggctccgggttgagagtgtttgctcgaggctgggcctggtctcgctggcgtatctatggaagcaggatcagactttgctcctagaggaaatgataaggaggggcattgtggcaataattgtgaaggttgctgcactggggctgaaaccttcttcccacttagaatgcaagaattattcttgatgactctgaagtgatactccactctgctgattccattgcttctgttggaattcttcatccacgggcgtttcatcttgagcagaagccagattcatctgatagaattggggatggttctgccgttcaagagagttctagttgtgtatatgaggttgatgaagttaccactcacgatgatgtgggagaaaaacaggccctgagtccagctgttgatgcttacaccaatgttgacctatgtatctcaaagacagggaacaatttgcgttcaatgagctgttggattcaggatccatccagagcttcggaaggcctgaaggcagaccttatagcagttttgagcagaattgaaaatcagctcaaggaagaagggttaggttgggtgaatgttttgtacgttcacctctacatttcaagcatgaaggaatttggattggccaatgaagtttacgtcagctttattacggaaaagaaatgctacctgggtgttccttcgcgcagtacaattgaattgccactagttcaggctgggttgggcaaagcatatgtggaagtcctagtttcaaatgaggtggtaaagagagttctacatgtgcaaagcatctcctgctgggctcctagctgcattggaccttatagccaggcaactctttatgaagatattctttatatggctggtcagctgggccttgaccctcctacgatgaagctctgtcttggaggtccaagagcggaactagaattagcactacaaaacagtgaagctgtggccaatgcctttagctgctcaatctatatctcggcaatacactttctggtgtactgctctgctcagttgacgtccagcgagaaggaagaaattgaacagacattgaagagttcttatattactcgtttggatcgctcaaaaggtggatcatatccaactgttctgtacgtattcgcgtcagaccttccgaaaggggcacgtgtggaggtaaagcctatactgtatgtcccttccactgatgattgggttgctgccgaagagacggagaccggagttccactgccagcaccgagcaaaacctggactgattgtaccgcaccatactctgcgttgcgcgattcgtgttgccaggtccacacaaccggcgggagaatttgttccgccgtggtgtcgatcacagatgacatcgcatcgaagatctgctctgcagctggacagctgcaccacggagaggagaatctgaaaataatggctagattctgtgctttccagatcgcgaagaccctggcagacaacagattttcctgggacagcgtaacgatgttgaggctctactactcggtagatctcgccgtggcggcagatgcagtgtccggagcattttccgaggccttggccgagcttgcccaagacaacccttccatgagaactgacgttcctttctacaacgttgtgcccgtagccggagctggccgctctgcgtgtgccaacgacataatggcgtgcgagttactggcatccaacgtctccagtgcgaagtccataccagccgaaccgttcgctgtgacgcctgcttgaatgcagctttccttcggaaattggaggtgggcgcacgttggaatttctgccagaggagccggtggccagtcaactgccagttggacgacgacggttgaccagcttctctagggctggcggcggtagcttcgtttctgtgctggcggtcgattaaaaaaaaagaccgtacggtgatcatcacagatgcacccatactgtattattctgtttcagcgtcctatacaaagtatacattgggtctgaattctgattagcctgtgctgatgcttgcaatgacattggttcttctgtgtacagactacggacagagtcccggtcagtaacgtgtgtgtacttgttcttcctctgtgttgacattcttgctcgatggtggaacctgtcgcagttggcggaggtgaagccgcgtagctcacttaggtctgccaaacacttcacttcttagattgtttctgtggaaatcgcttctgatgaatgcaaaatcaattaagtcgtccggttttgatgggaggaatcctacgcttcttaaactctaaattgcacatatttctttatttttctccgcatacaaatttgatgttgaatgcaaaatttatcaagtcgtcgtgtcttgatgagaggaacccgacgtttcttaaatcctaaattgcacagatttctttatctttttccacatgcaacattgttgacatctagattctcgttacagctagatcttt

SEQ ID NO: 211757 - DNA, 3176 bp, Zea Mays
cacgcctctctgccgagcactcggcgcataacagcaccaccgcgccgcgccgccgccaccccctttcccgttcgttcccaggacgagtcgcagcagccggccagccgcacagagtggtggagcctaggaacagaggaggcgccgagccatctccgcagcctgctaccggggaacgggcgggaacggactctaacttagagagagcgcgggcgagagaggtcaaccgcagccggaggcgatggaggtggtggcgctggtgagcggcggaaaggacagctgcttcgccatgatgcgatgcatggactacggccacaaggttgtcgctttggctaatcttatccccctcgacgacaccgtcgatgagctcgacagctacatgtaccaaactgttgggcaccagattgtggtgagctacgcgaaatgcatgggcttgcctcttttccggaggcgcattcgcggatccacaagggtctcaggtacagtgtcacggcaggtgatgaggtagaagatatgtttgctctgttgagcgaggttaaacgtcgaatcccatccatcagcgcggtgtcgtcaggtgcaatcgcatccgattaccagaggctccgggttgagagtgtttgctcgaggctgggcctggtctcgctggcgtatctatggaagcaggatcagactttgctcctagaggaaatgataaggaggggcattgtggcaataattgtgaaggttgctgcactggggctgaaaccttcttcccacttaggtaaagaactggctgaacttaagtgtcatctgctccaaatgaatgagaattatggaatcaatgtctgtggtgaaggtggagaatatgaaacactaactcttgactgccctctatttcgtaatgcaagaattattcttgatgactctgaagtgatactccactctgctgattccattgcttctgttggaattcttcatccacgggcgtttcatcttgagcagaagccagattcatctgatagaattggggatggttctgccgttcaagagagttctagttgtgtatatgaggttgatgaagttaccactcacgatgatgtgggagaaaaacaggccctgagtccagctgttgatgcttacaccaatgttgacctatgtatctcaaagacagggaacaatttgcgttcaatgagctgttggattcaggatccatccagagcttcggaaggcctgaaggcagaccttatagcagttttgagcagaattgaaaatcagctcaaggaagaagggttaggttgggtgaatgttttgtacgttcacctctacatttcaagcatgaaggaatttggattggccaatgaagtttacgtcagctttattacggaaaagaaatgctacctgggtgttccttcgcgcagtacaattgaattgccactagttcaggctgggttgggcaaagcatatgtggaagtcctagtttcaaatgaggtggtaaagagagttctacatgtgcaaagcatctcctgctgggctcctagctgcattggaccttatagccaggcaactctttatgaagatattctttatatggctggtcagctgggccttgaccctcctacgatgaagctctgtcttggaggtccaagagcggaactagaattagcactacaaaacagtgaagctgtggccaatgcctttagctgctcaatctatatctcggcaatacactttctggtgtactgctctgctcagttgacgtccagcgagaaggaagaaattgaacagacattgaagagttcttatattactcgtttggatcgctcaaaaggtggatcatatccaactgttctgtacgtattcgcgtcagaccttccgaaaggggcacgtgtggaggtaaagcctatactgtatgtcccttccactgatgattgggttgctgccgaagagacggagaccggagttccactgccagcaccgagcaaaacctggactgattgtaccgcaccatactctgcgttgcgcgattcgtgttgccaggtccacacaaccggcgggagaatttgttccgccgtggtgtcgatcacagatgacatcgcatcgaagatctgctctgcagctggacagctgcaccacggagaggagaatctgaaaataatggctagattctgtgctttccagatcgcgaagaccctggcagacaacagattttcctgggacagcgtaacgatgttgaggctctactactcggtagatctcgccgtggcggcagatgcagtgtccggagcattttccgaggccttggccgagcttgcccaagacaacccttccatgagaactgacgttcctttctacaacgttgtgcccgtagccggagctggccgctctgcgtgtgccaacgacataatggcgtgcgagttactggcatccaacgtctccagtgcgaagtccataccagccgaaccgttcgctgtgacgcctgcttgaatgcagctttccttcggaaattggaggtgggcgcacgttggaatttctgccagaggagccggtggccagtcaactgccagttggacgacgacggttgaccagcttctctagggctggcggcggtagcttcgtttctgtgctggcggtcgattaaaaaaaaagaccgtacggtgatcatcacagatgcacccatactgtattattctgtttcagcgtcctatacaaagtatacattgggtctgaattctgattagcctgtgctgatgcttgcaatgacattggttcttctgtgtacagactacggacagagtcccggtcagtaacgtgtgtgtacttgttcttcctctgtgttgacattcttgctcgatggtggaacctgtcgcagttggcggaggtgaagccgcgtagctcacttaggtctgccaaacacttcacttcttagattgtttctgtggaaatcgcttctgatgaatgcaaaatcaattaagtcgtccggttttgatgggaggaatcctacgcttcttaaactctaaattgcacatatttctttatttttctccgcatacaaatttgatgttgaatgcaaaatttatcaagtcgtcgtgtcttgatgagaggaacccgacgtttcttaaatcctaaattgcacagatttctttatctttttccacatgcaacattgttgacatctagattctcgttacagctagatcttt

SEQ ID NO: 211758 - DNA, 3196 bp, Zea Mays
cacggcccaagacggcgacttccagcccatttaacaacacgcacgatggatcatcagcgcacgcctctctgccgagcactcggcgcataacagcaccaccgcgccgcgccgccgccaccccctttcccgttcgttcccaggacgagtcgcagcagccggccagccgcacagagtggtggagcctaggaacagaggaggcgccgagccatctccgcagcctgctaccggggaacgggcgggaacggactctaacttagagagagcgcgggcgagagaggtcaaccgcagccggaggcgatggaggtggtggcgctggtgagcggcggaaaggacagctgcttcgccatgatgcgatgcatggactacggccacaaggttgtcgctttggctaatcttatccccctcgacgacaccgtcgatgagctcgacagctacatgtaccaaactgttgggcaccagattgtggtgagctacgcgaaatgcatgggcttgcctcttttccggaggcgcattcgcggatccacaagggatcagggtctcaggtacagtgtcacggcaggtgatgaggtagaagatatgtttgctctgttgagcgaggttaaacgtcgaatcccatccatcagcgcggtgtcgtcaggtgcaatcgcatccgattaccagaggctccgggttgagagtgtttgctcgaggctgggcctggtctcgctggcgtatctatggaagcaggatcagactttgctcctagaggaaatgataaggaggggcattgtggcaataattgtgaaggttgctgcactggggctgaaaccttcttcccacttaggaattatggaatcaatgtctgtggtgaaggtggagaatatgaaacactaactcttgactgccctctatttcgtaatgcaagaattattcttgatgactctgaagtgatactccactctgctgattccattgcttctgttggaattcttcatccacgggcgtttcatcttgagcagaagccagattcatctgatagaattggggatggttctgccgttcaagagagttctagttgtgtatatgaggttgatgaagttaccactcacgatgatgtgggagaaaaacaggccctgagtccagctgttgatgcttacaccaatgttgacctatgtatctcaaagacagggaacaatttgcgttcaatgagctgttggattcaggatccatccagagcttcggaaggcctgaaggcagaccttatagcagttttgagcagaattgaaaatcagctcaaggaagaagggttaggttgggtgaatgttttgtacgttcacctctacatttcaagcatgaaggaatttggattggccaatgaagtttacgtcagctttattacggaaaagaaatgctacctgggtgttccttcgcgcagtacaattgaattgccactagttcaggctgggttgggcaaagcatatgtggaagtcctagtttcaaatgaggtggtaaagagagttctacatgtgcaaagcatctcctgctgggctcctagctgcattggaccttatagccaggcaactctttatgaagatattctttatatggctggtcagctgggccttgaccctcctacgatgaagctctgtcttggaggtccaagagcggaactagaattagcactacaaaacagtgaagctgtggccaatgcctttagctgctcaatctatatctcggcaatacactttctggtgtactgctctgctcagttgacgtccagcgagaaggaagaaattgaacagacattgaagagttcttatattactcgtttggatcgctcaaaaggtggatcatatccaactgttctgtacgtattcgcgtcagaccttccgaaaggggcacgtgtggaggtaaagcctatactgtatgtcccttccactgatgattgggttgctgccgaagagacggagaccggagttccactgccagcaccgagcaaaacctggactgattgtaccgcaccatactctgcgttgcgcgattcgtgttgccaggtccacacaaccggcgggagaatttgttccgccgtggtgtcgatcacagatgacatcgcatcgaagatctgctctgcagctggacagctgcaccacggagaggagaatctgaaaataatggctagattctgtgctttccagatcgcgaagaccctggcagacaacagattttcctgggacagcgtaacgatgttgaggctctactactcggtagatctcgccgtggcggcagatgcagtgtccggagcattttccgaggccttggccgagcttgcccaagacaacccttccatgagaactgacgttcctttctacaacgttgtgcccgtagccggagctggccgctctgcgtgtgccaacgacataatggcgtgcgagttactggcatccaacgtctccagtgcgaagtccataccagccgaaccgttcgctgtgacgcctgcttgaatgcagctttccttcggaaattggaggtgggcgcacgttggaatttctgccagaggagccggtggccagtcaactgccagttggacgacgacggttgaccagcttctctagggctggcggcggtagcttcgtttctgtgctggcggtcgattaaaaaaaaagaccgtacggtgatcatcacagatgcacccatactgtattattctgtttcagcgtcctatacaaagtatacattgggtctgaattctgattagcctgtgctgatgcttgcaatgacattggttcttctgtgtacagactacggacagagtcccggtcagtaacgtgtgtgtacttgttcttcctctgtgttgacattcttgctcgatggtggaacctgtcgcagttggcggaggtgaagccgcgtagctcacttaggtctgccaaacacttcacttcttagattgtttctgtggaaatcgcttctgatgaatgcaaaatcaattaagtcgtccggttttgatgggaggaatcctacgcttcttaaactctaaattgcacatatttctttatttttctccgcatacaaatttgatgttgaatgcaaaatttatcaagtcgtcgtgtcttgatgagaggaacccgacgtttcttaaatcctaaattgcacagatttctttatctttttccacatgcaacattgttgacatctagattctcgttacagctagatcttt

SEQ ID NO: 211759 - DNA, 686 bp, Zea Mays
gctccacatgtgattcagaacttgggatttgagctgaaggagtttatcctgagtcaggacgaggcctacgagttcaaggttggcgatcgggttttccgcaggcctggagacccacccctggaccaagttcttgataagccacagaaaaagaagcgtcataagtctagagacgaactgtagattcatttgctaactaatctgttctacatgtcctgttatttttgttcgtccgctctttctcttcgtctacttcagtttgcttccatagcagttttaccttgcgcaatctgacaaaaatcacaggcagtgatcgtccttgccaaatcggtctgtgttacggctgtagcactgtaacgacagtgctgtcccccggccccgccacagccattctgaatgcaagaagccaaaattctgatccagagaaggcgagtgtactggcatgatcggcgaccaacagcgacgtcgttgcccgtcactgaatgaaagagaaagagtagcgtagcgaccaccgggcaaaaggcgacgcctgtcgctgcaatcatctgcgtgtgatctgctgcccattcataacgcggtgtctcttgtgcaagccactgcaccggatgctggccaccctttgccgccgccgaggaggcttgggatatctgcaacctactgtttctagggctggaaatgtcgtcttggtg

SEQ ID NO: 211760 - DNA, 2058 bp, Zea Mays
aaactaatctttactattccttaagagcataacgagggcgtccaccgtgcccccgcctgctcccgcaagtccgcaatacgtgcccccgcccccgtcagtgtccgcgagcgaccctctgcgctcgcgcaaatcccgcctgagatcgccgctgatccgaagcagcggcaccgtaaccctccccctcgcgagatccgcgaccgccccatcccggcgccacgggatccacgctccgccctcgcccttccccacccccatccgctaatctcgcggccgatccgcgcccggtcctgaccctgcctccgtcctccgcaccgccactccgtcccccgtcctcggcgccgccgtctcccgctcccctggcacgccttcggggtccttgcgggcggcaagcacctccgtcccggagacatctgccgctgcagcatagaccaccatgtcctcgctcggcagcaccgatgttgatgatggcaacgaggaggaggacggctccgcgagcacccccgagatctaccgctgccactcccacgcagttgcgtgtagcctctccatgtgatttccccaatgtttcccttcctctgtagcctctccgacggcgccgccgccgttcttcctcggccgtcggcgacattttaagaacgcctgaggctgttcaaccacttcatcgtctttttgactgcctcacattgaaggaactttgcagcggactgttatatgatctatgaaagaatgcatgcaacaagatctccagtctgatactgatgaagaaactacaaaagaacacatagccaccatcaatcaagacaaagggaaaactaccattacctcaattggatttctggtttttgggctatcattggatttctggctccagcttgatctggttcatgttttttctagattaccccagttgatgaagcaaagaaattatacctgttatttggccttggggctaatgttgccattatcttttctggccgtacaatgaagtatttctcaaatttgcgcaagacattgggtcctggaatgatgagcatagtggtacttcttgaacttgcatctattggggagtgagcaagtttgttttgaatgatccttcattgccaaagtcttatcgtaagaagaaaaaggaacttcataatgatttctggttaactgaaacgcatgggcacacatccatgagtcccccaccgctacatgcctcacgcctcgtcactgagtcgttcttagtcacgacatgctgatgtcgatccacccgtcaagaacaaggtgcagcagagatctttctcctcgtcgctgcttcctcgccatccggagatggtcgtcgccgcctaatatcacagcggtgggaaggcacaacgctcccccatctcctccggttctgcctgctcgccagcacgacgcgacgatgcccccctgacccccgcgcgcacagcctccgctggagaagcgacaacgctctcgtctccggtctccatgagtcagcctccaatccatttccatgccaggtatttacctaacgtacattgaacctgcacacaaccctgtctgtgagaccagaaggtagatttcttcaaggggaacaatgtggtgtaacttcatcagcacaaccactttgctgaaggtgtccggatcatgatgcagacaacaactggtgtactcattcccactttgatggtaatcgaaatggagacaaacacaattggagggaaaatatccaaagacaaaaggagtgagttttcacttcttcagattccaccaatcagaataagaactagacatcatagagaccaacttttggtaagagcaacaaaaaactggactactaaaatttactagcgtgatcttcaactgtcctgttaccaatattttttggggtctattatggatagcaatatgcatttgttctttgtacagagatttttcctcgcaatattatgttcgtttggtcatttgtaattattagcagtaaataaacgccatttgcttcaacggttctaggttgtacacaggtaaaggaacaatcgattaccaatgactaagggtattcataaattatgc

SEQ ID NO: 211761 - DNA, 2036 bp, Zea Mays
cttcgacggtgtcgtcgccgtttttgccgatcgtcagcatcactgtcgtccgcttcgcttggatgcaccgttgcgaacatgcagctagacgcgtgcacatcctttttccgtaataaattcgtctgtatcatcatccaccgtctggtcttgttctgctcaacacatatacgtggttgcgaaccatgcgactagacgcgtgggggatttcaattgacgagtatgagaaacatgaatggccgatcgatcgtgcaggtcgattgaacaaattgctcaagagatttcaaggctaccattgcttgctcgctgcaaatactactgcagtatatttagattgtattgtacaatgttataggaaattaacaatgcatacatgtaattttgcaggctgttcaaccacttcatcgtctttttgactgcctcacattgaaggaactttgcagcggactgttatatgatctatgaaagaatgcatgtaggaaatatctgtgaatgctacttatattttgttatgcctccttggtcattattctgaaccatagaacatgatctatctccagttgtattttccccttctatggaatcaccattgttggcaacaagatctccagtctgatactgatgaagaaactacaaaagaacacatagccaccatcaatcaagacaaagggaaaactaccattacctcaattggatttctggtttttgggctatcattggatttctggttaactgaaatatgtaccttgcagtagctctatgtctctatatggcattatggtgtctaaaactggatcattatattttcatttgagtgaaattcttatcaaatgttgaaccttcaggctccagcttgatctggttcatgttttttctagattaccccagttgatgaagcaaagaaattatacctgttatttggccttggggctaatgttgccattatcttttctggccgtacaatgaagtatttctcaaatttgcgcaagacattgggtcctggaatgatgagcatagtggtacttcttgaacttgcatctattggggagtgagcaagtttgttttgaatgatccttcattgccaaagtcttatcgtaagaagaaaaaggaacttcataatgatttctggttaactgaaacgcatgggcacacatccatgagtcccccaccgctacatgcctcacgcctcgtcactgagtcgttcttagtcacgacatgctgatgtcgatccacccgtcaagaacaaggtgcagcagagatctttctcctcgtcgctgcttcctcgccatccggagatggtcgtcgccgcctaatatcacagcggtgggaaggcacaacgctcccccatctcctccggttctgcctgctcgccagcacgacgcgacgatgcccccctgacccccgcgcgcacagcctccgctggagaagcgacaacgctctcgtctccggtctccatgagtcagcctccaatccatttccatgccaggtatttacctaacgtacattgaacctgcacacaaccctgtctgtgagaccagaaggtagatttcttcaaggggaacaatgtggtgtaacttcatcagcacaaccactttgctgaaggtgtccggatcatgatgcagacaacaactggtgtactcattcccactttgatggtaatcgaaatggagacaaacacaattggagggaaaatatccaaagacaaaaggagtgagttttcacttcttcagattccaccaatcagaataagaactagacatcatagagaccaacttttggtaagagcaacaaaaaactggactactaaaatttactagcgtgatcttcaactgtcctgttaccaatattttttggggtctattatggatagcaatatgcatttgttctttgtacagagatttttcctcgcaatattatgttcgtttggtcatttgtaattattagcagtaaataaacgccatttgcttcaacggttctaggttgtacacaggtaaaggaacaatcgattaccaatgactaagggtattcataaattatgc

SEQ ID NO: 211762 - DNA, 1980 bp, Zea Mays
cttcgacggtgtcgtcgccgtttttgccgatcgtcagcatcactgtcgtccgcttcgcttggatgcaccgttgcgaacatgcagctagacgcgtgcacatcctttttccgtaataaattcgtctgtatcatcatccaccgtctggtcttgttctgctcaacacatatacgtggttgcgaaccatgcgactagacgcgtgggggatttcaattgacgagtatgagaaacatgaatggccgatcgatcgtgcaggtcgattgaacaaattgctcaagagatttcaaggctaccattgcttgctcgctgcaaatactactgcagtatatttagattgtattgtacaatgttataggaaattaacaatgcatacatgtaattttgcaggctgttcaaccacttcatcgtctttttgactgcctcacattgaaggaactttgcagcggactgttatatgatctatgaaagaatgcatgcaacaagatctccagtctgatactgatgaagaaactacaaaagaacacatagccaccatcaatcaagacaaagggaaaactaccattacctcaattggatttctggtttttgggctatcattggatttctggttaactgaaatatgtaccttgcagtagctctatgtctctatatggcattatggtgtctaaaactggatcattatattttcatttgagtgaaattcttatcaaatgttgaaccttcaggctccagcttgatctggttcatgttttttctagattaccccagttgatgaagcaaagaaattatacctgttatttggccttggggctaatgttgccattatcttttctggccgtacaatgaagtatttctcaaatttgcgcaagacattgggtcctggaatgatgagcatagtggtacttcttgaacttgcatctattggggagtgagcaagtttgttttgaatgatccttcattgccaaagtcttatcgtaagaagaaaaaggtcagtagttgtttatcatgcttcctttttcccccttactcaaaataatatgctaacaaaccaggaacttcataatgatttctggttaactgaaacgcatgggcacacatccatgagtcccccaccgctacatgcctcacgcctcgtcactgagtcgttcttagtcacgacatgctgatgtcgatccacccgtcaagaacaaggtgcagcagagatctttctcctcgtcgctgcttcctcgccatccggagatggtcgtcgccgcctaatatcacagcggtgggaaggcacaacgctcccccatctcctccggttctgcctgctcgccagcacgacgcgacgatgcccccctgacccccgcgcgcacagcctccgctggagaagcgacaacgctctcgtctccggtctccatgagtcagcctccaatccatttccatgccaggtatttacctaacgtacattgaacctgcacacaaccctgtctgtgagaccagaaggtagatttcttcaaggggaacaatgtggtgtaacttcatcagcacaaccactttgctgaaggtgtccggatcatgatgcagacaacaactggtgtactcattcccactttgatggtaatcgaaatggagacaaacacaattggagggaaaatatccaaagacaaaaggagtgagttttcacttcttcagattccaccaatcagaataagaactagacatcatagagaccaacttttggtaagagcaacaaaaaactggactactaaaatttactagcgtgatcttcaactgtcctgttaccaatattttttggggtctattatggatagcaatatgcatttgttctttgtacagagatttttcctcgcaatattatgttcgtttggtcatttgtaattattagcagtaaataaacgccatttgcttcaacggttctaggttgtacacaggtaaaggaacaatcgattaccaatgactaagggtattcataaattatgc

SEQ ID NO: 211763 - DNA, 2107 bp, Zea Mays
cttcgacggtgtcgtcgccgtttttgccgatcgtcagcatcactgtcgtccgcttcgcttggatgcaccgttgcgaacatgcagctagacgcgtgcacatcctttttccgtaataaattcgtctgtatcatcatccaccgtctggtcttgttctgctcaacacatatacgtggttgcgaaccatgcgactagacgcgtgggggatttcaattgacgagtatgagaaacatgaatggccgatcgatcgtgcaggtcgattgaacaaattgctcaagagatttcaaggctaccattgcttgctcgctgcaaatactactgcagtatatttagattgtattgtacaatgttataggaaattaacaatgcatacatgtaattttgcaggctgttcaaccacttcatcgtctttttgactgcctcacattgaaggaactttgcagcggactgttatatgatctatgaaagaatgcatgtaggaaatatctgtgaatgctacttatattttgttatgcctccttggtcattattctgaaccatagaacatgatctatctccagttgtattttccccttctatggaatcaccattgttggttagtggcaacaagatctccagtctgatactgatgaagaaactacaaaagaacacatagccaccatcaatcaagacaaagggaaaactaccattacctcaattggatttctggtttttgggctatcattggatttctggttaactgaaatatgtaccttgcagtagctctatgtctctatatggcattatggtgtctaaaactggatcattatattttcatttgagtgaaattcttatcaaatgttgaaccttcaggctccagcttgatctggttcatgttttttctagattaccccagttgatgaagcaaagaaattatacctgttatttggccttggggctaatgttgccattatcttttctggccgtacaatgaagtatttctcaaatttgcgcaagacattgggtcctggaatgatgagcatagtggtacttcttgaacttgcatctattggggagtgagcaagtttgttttgaatgatccttcattgccaaagtcttatcgtaagaagaaaaaggtcagtagttgtttatcatgcttcctttttcccccttactcaaaataatatgctaacaaaccaggaacttcataatgatttctggttaactgaaacgcatgggcacacatccatgagtcccccaccgctacatgcctcacgcctcgtcactgagtcgttcttagtcacgacatgctgatgtcgatccacccgtcaagaacaaggtgcagcagagatctttctcctcgtcgctgcttcctcgccatccggagatggtcgtcgccgcctaatatcacagcggtgggaaggcacaacgctcccccatctcctccggttctgcctgctcgccagcacgacgcgacgatgcccccctgacccccgcgcgcacagcctccgctggagaagcgacaacgctctcgtctccggtctccatgagtcagcctccaatccatttccatgccaggtatttacctaacgtacattgaacctgcacacaaccctgtctgtgagaccagaaggtagatttcttcaaggggaacaatgtggtgtaacttcatcagcacaaccactttgctgaaggtgtccggatcatgatgcagacaacaactggtgtactcattcccactttgatggtaatcgaaatggagacaaacacaattggagggaaaatatccaaagacaaaaggagtgagttttcacttcttcagattccaccaatcagaataagaactagacatcatagagaccaacttttggtaagagcaacaaaaaactggactactaaaatttactagcgtgatcttcaactgtcctgttaccaatattttttggggtctattatggatagcaatatgcatttgttctttgtacagagatttttcctcgcaatattatgttcgtttggtcatttgtaattattagcagtaaataaacgccatttgcttcaacggttctaggttgtacacaggtaaaggaacaatcgattaccaatgactaagggtattcataaattatgc

SEQ ID NO: 211764 - DNA, 2198 bp, Zea Mays
aataaaaaaaaaaccgcccatagcgcgcaggacaggccgtacggcgtacggtgtcggcggacggccgcgatgggcgggggcgacgacgcggcggcgggcgttggagacgggttcgcgtgggatgccgactcccagctctactaccacgccagtactgctttttaccatgaccctgttgctggatggtactacagcagcagagatagccaatattacgtctacaaaaatggaaattacatgccattgacaacagatctggaaaatgaacccacagccaatcatccatatgatgaggccaaccaagatgtcttggaacactcttcaggcttggaaacaactatacttgacaatgagaatgaaataccaggacctccatcagaatggatggaggaaacactgataaacttgtatttgtcaggctactcaaacaatgaagtcaatgctgaaagttcactagtaatcgcacattcaaatgaggaagacagaattgaaacaaccgggaacaaactagatagcttgacctcggacagtgcttcagcctctctgcatgatgctacatcacagcaaactgaagttgaaacagaaacaaagaattccgcttatgtgtatgaatctttgggggaagaggaagagaaatggcacgctcagtatggtcaggtcgagaggtcaaatgatgatcaacatttacctccaacaattgatatatgggattgggatgtggtccaagaccatgttaacaaaggtcagcccgtggttaggcttgtgggatgtttatctaggggttcaaataagcttcatccttctcttcctactcgtggtggccttgtaaggactgctcctgtgcgtgaagttcatcttgacctcgtgcaagtttcaacaggtaatattggctatggctaggttctatgaagactgagcatgtgccatttgggagaaaaaggaagctgtacaggctaaggaaccctagcagaaagtacttagccactttatccgcatatgactcctccaacccaacaaaggattgggggtttcctgatattaatttgaataagcaatccactgcaaagtgccaatctgaagttcttgctgataaatcttgtggcggaggaagtgtctcagctgctaataccatggagccgaacacaaaagtttacagggacagagctgctgagagaaggatcctacatcgtggcttaggggttgggcctggacagaagcagagtaacaccaacaatttcgatgaatacgaggaatcaatcgaggacatggattcaatgggagttgcgtcagctgatttgaatttccaatccagcggtttgctttcggctaagagaataatggagaacatgggctggaagcagggagaagcccttggaaaaagcagaaagggcattgtagaacctatacagccttccatcaacaaacatggtgccggtttgggatggaggcaaacccgctaagatgttcctttgaagattccagtctttgtatttgtatcctctgaagcctgtcagatttggtgttcttaattcaagtgcaactacaacggaagaattgaggcaactgacttgtgcttgctgcttaaatctggcgtttttttggacagcagtatattcacaggctttcccttctcatttttcttctcatgggcacgagagtaatcagctggggctttgttcttgttcttgtcaccaccttgtctgctcctcttcttatagatgggcttttttatcttgtatgagctagcatttacttcgatgctttgccatttggatgagcattgaagtttgtcttcacaacctcatcttgtgcctcagcgacttgcatgacatcgatcagttcgttgtatggattgtaagcatcttgtaagtagttgcgagtactttagatagcgctcgggtggaaagtagataagtctttttcctatcttttcctgatctgtgataactttatcacaaagtgacaagttggtacaaatttgatgtaaggttgaattatattcatccacggttttgtaaccaacaaacataaggcatgcctaatcttgttatgctttgggttagatcatgtacttaaacttctcgaaccagtttttcaatgtggcccagaggccgcttgccttcttttctgccatgcattcattttttagtgttggcaagagatggtgctataaaaaataaatgtgtgtttggtcattt

SEQ ID NO: 211765 - DNA, 1871 bp, Zea Mays
aattttccctcattttcctggggctgctgcgccgcgcttctctctctcgccttctccctcttcgcggcgatccgggttccgctgcaacggcccctgtcgactgtcgtcttctcttctccctcacggcgctcgatccctccggattgccgcgtagcgggatcagtgattcagctggttgaacagaactagtaaagatgtcatcagaagggaacaaagatgtgcctaatgaagctttgtccgtggatctgtcatcgatttctggtgcaaagcgcaagcgtggccgcccaaggaaatatgagcatcctgcatatgaactaccacagaaggtacagcccctccaaagcgccccgcctcttcactgctcacaagatggctcaagtatggccagccatacatcaggcggctatgctcatggtagttggtccgcacaacctaggaattcggttaatgcttctattcaaggtaattctggcaaggatgacgttctcggcaagcattttgttggcaagctgaccaagaaaatccctgggttttccctcattacggtaaaagtgaaggacaatcaggtgctcaaaggttgggttccagatgaaattaatctccgtccaataacacctaaggatgaccttgccccagagctacccatgcttcgaccgagtcatgttcggaagcgagcatcagcaatccacatgcaaacagctcttactgtgccattgcacttggaggatattacacttgcaaagcctctgcagatgaggaggcctgtcgaggaaactattgctaagcactctgtgcctcttgctcctaggccttacatgggttctggtgttgttgcgccagtacctatatcagttgcacttgcacccaataatcctgaattgacaagtttgaccaggcaggatgctgaacttgtcatcccacaatcatcagttgctgcagtgccaattacatctgttcctccatgcaagcaactggctaatcaaaacgagtttactgaaaagaattatgttgatgagtttcagaaagattcagaatctcgaaatgtaaccaaggagttaccaggggaaaggcaacagcttaatgatcaagtgacagatgtggttacagaatcttctggtcaaatccagaatactgatgcaacagtgtctgataagatcaagataacatcaggcacaatataattttatactcctgatttctgattccatattattttgttaaaacttaaaagtgaccattaagtgggggttttcttcaggcgccagagatcagccaaatcctgcaaatagtgagcagcatgagcagcagagttctaaggaaccatcaggtgatatatgatcccaatgtttcacacacttaaaaaaactggccatgatcttatatcgtgggtatggaaatttagacatcacagaacaatatgagcagatgaagacagagaccgatgtccaaaaaggagttgatgcctcaaagtcagatgcctcagttccagatgacattcagcctgcgtgtgatgaacaagaaatcaaggttggctgtaaatgaaagtagagatcaagattcaagaaacacaacacagatcatgatgtttctgtcaggcgtattgggatgtggagctggagttttactgaatggcccaatgctttaggtgtaggcccatttttttacattttagattaagtagagatacatatttttttaaaaaaaaccaacaaacagcagtgtagcacagatagaatcgcaaacgagaaaaaaggagacagaaacatacttggtcttttcaattttaggaagatggcatgccttaaaagttaattttgaactcctaatcttgtaatataactttgggcccgtttggttcctttaaaaaaaga

SEQ ID NO: 211766 - DNA, 2453 bp, Zea Mays
aattttccctcattttcctggggctgctgcgccgcgcttctctctctcgccttctccctcttcgcggcgatccgggttccgctgcaacggcccctgtcgactgtcgtcttctcttctccctcacggcgctcgatccctccggattgccgcgtagcgggatcagtgattcagctggttgaacagaactagtaaagatgtcatcagaagggaacaaagatgtgcctaatgaagctttgtccgtggatctgtcatcgatttctggtgcaaagcgcaagcgtggccgcccaaggaaatatgagcatcctgcatatgaactaccacagaaggtacagcccctccaaagcgccccgcctcttcactgctcacaagatggctcaagtatggccagccatacatcaggcggctatgctcatggtagttggtccgcacaacctaggaattcggttaatgcttctattcaaggtaattctggcaaggatgacgttctcggcaagcattttgttggcaagctgaccaagaaaatccctgggttttccctcattacggtaaaagtgaaggacaatcaggtgctcaaaggttgggttccagatgaaattaatctccgtccaataacacctaaggatgaccttgccccagagctacccatgcttcgaccgagtcatgttcggaagcgagcatcagcaatccacatgcaaacagctcttactgtgccattgcacttggaggatattacacttgcaaagcctctgcagatgaggaggcctgtcgaggaaactattgctaagcactctgtgcctcttgctcctaggccttacatgggttctggtgttgttgcgccagtacctatatcagttgcacttgcacccaataatcctgaattgacaagtttgaccaggcaggatgctgaacttgtcatcccacaatcatcagttgctgcagtgccaattacatctgttcctccatgcaagcaactggctaatcaaaacgagtttactgaaaagaattatgttgatgagtttcagaaagattcagaatctcgaaatgtaaccaaggagttaccaggtaagttttgctggattggtgttctgttgtgtttcagatcattgacttgaatctcgaaactgttgtcccgcagactgtatctcccgtctgatttttcaatctcatgagtcttaatgacttccatattaatgcttgtaaatttgtccttatgtaatgaaagctggaaaaaacaaacattgttcttgtggatggagttgccaaggattctccaggtcaaatctagtttaggtgctaccttttatataaaattaaaatgaagaatgtctttgggttgaaagagacttcaactaaacgtaacctgatctcattccctttttttggtccctacaggggaaaggcaacagcttaatgatcaagtgacagatgtggttacagaatcttctggtaagatctagaattttatgtttgaagtgtaataattggcatagtgcatgtagacggaagtctccatagctctttctcctggcaggtcaaatccagaatactgatgcaacagtgtctgataagatcaagataacatcaggcacaatataattttatactcctgatttctgattccatattattttgttaaaacttaaaagtgaccattaagtgggggttttcttcaggcgccagagatcagccaaatcctgcaaatagtgagcagcatgagcagcagagttctaaggaaccatcagacatcacagaacaatatgagcagatgaagacagagaccgatgtccaaaaaggagttgatgcctcaaagtcagatgcctcagatgacattcagcctgcgtgtgatgaacaagaaatcaaggttggctgtaaatgaaagtagagatcaagattcaagaaacacaacacagatcatgatgtttctgtcaggcgtattgggatgtggagctggagttttactgaatggcccaatgctttaggtgtaggcccatttttttacattttagattaagtagagatacatatttttttaaaaaaaaccaacaaacagcagtgtagcacagatagaatcgcaaacgagaaaaaaggagacagaaacatacttggtcttttcaattttaggaagatggcatgccttaaaagttaattttgaactcctaatcttgtaatataactttgggcccgtttggttcctttagttctgagactaaagtttagttatgagactagagtttagttttggttttatggactaaaagtattcaaaacgcattaaatgaatcataagaccgtctgtagcagtctactcatagtttacctaaaattactgttttacactttctgcactgtagactgtaccattcgtagagtagagtttgaatatgagtatgaggatatgtaagctgttggagatagtctaagaggactaaaatacccttaagcattcttttgat

SEQ ID NO: 211767 - DNA, 2423 bp, Zea Mays
cttaatcttaaagtcagtcagtccccgggccttgctctccctccacttccgccgcgacgatctcctcccacccgtagaccaacaacaacggtactaaccagtaccagccccgcatgcctctcgcggcggctgccgcggccgttgccgcatgtccttcgccgatcggcctcacccgctctttgtgccgtatcgaggcgcatccgcggcgccggcggaggttccggttggaggcaaattcgtcggcgtctacgtccgctcccgcgccgaccgcggcggatgagggaggcggagcggggttgtgccctgtggtcaggttcgacatggccgacttcaccgtcgccgaccgcgtcagcgtcgggctccatggacggtcggatgagatgatcttcgaggccacggtgtgcgatccgagcagcgagctgtatgggtcaacggtggtcctgcggcagctgaagagtttgcaggcgaagcgcagggggcgtcgcgctctcgaggtgctgaagaagctggctcgtcgccaaatgatgtaccactcctacgcacttcaggtccatggttacattgctccgtgcaatgccgtggaggaggaagatgtcccgttagtattggttcatgggtatcatgggagtcattccctgcgtcactggttgcaactctcagattggatcccaaccttagaggcaacattagcgttggacgaagaacaagtgaggagggtaggagatgactctgttggaggaccagctgtaactcgacagctgcgtcttatcaggatattgatgagagaccttttgattggtgtaaattatctacatagccatgggctggcacacaccgagcttaggatagagaatgttcacgtgagcccaatagacaagcatgttaaagtcggtattcttggaaatgctgctgattttcaagacaatgatcttagcagcagtacaattgcaagtaacaatgacaggcggaaaatgatgatagcctttgacatgagatgtgttggcttcatcatggcaaagatggttttgagagagctaatggatccttcgactttctttaaattcaaatcattcctgacaaagggaaatgacccatcctgtttgcgtgagttcctactaccaaccctctaccaaaattctccatctgggaatattggtttgcagatgctagataggcagtggggtgctggttggaatcttttagccttattgctggcaacaaaaccagaggaaaggataagttgtgttgatgcattgcgacacccgttcctttgtgggccaaaatggcgtataaatccgtcagcaaatctcattcggtggggcttgggatcaactgctgtccgcatggctgaagattatatatatgggcgtcatcagcgtagacgtttatcatattttgttgaattgatggaggttctaaaccctagtttaagaacacagaattggcttcacctcctacctggtcgttggcgcctcttgtactgcactggacgacacattggcctaacacttcgtcagccttcccctagaaattatgccagaacccaattggcctcacgacaaatctggcagtgagggagttttgtctgtcaccgcatcagcaaggatagctgctggtaggatttatattaacgaacatgacagtaaagaggatatggtcacatcttctatgagatatcttcatggtaataaatggagaaaattctcgcaaataaaggagctgccatctagtctccctgcagtaaacattgctatggatgaaatccacgtatcgataagctgcacctcgactatgacagttaattctgcacaaaaggcgctgaaagagatccgtacacaaaccccgccggaaatgttcgatttgtcaaagattgtttgtgggacatacattgatgcgaggttgatgattcttcgtggtgttaacgggtcggctctgctcttcactagagcaaatccaatgattgacacctgaggagactccgtccgccgttatataaggccttgttcggttaatcccgttacctatggattggatgagattggaaaaaaatatgaagaagtttgacttacttgtgatttaaacccatccaatctcactcaatccacatggattgagagctaaccgaacaagccctaacgctgtattctttctttccctgtacattattatgtatttctagccgtacaatcaatttgtaacgagtgtagataacaaggtgtgtaggccatagttagaacgttgaaaattccttctcaagatgatctgttgcttccaagtacggagccttgacagggcttgagctgataaattattactctttccgtttcaaaatgaataaaattcacagttattgaggtcaacttcaaatttatttgcgtagcgtctcaccgtcaatggacactagaacataatactaaagggtg

SEQ ID NO: 211768 - DNA, 2494 bp, Zea Mays
gtgggggtgaggcggacgcgcgcagggctcatggcagctatcgctctgcctcttcccggcacgcaaccacctcacgcctctgcctcttcttaatcttaaagtcagtcagtccccgggccttgctctccctccacttccgccgcgacgatctcctcccacccgtagaccaacaacaacggtactaaccagtaccagccccgcatgcctctcgcggcggctgccgcggccgttgccgcatgtccttcgccgatcggcctcacccgctctttgtgccgtatcgaggcgcatccgcggcgccggcggaggttccggttggaggcaaattcgtcggcgtctacgtccgctcccgcgccgaccgcggcggatgagggaggcggagcggggttgtgccctgtggtcaggttcgacatggccgacttcaccgtcgccgaccgcgtcagcgtcgggctccatggacggtcggatgagatgatcttcgaggccacggtgtgcgatccgagcagcgagctgtatgggtcaacggtggtcctgcggcagctgaagagtttgcaggcgaagcgcagggggcgtcgcgctctcgaggtgctgaagaagctggctcgtcgccaaatgatgtaccactcctacgcacttcaggtccatggttacattgctccgtgcaatgccgtggaggaggaagatgtcccgttagtattggttcatgggtatcatgggagtcattccctgcgtcactggttgcaactctcagattggatcccaaccttagaggcaacattagcgttggacgaagaacaagtgaggagggtaggagatgactctgttggaggaccagctgtaactcgacagctgcgtcttatcaggatattgatgagagaccttttgattggtgtaaattatctacatagccatgggctggcacacaccgagcttaggatagagaatgttcacgtgagcccaatagacaagcatgttaaagtcggtattcttggaaatgctgctgattttcaagacaatgatcttagcagcagtacaattgcaagtaacaatgacaggcggaaaatgatgatagcctttgacatgagatgtgttggcttcatcatggcaaagatggttttgagagagctaatggatccttcgactttctttaaattcaaatcattcctgacaaagggaaatgacccatcctgtttgcgtgagttcctactaccaaccctctaccaaaattctccatctgggaatattggtttgcagatgctagataggcagtggggtgctggttggaatcttttagccttattgctggcaacaaaaccagaggaaaggataagttgtgttgatgcattgcgacacccgttcctttgtgggccaaaatggcgtataaatccgtcagcaaatctcattcggtggggcttgggatcaactgctgtccgcatggctgaagattatatatatgggcgtcatcagcgtagacgtttatcatattttgttgaattgatggaggttctaaaccctagtttaagaacacagaattggcttcacctcctacctggtcgttggcgcctcttgtactgcactggacgacacattggcctaacacttcaattatgccagaacccaattggcctcacgacaaatctggcagtgagggagttttgtctgtcaccgcatcagcaaggatagctgctggtaggatttatattaacgaacatgacagtaaagaggatatggtcacatcttctatgagatatcttcatggtaataaatggagaaaattctcgcaaataaaggagctgccatctagtctccctgcagtaaacattgctatggatgaaatccacgtatcgataagctgcacctcgactatgacagttaattctgcacaaaaggcgctgaaagagatccgtacacaaaccccgccggaaatgttcgatttgtcaaagattgtttgtgggacatacattgatgcgaggttgatgattcttcgtggtgttaacgggtcggctctgctcttcactagagcaaatccaatgattgacacctgaggagactccgtccgccgttatataaggccttgttcggttaatcccgttacctatggattggatgagattggaaaaaaatatgaagaagtttgacttacttgtgatttaaacccatccaatctcactcaatccacatggattgagagctaaccgaacaagccctaacgctgtattctttctttccctgtacattattatgtatttctagccgtacaatcaatttgtaacgagtgtagataacaaggtgtgtaggccatagttagaacgttgaaaattccttctcaagatgatctgttgcttccaagtacggagccttgacagggcttgagctgataaattattactctttccgtttcaaaatgaataaaattcacagttattgaggtcaacttcaaatttatttgcgtagcgtctcaccgtcaatggacactagaacataatactaaagggtg

SEQ ID NO: 211769 - DNA, 1139 bp, Zea Mays
taccagcaaatccatgtacgtacgtcggtgagccctgaactgtacggagatagcagccccaggttcttcacatattggacgaccgacgcataccaggagaccgggtgctacaacctgcactgctccggcttcgtccagacgaacaaccggatcgccattggagccgctatctcgccgacctcggtctacaacggccggcagttcgacatcagcctgctcatatggaaggacccacaccgggggaactggtggctgcagctggggtcgacgggtcagctggtggggtactggccgtcgttcctgttcacgcacctgggcgggcacgccaacatggtgcagttcggcggcgaggtggtgaactcgcggccgtcggggtcgcacacgcccacgcagatggggagtgggcacttcccccgcgagggctccaaccgcgccgcctacttccgcaacgtgcaggtggtggacggcgacaacagcctcgtccccgccgccgcgctccgcctcgtcgccgaccacccggcctgctacgacatccagggcggctacaaccgcgcctggggaaactacttctactacggagggcctggcaggaacgtgcactgcccgtgatacatgatccggccggcgaccatgcatgcatggcgatggcatgaactgaatgaacgaagaagcagatacgtgcacagatacatatatatatatatactactacagagattcagagacggatcacagtatgcggccgtgccggaggattgatctctagtgggatcgtcgtcgccgctcatcaaccggacatggatcctatatatataggagcggtgctagtcgttatagcttagccatagtccctcgtttggttactgcgcatgctaatgagtaatgagtttttagtcgcccagcccagctgcgtacacgcgcgccgccggccgggccggtagtagcacaggcaaaaggtttcgatttgatgtatgtgaggcttctttcgtttgcatcggtctgatttttttttgtcttgagttctgtatacatgaagaaatccacagagtattttgatcaacatgcgtatatatagtacgaaccatgcatccacactgtgtttaataactattcctttgcatttgctactgatttcgaac

SEQ ID NO: 211770 - DNA, 1271 bp, Zea Mays
atatactcatctttaagccacatgcatgtgtgttggtggtttgacgtggaatttagtttaagatctacagcaaaccgcttgggctcccggccggaggtggtgtggtgtagaactggtgctcattaattagattccatcactgtgaccccgattggaaatgtgagccctgaactgtacggagatagcagccccaggttcttcacatattggacgaccgacgcataccaggagaccgggtgctacaacctgcactgctccggcttcgtccagacgaacaaccggatcgccattggagccgctatctcgccgacctcggtctacaacggccggcagttcgacatcagcctgctcatatggaaggacccacaccgggggaactggtggctgcagctggggtcgacgggtcagctggtggggtactggccgtcgttcctgttcacgcacctgggcgggcacgccaacatggtgcagttcggcggcgaggtggtgaactcgcggccgtcggggtcgcacacgcccacgcagatggggagtgggcacttcccccgcgagggctccaaccgcgccgcctacttccgcaacgtgcaggtggtggacggcgacaacagcctcgtccccgccgccgcgctccgcctcgtcgccgaccacccggcctgctacgacatccagggcggctacaaccgcgcctggggaaactacttctactacggagggcctggcaggaacgtgcactgcccgtgatacatgatccggccggcgaccatgcatgcatggcgatggcatgaactgaatgaacgaagaagcagatacgtgcacagatacatatatatatatatactactacagagattcagagacggatcacagtatgcggccgtgccggaggattgatctctagtgggatcgtcgtcgccgctcatcaaccggacatggatcctatatatataggagcggtgctagtcgttatagcttagccatagtccctcgtttggttactgcgcatgctaatgagtaatgagtttttagtcgcccagcccagctgcgtacacgcgcgccgccggccgggccggtagtagcacaggcaaaaggtttcgatttgatgtatgtgaggcttctttcgtttgcatcggtctgatttttttttgtcttgagttctgtatacatgaagaaatccacagagtattttgatcaacatgcgtatatatagtacgaaccatgcatccacactgtgtttaataactattcctttgcatttgctactgatttcgaac

SEQ ID NO: 211771 - DNA, 3179 bp, Zea Mays
cgcagttccgcgaaccggtcgtccgctcgcaagcttttgccgcgatgcccgagcccgaacaagcagcgccgcgggcccgaggccgtccacgtcccactcgcagctcctccattcccgcgcgtccgctccaccgcaacgctccgcgaacccgttcccttcaaagcggtcacctcctcccccgacccctcgctggcgtcgcctcccatctcctgcctgcccttcacctcctgtccaccctccccctgtcgttcccgcaattccggctcacatgaccgtccgggccgcggccgtgctggtggccaccgccgcgctcgcgctcctgctcccgggatgggcggcggcggagtggagcctcacgaagaaaggcagcgtcgtcacctacgatgggcgctctctcatgatcgacggcaagcgggacctcttcttctccggcgccatccactaccctaggagcccgcctgagatgtggccgaagctgatcgagcgggccaaggagggcggcctcaacacgatcgagacgtacatattctggaatgcacacgagcctgagcctggcaagtacaattttgaaggcaggttcgacttgatcaagtacctcaagatgatccaggagcatgacatgtatgcaattgtgcgcatcgggcccttcatccaggcagaatggaaccatggtggtctgccgtattggcttagagagattgaccacataatattccgggcaaacaatgacccgtacaagaaagaaatggagaaattcgtgagattcatagtgcagaagttgaaggatgctgagttatttgcatcgcaaggaggacccatcattctaacacagattgagaatgagtatgggaacataaaaaaagatcatgcaacagatggtgacaagtacctcgagtgggcagctcaaatggccctcagcacacaaacaggagttccatggataatgtgcaagcagtcttcagctcctgatccctacatgcaatggaaggcattgtggagacacatggacacttcgcgacaaaaacaagcctatgctttggactgagaattggactcaacaattcagagcatatggcgatcaagtagctatgcgttcagctgaggacattgcatatgctgtgttacgattttttgcaaagggtgggtcattggttaactactacatgtaccacggaggaacaaattttggaaggactggcgcttcttatgtgctgactggatactatgatgaagctcccatggatgaatatggtatgtacaaggagcccaaatttgggcatctcagggacttgcacaacgtaataaggtcatatcaaaaagcattcctctgggggcaacattcgtctgagatattgggtcatgggtatgaggcacacatctttgagttgcctgaagaaaagctatgcctctctttcctttccaacaataacacgggcgaagacggaacagtgatcttccgaggggataagcactatgtgcctagccgttctgtctccattcttgctgggtgcaagaacgtagtttacaataccaagagagtgtttgtacaacacagtgaaaggtcattccatacctcagatgtaacaagcaagaataaccagtgggagatgttctcagaaacgatcccaaagtatcgtgatactaaagtcaggacaaaggaacccctggagcaatataaccaaaccaaggacgatactgactacttatggtacaccacaagctttcgcttggagtcggacgatttgccctttagaaatgacatccggcctgtgcttcaggtcaaaagtagtgcacacgcaatgatgggatttgctaatgatgctttcgtaggatgcgcgcgcggaaacaagcaggtgaagggtttcatgtttgaaaaaccggttgatctgaaagtaggtgtgaaccatgtcgtattgctgtcgtcaactatgggaatgaaggatagtggtggtgaacttgctgaagtaaagggcggcattcaggagtgcctaatccaaggtctcaacactgggacgttggatttacaagtcaatggctggggccataaagctgcactagaaggtgagtacaaggagatctactcagaaaaaggtttgggcaaagttcagtggaaaccggccgagaacgaccgggcagccacttggtataagagatactttgatgagccagatggagatgatcccgttgtacttgacatgagctcaatgagcaagggaatgatttttgtgaatggcgaaggagtgggtagatactgggtctcataccgaactcttgctggaactccttctcaagcagtgtaccatatcccgcgtcctttcttgaaatccaaggacaaccttttggttatcttcgaggaggagatgggcaagccggacggcatcctcgtgcagaccgtgacgagagacgacatatgcctgtttatctcggagcacaacccgggacagataaagacgtgggacacggatggtgacaagatcaagctcattgcagaggatcacagcaggcggggcaccttgacgtgcccccctgagaagacaatccaggaagttgtctttgccagcttcggcaacccggacggcatgtgcggcaacttcactgtaggcacttgccacactcccaatgcaaagcagatcgttgagaaggaatgcctcggcaagccatcctgcatgctgccggtggatcacacagtgtacggcgcggacatcaactgccaatcaacgactgccacgctaggggtgcaggtgagatgcggaggcggcaagaagggtgcctgagaacaagacggatgctgctaattgacgtttcagctcgtttgtttgttcgtcccttcggtttggcactgatgcttatgacccattggtctgccattgcaattgaaatgtggttggaacgtgcttgatcgggaactaacatgaaatgagtgaagggtagatgctgatctgaaaaatatgtgtgttcccccctctttccttccatgtcgtgttgtttcaggtaaccgtcacaatatatataggtggtcccctttggaatccggggattattccgtttgctgtatttttttctgtgaaaatgaactgattcctgtcaattttctatatgatttatgattcatctgaaattcctgagaccgatgttgaataatcatcatgcaatgagtgaagggtagatgttgaattatc

SEQ ID NO: 211772 - DNA, 3558 bp, Zea Mays
aaaaccaaaccaaaaaccgatggaatgaaaagtcgtattccattcagtttttgtctactaactagggtttgccgcggatccggtccctcctccactaacataagtcgccatccccgccgctgcagttcgagctccgaccggtcccacgccggatctacccggtgtcgtcctcgactttcgccgttagtcccctcaaggaaaggaaagaaggagagggatgacgtggttccgcgccgcatcgggtgccgcccgcctcgccctccgccgcagcctcgccacccgcacgccgccagccgccgccacccgatgcggccgctgcttccactccaccgctatgcgtccccgctccgccgcccccgtgccccgggccgtcccgctctcgcgcctctctgacagcttcctcgacggtaccagcagcgtctacctcgaggagctccagcggacctgggaggctgacccttcctccgtcgacgagtcatgggacaacttcttccgcaacttcgtcgcccaggcctctccttccgccggcgtctccggccagaccatccaggagagcatgcagctcctcctcctcgtcagggcctaccaagtcaacggccacatgatggccaagctcgaccccctgggcctcgacgacagagccgtccccgaagatctccgcctcggcctctacggcttcacagaggccgacctcgatagggagttcttcctcggcgtctggaggatgtccggttttctctccgagaaccgccccgtgctcacactccgtgagatcctcaacaagctccagcaggcatactgtggacccatcggctacgagtacatgcacatccctgatagagacaagtgcaactggctcagggaaaagatcgagactgccaagcccaaggaatataacaaggaccgccgccttgtcatgcttgacaggcttatctggagcacccagtttgagaatttcctagccaccaagtgggccaccgccaagaggtttggccttgagggtggtgagacgctcatccctggcatgaaggagatgttcgatagggctgctgacctcggtgttgagaacattgtcatcggtatgccgcataggggaaggctcaatgtccttggtaatgtcgttcgcaagccactgtctcagatattcagcgagttcactggcggcacaaggcctgttgaaggcgaagatggtctctacaccggaactggtgatgtcaagtaccacctgggtacctcctatgatcgcccaactcgaggcggcaacaggatccatttgtccttggttgccaatcccagccatctggaagccgttgatcctgttgtcattggcaagacgcgtgctaagcagttctactccaatgatgctgacaggacaaagaacatgggtattctgatccacggagatggcagctttgctggccagggtgtggtctatgagacactccatctaagtgccctcccaaactacactactggtggaaccattcatattgttgtcaataaccaagttgcctttacgactgatccaagagctggcaggtcctcccagtactgcacagatgttgccaaagccctgaatgctcctatattccatgtaaatggcgacgatttagaggctgttgtttgtgtttgtgagcttgcagcggagtggcgccagactttccactccgatgtggtggttgatctgatttgctaccgccgtttcgggcataacgaaattgatgaaccttccttcacacagccaaaaatgtatcagaaactgctaggaacgggtgaagtcatgaaagaagatgtccagaggatccatgacaaggtgaaccgaatcttgaacgaagagtttgctaagagcaaagactacgttcccaacaagagggattggctctcagcttactggactggctttaagtcaccagagcaaatatcacgtgttcgcaacactggggtgaagcctgaaatactgaaacgtgtaggtcaggcaattactacactgcctgaaaacttcaaaccacacagagcagtgaagaagatttttgagctgcgtgcagctatgatagagagtggtcaaggaattgattgggctgttgctgaagccctggcctttgcaacacttatagtggaaggcaatcatgttaggctaagtggacaggatgtggaaagaggaactttcagccatcggcatgcagttctgcatgatcaggaaactggagcaaagtactgtccacttgaccatgttgcaatggatcaaaatgaggagctatttactgttagcaacagttcactttcagagtttgctgttcttgggtttgaattgggttactccatggagaaccctaattcattggtactttgggaagcacaatttggcgattttgccaatggtgcacaagtgatgttcgaccaatttttgagcagcggcgaggcaaaatggttgcggcaaaccggccttgttgttctgttgcctcatggttatgatggccaaggtcctgagcattctagtgcccgcttggagcgcttccttcagatgagtgatgataatccttttgtcatacctgagatggaaccaacacttcgcaagcagatacaagagtgtaactggcaagttgtgaatgtgacaactcctgcaaattattttcatctgttgcgtcggcagatacatagggagttccggaagccgctgattgtaacagctcctaagaacctgcttaggcacaaggattgcaagtcaaatctttcagagtttgatgatgttgaaggccatctaggattcgataagcagggaacacgtttcaagcgactgataaaggaccgtaatgatcacaagcaagtcgaggagggtgtcaaccgtcttatcttatgttctgggaaagtttactatgaacttgacgaagagcgtaagaagtcggagcgtggcgatgttgcaatttgcagagttgagcaactttgcccgttcccctatgaccttatccaaagagagctgaagagatacccaaatgcggagattgtgtggtgccaggaggagcccatgaacatgggtgcatacagctatatctctcctcgtctgtttactgcgatgaaggctcttgggcggggttcgtttgaagacatcaagtatgttggcagagcaccttcagctgctacagcaacaggcttcctgtcggttcatgcgcaggagcagtcagagctagtgaagaaggcactgcaggcagagccgatcaaattcctctgatgtatgcaccgtatctacagcaacaacctgcctgcatggttgcaggaacatgccagggattttcttttccccggccagttttgaggcttttcagcgttggaactaatgacgacttccttccttgaagacatcatattaattgccctaatcagctatctagtagttaattataaactacgtgcgaacagaccctggtttagctggcagttcaatttgagacctgggttcaaaaaaaaaaatctctgagtcgggtttaaggcagccagacaacacaggagttcagcttctgacccataataaaactatttatatttaataaaactatatttaac

SEQ ID NO: 211773 - DNA, 2242 bp, Zea Mays
cttcccctttactccctccctctccgagtctcacttcatgtgcgcaggtgcgcgccgtgctcgactttccggcttctcctctctcgccaggaaacaaaggccgtgctcgactttccgcattccggcgtcactgcgcgcaagcaatagcagtaggccccttctcctgttctaactgaggggtcgaggacaaagctcctcattgagttctccttcagtggggtttgatgcgaggtgctgccaaggtcatttcctcttgctgtgctccgcctctcgttcagataaagcggtcgggataagtttgtaaattgcttgtcaaatcaggacaagattctgaattaggggaacctaccgcatagtttgctcatcagacaggccgaaggacaatgtcatcgcctaacaattctgtcagcgcggcactgtcagaaacgacccccgtgtttcagttgagagtatggcaactgattgccattgctgtcgggatagtcatggcgatcctgctcgtcattgcgctttgcctttcgctccagaggaaaaagaagacagtgaaagggtttgacaacagttcgctggctgagatccctatcgtttctaaggaaatcaatgttgacagagttggtgctcagagtctacatgacagtgaagcgcccttcatgccagtgcgggataagtatacgcagaccaaaggtgcagggcagttgggagagagtagatccgtcgacgccgataccttcagccagttcagctcagtgtacaacgtagagaagggtgggagctcatactctgaagattacagtcacagcagctctggtccagctaggaaaggtagctcaccatatgcatattcagcatcaccgctggttggcctgcctgagttatcacatctaggctggggccactggtttaccttgagggacctggagtgtgcaacgaatcggtttgcaaagagtaatgttcttggggagggtggctatggagttgtctacaagggtcgtctggtaaatgggaccgagattgccgtgaagaagatccttaataatctggggcaggcagagaaggaatttagagttgaagttgaagccatcggccatgttcggcataagaatctggtccgccttctgggatactgcgtggaagggatacataggatgcttgtctatgaatatgtcaataatggcaacctagaacaatggcttcatggcatgaatcaacacggtgtccttagttgggaaaatcgtatgaaaattctccttggcactgcaaaagctctcgcgtaccttcatgaggccatagatcccaaagttgtacacagagatatcaagtcaagtaatatcttaattgacgatgaattcaacagcaaggtttctgattttgggttggctaaacttctgaattctgacaaaagtcatatcaatacaagagtgatgggaacatatgggtatgtagcacctgaatatgcaaacagtgggatgctaaatgaaaagagtgatatttacagtttcggagtggtgctgttagaatgtgcgaccgctagggatccagtcgattactctaagcctgcagatgaggtgaatctcatagagtggcttaaaatgatggtcaccagtaagagggcagaggaggtagtggatccaaacctcaatgttaagccaccaaaacgtgccctcaagcggacaatcctggttggtttcaagtgtgtcgatcctgacgctgacaagaggccaaagatgagtcacgttgtccagatgcttgaagcagttcagaatgcatatcatgaagatcaaagcaagctcagccaggtgggatcacagcagtcgctagaggagacctcaaacagcgctgatgcctgaacctcctattctgaacaagcacatcaaataggaccctgaatcatctgatagcaacattgatttgatcattgctcggcacttaatagagtgagcggtgatcggatttacagtttgggtttgcatatactggaggtggtggttaaatcaattagtagcaagttgtttctaaaaggttcatgtcttttacccttaggatatgtatagttttcctgtaggggagcatagaagcaccttcatctttatttgttgttcgagttacaaggagggactaacctcaggcatataactacagtcactggatttcgttacccatgtgtagtgactttttggaaagtcgttattaccctgagatatgaaaacatgaattcctgcaacgaagtactaccccgttctcg

SEQ ID NO: 211774 - DNA, 1717 bp, Zea Mays
ggcccatctacccacacactatcctctccctcagtgctcacgtctccaccggtccaccccctcggcagctcaatggcagctgcgacggcgccaccgccggcggcggttgccaccaccctctcgggcctcatgcgctgccagaacatccgtagcagcaggcctagagccttctacgcgaggtgcgcctcctccaacgcgagcgcggaggcggcggagagccggaagggaggccacggcgggacgcgcctggaggaagccgtgcccgtcggcgaggggcgctcgagggtagacgcctggatatcggcgcgtctcggcggcgggggcgttagccgcgcgcgcgtgcaggccagcatccgggccgggcttgtcgccgtcaatggccgcccggtctccaaggtttcgcatactgtgaagggaggggacttggtcagctgcacggtgtcagagctacagccgctgagggcagaggcggaggacatcccgctggacatcgtttatgaggatgaccatgttcttgttgtcaacaagccggctcatatggttgttcacccggcgccaggaaatgccaaaggcacattagtcaatgctatacttcatcactgcaagatctccacatttacctgtttagcacgcagctcagctggtgatgaatgcccggattctacggatgaagacactgatgtatttcatgtggatcagtttgctgctgaagatgtaagttcagaagtccggaatgctcttgtgcgccctggtattgtgcacaggctggataaggggacaagtgggcttcttgttgttgctaaggatgagcattctcatgctcgattagcagaacagttcaagctgcatacaatccgtagggtatacatcagtcttacttgtggcgcacctaatccaaattctggcaggattgaggcttctattgcacgtgatcctaacaatcggattcgtatgactgctattgctggatcaggccacagatatgcacggaatgctgctagtaggtacaaagtaagagaggtctttgctggtggcggatccgcactagttgagtggagactagagacaggacgcactcatcagatccgggcgcatgcaaagtacatagggatccctcttctcggcgacgaaacatatggaggtacccagagcatggcgttatcgctcctgagaccaaggagtccttcgaaatatcacagcggcctttcgaatctgttgtctaaagtggacaggccttgccttcatgctgcatcgcttggattcaagcacccacgttcaggaaaggtccttgagttctcgtgccccccgccagatgatttcttggaggtgcttggtgaattgcgacgtgttacgtctaggtccagtgatgccccaaatggtgatggtgttttccggtgagggagatggatagaaccaaggctgaggatgtggaacaagacatgggaacccttggagatttgttccaggctcctagaaagagaaaagtgtttcgtacgagttttcctgatggctggtggaagtgagagggaaatgagtaggagaatctgtatgctttcggctgggctcatcagtacacacgcatttgttttgggctccgattcatgggcttccagcaggaagaacttcacgggattcgattgatcgattcttcattcttttcttttcttttttttctcctactacagttgcccgccaatgctcggcgagcaaagaggcc

SEQ ID NO: 211775 - DNA, 1647 bp, Zea Mays
ctatcctctccctcagtgctcacgtctccaccggtccaccccctcggcagctcaatggcagctgcgacggcgccaccgccggcggcggttgccaccaccctctcgggcctcatgcgctgccagaacatccgtagcagcaggcctagagccttctacgcgaggtgcgcctcctccaacgcgagcgcggaggcggcggagagccggaagggaggccacggcgggacgcgcctggaggaagccgtgcccgtcggcgaggggcgctcgagggtagacgcctggatatcggcgcgtctcggcggcgggggcgttagccgcgcgcgcgtgcaggccagcatccgggccgggcttgtcgccgtcaatggccgcccggtctccaaggtttcgcatactgtgaagggaggggacttggtcagctgcacggtgtcagagctacagccgctgagggcagaggcggaggacatcccgctggacatcgtttatgaggatgaccatgttcttgttgtcaacaagccggctcatatggttgttcacccggcgccaggaaatgccaaaggcacattagtcaatgctatacttcatcactgcaagatctccacatttacctgtttagcacgcagctcagctggtgatgaatgcccggattctacggatgaagacactgatgtatttcatgtggatcagtttgctgctgaagatgtaagttcagaagtccggaatgctcttgtgcgccctggtattgtgcacaggctggataaggggacaagtgggcttcttgttgttgctaaggatgagcattctcatgctcgattagcagaacagttcaagctgcatacaatccgtagggtatacatcagtcttacttgtggcgcacctaatccaaattctggcaggattgaggcttctattgcacgtgatcctaacaatcggattcgtatgactgctattgctggatcaggccacagatatgcacggaatgctgctagtaggtacaaagtaagagaggtctttgctggtggcggatccgcactagttgagtggagactagagacaggacgcactcatcagatccgggcgcatgcaaagtacatagggatccctcttctcggcgacgaaacatatggaggtacccagagcatggcgttatcgctcctgagaccaaggagtccttcgaaatatcacagcggcctttcgaatctgttgtctaaagtggacaggccttgccttcatgctgcatcgcttggatggaaaacgaacaacaaacaagaggatcgctgggacctagtcaggcggttcatgtgaatgatagctattgtgatatatataacataaccagtcagtttgccagcaataaacatgtatttagatattacacttgttgtcttgttgatgcatctgagactacacctgcaatagctagctgaagttatgcattcgtgatgaacagaggtgcgaagggagagatgaaaagaagtgagtcaggttaattgaagtggtgataaatactaaaagaaaataaaaatgattaaaaagtggttggagtattattttaaaggatatgttcacttatgaatactatcacggagaaattaaaattgtaagtactaaaagagagaagcctaataaaatgaatatcataatagcaaaaag

SEQ ID NO: 211776 - DNA, 1667 bp, Zea Mays
ctatcctctccctcagtgctcacgtctccaccggtccaccccctcggcagctcaatggcagctgcgacggcgccaccgccggcggcggttgccaccaccctctcgggcctcatgcgctgccagaacatccgtagcagcaggcctagagccttctacgcgaggtgcgcctcctccaacgcgagcgcggaggcggcggagagccggaagggaggccacggcgggacgcgcctggaggaagccgtgcccgtcggcgaggggcgctcgagggtagacgcctggatatcggcgcgtctcggcggcgggggcgttagccgcgcgcgcgtgcaggccagcatccgggccgggcttgtcgccgtcaatggccgcccggtctccaaggtttcgcatactgtgaagggaggggacttggtcagctgcacggtgtcagagctacagccgctgagggcagaggcggaggacatcccgctggacatcgtttatgaggatgaccatgttcttgttgtcaacaagccggctcatatggttgttcacccggcgccaggaaatgccaaaggcacattagtcaatgctatacttcatcactgcaagatctccacatttacctgtttagcacgcagctcagctggtgatgaatgcccggattctacggatgaagacactgatgtatttcatgtggatcagtttgctgctgaagatgtaagttcagaagtccggaatgctcttgtgcgccctggtattgtgcacaggctggataaggggacaagtgggcttcttgttgttgctaaggatgagcattctcatgctcgattagcagaacagttcaagctgcatacaatccgtagggtatacatcagtcttacttgtggcgcacctaatccaaattctggcaggattgaggcttctattgcacgtgatcctaacaatcggattcgtatgactgctattgctggatcaggccacagatatgcacggaatgctgctagtaggtacaaagtaagagaggtctttgctggtggcggatccgcactagttgagtggagactagagacaggacgcactcatcagatccgggcgcatgcaaagtacatagggatccctcttctcggcgacgaaacatatggaggtacccagagcatggcgttatcgctcctgagaccaaggagtccttcgaaatatcacagcggcctttcgaatctgttgtctaaagtggacaggccttgccttcatgctgcatcgcttgggtaggtatcatacaacacagatggaaaacgaacaacaaacaagaggatcgctgggacctagtcaggcggttcatgtgaatgatagctattgtgatatatataacataaccagtcagtttgccagcaataaacatgtatttagatattacacttgttgtcttgttgatgcatctgagactacacctgcaatagctagctgaagttatgcattcgtgatgaacagaggtgcgaagggagagatgaaaagaagtgagtcaggttaattgaagtggtgataaatactaaaagaaaataaaaatgattaaaaagtggttggagtattattttaaaggatatgttcacttatgaatactatcacggagaaattaaaattgtaagtactaaaagagagaagcctaataaaatgaatatcataatagcaaaaag

SEQ ID NO: 211777 - DNA, 1663 bp, Zea Mays
ctatcctctccctcagtgctcacgtctccaccggtccaccccctcggcagctcaatggcagctgcgacggcgccaccgccggcggcggttgccaccaccctctcgggcctcatgcgctgccagaacatccgtagcagcaggcctagagccttctacgcgaggtgcgcctcctccaacgcgagcgcggaggcggcggagagccggaagggaggccacggcgggacgcgcctggaggaagccgtgcccgtcggcgaggggcgctcgagggtagacgcctggatatcggcgcgtctcggcggcgggggcgttagccgcgcgcgcgtgcaggccagcatccgggccgggcttgtcgccgtcaatggccgcccggtctccaaggtttcgcatactgtgaagggaggggacttggtcagctgcacggtgtcagagctacagccgctgagggcagaggcggaggacatcccgctggacatcgtttatgaggatgaccatgttcttgttgtcaacaagccggctcatatggttgttcacccggcgccaggaaatgccaaaggcacattagtcaatgctatacttcatcactgcaagatctccacatttacctgtttagcacgcagctcagctggtgatgaatgcccggattctacggatgaagacactgatgtatttcatgtggatcagtttgctgctgaagatgtaagttcagaagtccggaatgctcttgtgcgccctggtattgtgcacaggctggataaggggacaagtgggcttcttgttgttgctaaggatgagcattctcatgctcgattagcagaacagttcaagctgcatacaatccgtagggtatacatcagtcttacttgtggcgcacctaatccaaattctggcaggattgaggcttctattgcacgtgatcctaacaatcggattcgtatgactgctattgctggatcaggccacagatatgcacggaatgctgctagtacaaagtaagagaggtctttgctggtggcggatccgcactagttgagtggagactagagacaggacgcactcatcagatccgggcgcatgcaaagtacatagggatccctcttctcggcgacgaaacatatggaggtacccagagcatggcgttatcgctcctgagaccaaggagtccttcgaaatatcacagcggcctttcgaatctgttgtctaaagtggacaggccttgccttcatgctgcatcgcttgggtaggtatcatacaacacagatggaaaacgaacaacaaacaagaggatcgctgggacctagtcaggcggttcatgtgaatgatagctattgtgatatatataacataaccagtcagtttgccagcaataaacatgtatttagatattacacttgttgtcttgttgatgcatctgagactacacctgcaatagctagctgaagttatgcattcgtgatgaacagaggtgcgaagggagagatgaaaagaagtgagtcaggttaattgaagtggtgataaatactaaaagaaaataaaaatgattaaaaagtggttggagtattattttaaaggatatgttcacttatgaatactatcacggagaaattaaaattgtaagtactaaaagagagaagcctaataaaatgaatatcataatagcaaaaag

SEQ ID NO: 211778 - DNA, 1643 bp, Zea Mays
ctatcctctccctcagtgctcacgtctccaccggtccaccccctcggcagctcaatggcagctgcgacggcgccaccgccggcggcggttgccaccaccctctcgggcctcatgcgctgccagaacatccgtagcagcaggcctagagccttctacgcgaggtgcgcctcctccaacgcgagcgcggaggcggcggagagccggaagggaggccacggcgggacgcgcctggaggaagccgtgcccgtcggcgaggggcgctcgagggtagacgcctggatatcggcgcgtctcggcggcgggggcgttagccgcgcgcgcgtgcaggccagcatccgggccgggcttgtcgccgtcaatggccgcccggtctccaaggtttcgcatactgtgaagggaggggacttggtcagctgcacggtgtcagagctacagccgctgagggcagaggcggaggacatcccgctggacatcgtttatgaggatgaccatgttcttgttgtcaacaagccggctcatatggttgttcacccggcgccaggaaatgccaaaggcacattagtcaatgctatacttcatcactgcaagatctccacatttacctgtttagcacgcagctcagctggtgatgaatgcccggattctacggatgaagacactgatgtatttcatgtggatcagtttgctgctgaagatgtaagttcagaagtccggaatgctcttgtgcgccctggtattgtgcacaggctggataaggggacaagtgggcttcttgttgttgctaaggatgagcattctcatgctcgattagcagaacagttcaagctgcatacaatccgtagggtatacatcagtcttacttgtggcgcacctaatccaaattctggcaggattgaggcttctattgcacgtgatcctaacaatcggattcgtatgactgctattgctggatcaggccacagatatgcacggaatgctgctagtacaaagtaagagaggtctttgctggtggcggatccgcactagttgagtggagactagagacaggacgcactcatcagatccgggcgcatgcaaagtacatagggatccctcttctcggcgacgaaacatatggaggtacccagagcatggcgttatcgctcctgagaccaaggagtccttcgaaatatcacagcggcctttcgaatctgttgtctaaagtggacaggccttgccttcatgctgcatcgcttggatggaaaacgaacaacaaacaagaggatcgctgggacctagtcaggcggttcatgtgaatgatagctattgtgatatatataacataaccagtcagtttgccagcaataaacatgtatttagatattacacttgttgtcttgttgatgcatctgagactacacctgcaatagctagctgaagttatgcattcgtgatgaacagaggtgcgaagggagagatgaaaagaagtgagtcaggttaattgaagtggtgataaatactaaaagaaaataaaaatgattaaaaagtggttggagtattattttaaaggatatgttcacttatgaatactatcacggagaaattaaaattgtaagtactaaaagagagaagcctaataaaatgaatatcataatagcaaaaag

SEQ ID NO: 211779 - DNA, 1669 bp, Zea Mays
ctatcctctccctcagtgctcacgtctccaccggtccaccccctcggcagctcaatggcagctgcgacggcgccaccgccggcggcggttgccaccaccctctcgggcctcatgcgctgccagaacatccgtagcagcaggcctagagccttctacgcgaggtgcgcctcctccaacgcgagcgcggaggcggcggagagccggaagggaggccacggcgggacgcgcctggaggaagccgtgcccgtcggcgaggggcgctcgagggtagacgcctggatatcggcgcgtctcggcggcgggggcgttagccgcgcgcgcgtgcaggccagcatccgggccgggcttgtcgccgtcaatggccgcccggtctccaaggtttcgcatactgtgaagggaggggacttggtcagctgcacggtgtcagagctacagccgctgagggcagaggcggaggacatcccgctggacatcgtttatgaggatgaccatgttcttgttgtcaacaagccggctcatatggttgttcacccggcgccaggaaatgccaaaggcacattagtcaatgctatacttcatcactgcaagatctccacatttacctgtttagcacgcagctcagctggtgatgaatgcccggattctacggatgaagacactgatgtatttcatgtggatcagtttgctgctgaagatgtaagttcagaagtccggaatgctcttgtgcgccctggtattgtgcacaggctggataaggggacaagtgggcttcttgttgttgctaaggatgagcattctcatgctcgattagcagaacagttcaagctgcatacaatccgtagggtatacatcagtcttacttgtggcgcacctaatccaaattctggcaggattgaggcttctattgcacgtgatcctaacaatcggattcgtatgactgctattgctggatcaggccacagatatgcacggaatgctgctagtacaaagtaagagaggtctttgctggtggcggatccgcactagttgagtggagactagagacaggacgcactcatcagaattaccatactgctctatcagttctagcaggaattaaataaactcacgaataactgcaaattactaatatcggtgtgttgcttgtttggatgttattggccggttgagacctgcgaatcacgattctcacgagcaactgtttaaactttcttgtcaagatagatagtgttcttgtatatgtttattttatttggcatgcagatggaaaacgaacaacaaacaagaggatcgctgggacctagtcaggcggttcatgtgaatgatagctattgtgatatatataacataaccagtcagtttgccagcaataaacatgtatttagatattacacttgttgtcttgttgatgcatctgagactacacctgcaatagctagctgaagttatgcattcgtgatgaacagaggtgcgaagggagagatgaaaagaagtgagtcaggttaattgaagtggtgataaatactaaaagaaaataaaaatgattaaaaagtggttggagtattattttaaaggatatgttcacttatgaatactatcacggagaaattaaaattgtaagtactaaaagagagaagcctaataaaatgaatatcataatagcaaaaag

SEQ ID NO: 211780 - DNA, 1719 bp, Zea Mays
ctatcctctccctcagtgctcacgtctccaccggtccaccccctcggcagctcaatggcagctgcgacggcgccaccgccggcggcggttgccaccaccctctcgggcctcatgcgctgccagaacatccgtagcagcaggcctagagccttctacgcgaggtgcgcctcctccaacgcgagcgcggaggcggcggagagccggaagggaggccacggcgggacgcgcctggaggaagccgtgcccgtcggcgaggggcgctcgagggtagacgcctggatatcggcgcgtctcggcggcgggggcgttagccgcgcgcgcgtgcaggccagcatccgggccgggcttgtcgccgtcaatggccgcccggtctccaaggtttcgcatactgtgaagggaggggacttggtcagctgcacggtgtcagagctacagccgctgagggcagaggcggaggacatcccgctggacatcgtttatgaggatgaccatgttcttgttgtcaacaagccggctcatatggttgttcacccggcgccaggaaatgccaaaggcacattagtcaatgctatacttcatcactgcaagatctccacatttacctgtttagcacgcagctcagctggtgatgaatgcccggattctacggatgaagacactgatgtatttcatgtggatcagtttgctgctgaagatgtaagttcagaagtccggaatgctcttgtgcgccctggtattgtgcacaggctggataaggggacaagtgggcttcttgttgttgctaaggatgagcattctcatgctcgattagcagaacagttcaagctgcatacaatccgtagggtatacatcagtcttacttgtggcgcacctaatccaaattctggcaggattgaggcttctattgcacgtgatcctaacaatcggattcgtatgactgctattgctggatcaggccacagatatgcacggaatgctgctagtaggtacaaagtaagagaggtctttgctggtggcggatccgcactagttgagtggagactagagacaggacgcactcatcagatccgggcgcatgcaaagtacatagggatccctcttctcggcgacgaaacatatggaggtacccagagcatggcgttatcgctcctgagaccaaggagtccttcgaaatatcacagcggcctttcgaatctgttgtctaaagtggacaggccttgccttcatgctgcatcgcttgggtaggtatcatacaacacagattcaagcacccacgttcaggaaaggtccttgagttctcgtgccccccgccagatgatttcttggaggtgcttggtgaattgcgacgtgttacgtctaggtccagtgatgccccaaatggtgatggtgttttccggtgagggagatggatagaaccaaggctgaggatgtggaacaagacatgggaacccttggagatttgttccaggctcctagaaagagaaaagtgtttcgtacgagttttcctgatggctggtggaagtgagagggaaatgagtaggagaatctgtatgctttcggctgggctcatcagtacacacgcatttgttttgggctccgattcatgggcttccagcaggaagaacttcacgggattcgattgatcgattcttcattcttttcttttcttttttttctcctactacagttgcccgccaatgctcggcgagcaaagaggcc

SEQ ID NO: 211781 - DNA, 4386 bp, Zea Mays
tccccgctcacggcgcgcacatggaacgccttcgctttcctcctccctccctccgtcccgtcccgtgcccccttctgccttctctcaccgccacggccactggcattggccgcgctcgccgcccaccgcccaccgcccccgcgccgctgtaggagcgcgcgcttgctttagcgtaggccatggcccactactagcgggtgattagccttgattagcgggcaccactccactgttacgggaggcgcgttgttttaatcgcgggcgcgcgacgcccgtcgcctgtctcgaatatctgctgccgccgccaaaagtgcggattcctcctcctccccgtcgggcggcctcgccccccctggtgcctactgggcgctggcggagtgggagtggatcgacgtgttgcggccgcggagtggaggcaataaagggaaagctgggcggagtgctcgggtaccgtagccggattagttattaatgcccgcgagcagctagtcgtaggcgtaactattttaaggcagctgtcgccgctggggacttgcgaaagcttcgcctcttttgagaagctctgcaccacgcctggctccgccccgctccccctccacctccaggcttccttcacagtctcgctgttgctagtgctgccttgctgctagtgataggggtcccggggccctcaagttctgggtgggcggcaaacatatggtgggcaccgggcgggggaataaggaggaagagaaagaggaggaggagcggcagtagatttgggccgcacaggcagggatggggggcaagtaccgcgcggcgaggacgaagaggtggtggagggggctggcagcggccgggtgggtgctaaccgcggtggtctgctccgcggtgatgcactggaccctgcgccgggacagcatggaccgcgccgaggagcgcctcgtcagcatgtgcgaggagagggccaggatgctgcaggagcagttcggggtcaccgtcaaccacgtccacgccatcgccattctcatctccaccttcaacttcgagaagtcccctccagccatcgaccaggacacctttgcaaaatacacggcaaggacatcatttgagcgaccactgctcaatggggtggcattcgcacagcgtgtattccatcatgagagggaaatgtttgaaagccagcagggatgggttatgaatacgatgcagcgggagcctgcacctccgcaggttgaatacgccccagtgattttctctcaggatacggtttcctaccttgcacgcattgacatgatgtctggggaggaggaccgagaaaacattttccgggccaggactactggcaaagctgtgttaacaaacccattccggttgcttggatcaaaccacttgggagtagttctcacgtttgctgtgtaccgccctgatctccctgctgatgcatcagttgagcaacgtgtggaagcaactattggatatcttggtggagcctttgatgtggagtcacttgtggagaatttgttgagcaaacttgctggcaatcaggatattgtggtaaatgtctatgatgtcacaaatgcttcagatgctatggttttgtatggaccttcaagtttggacgagcaagtgcctttcttgcatgttagcatgttggattttggagatccatttaggaagcatgaaatgagatgcagacaaaaacttcctatgccgtggtctgccatcaccaatcctttgggcacatttgtcatatggatgcttctagggtatagcattgctgctgcatattctcgatatgacaaagttactgaagattgcagaaagatggaagagctaaaaacacaggcagaagctgctgatgttgcaaaatctcagttcctggcaactgtgtcacatgagatcagaacacctatgaatggcgtccttggaatgctggatatgcttttaggaacagatctaactatgacacagaaggattatgctcaaactgctcaaatgtgtggcagagcattgattacactgataaatgatgtccttgatcgagcaaagatcgaggctggaaagttagagcttgaagcggtgccttttgacctgcgttctctcatggatgatgttgtttccttgttttcttcaaagtcacgggagaagtgcattgagcttgcagtatttgtatgtgacaatgttccaaaggttgttattggagatccttggaggtttcgacagatattgacaaatttggtcgggaatgcagtcaaattcacagaacgaggtcatgtatttgtgcgggtctgtttggctgaaaactcaaatgtggaagccaatcaggtcctacatggagccatgaatggcaaaggtggtagagttgagtcaacaactaatggtgccttcaatactttgagtgggtttgaagcagcagacagacgaaatagttggcaatattttaaactgctcctctccgataaggagtcacttttggatgatcttgagggcgaaaattctaatcaaagtgattcaaatcatgtcacactagcaataagtattgaggacacaggtgtcgggataccactgcaagcacaagatcgtgtttttacaccgtttatgcaggctgacagttcaacttcaaggaattatggcggtactggcatcggtttaagcatcagcaagtgtctagctgaacttatgggtgggcagataagtttcactagccatccttctgttggaagcacgttcactttctcagccacactgaagcactcatacaaagatatttcggtcgattcaagtaggagcttgacagaggcactaccaactgcttttaagggaatgaaggccatcttggtagatgggagacctgtacgtagtgctgttacaagatatcacctcaagaggttgggaatacttcttcaagttgtgaacaatatgaatgcagtagtaaaagctttcccaggacaaaatggagcaaccggttctagggaaaaagcatcaattctttttattgagagtgacttctggaggcctgagacagatgttcagttattgaaccatctacgcgagcagaagaacggtcagttgtcggatgggcacaaggtagttcttttggtcacctctgaagccgacaaggacaaatatggatccatatttgatattgtgatgtgtaagcctataagggcaagcacaatcgcttcatctattcaacaactgctcaaagtagagatagccgaaagaaaagataatcaaaaccggccgtcgtttcttcgaagcttgctggttgggaagaatatattggtcgtagacgataataaagtcaacctcagagttgctgcggctgcactcaagaaatatggtgctaatgttagctgtgttgaaagcggcaaggatgctatcagtctacttcaacccccgcatcgcttcgatgcatgttttatggatgttcagatgccagagatggacgggtttgaggcaaccggacaaataaggcaaatggagttgaaagcgaacgaggaaaggaagaacaagttggcttcgattgaaggctcgacaactgccgagtaccatctgcctgttctggcaatgacagccgatgttatccaggcaacttacgaagagtgcataaaatcgggaatggatggatacgtatctaaacccttcgacgaggagcagctataccaagcagtctccagattggtagtgggaacgacggattcggctgtttgatgttcaaaatacgatggacctgacttctcattcatcgaagtgaagcatcaccatcttgcctctgtccagctgactctatatcccttgacaatgggcctctgacatggcctctcacaagactagatgaaaaaagaagatgaaagtgccgtgagttaggtacgtgtcacacatgacatgaagttgctgcggcagcccagaggagtgtaggtagatcaccctgtaactctcttgttctttgatgtttataggctgttgtgtcttctgacaattcattggaaataccacatctcgttgcaatccccctagtttcagaactgccctgcctcgtctcatccacattatccaggaaactgtttccttcagggctagtttgggagtccaaaaaccggaggggattagagggactaaaattccctgcttattcaaaattgaataaggaggggattttagcccgtccaatccccttcggttttgtggctcccaaactagccctaagcgcgaaggaaaacacgggtaaattggctgtaggacttacttgagtattggtatttgctaatggatactaatcaatctcttctaggaatggacgtgagaagctaaaagtgactgctatgtcctgactattatatatacctttctataacccttaacagttatttaaaatagcaacatttgaagggtcaacacgta

SEQ ID NO: 211782 - DNA, 3498 bp, Zea Mays
ttttgatcccttagtttattcttagaaaggacacctttgcaaaatacacggcaaggacatcatttgagcgaccactgctcaatggggtggcattcgcacagcgtgtattccatcatgagagggaaatgtttgaaagccagcagggatgggttatgaatacgatgcagcgggagcctgcacctccgcaggttgaatacgccccagtgattttctctcaggatacggtttcctaccttgcacgcattgacatgatgtctggggaggaggaccgagaaaacattttccgggccaggactactggcaaagctgtgttaacaaacccattccggttgcttggatcaaaccacttgggagtagttctcacgtttgctgtgtaccgccctgatctccctgctgatgcatcagttgagcaacgtgtggaagcaactattggatatcttggtggagcctttgatgtggagtcacttgtggagaatttgttgagcaaacttgctggcaatcaggatattgtggtaaatgtctatgatgtcacaaatgcttcagatgctatggttttgtatggaccttcaagtttggacgagcaagtgcctttcttgcatgttagcatgttggattttggagatccatttaggaagcatgaaatgagatgcaggtatagacaaaaacttcctatgccgtggtctgccatcaccaatcctttgggcacatttgtcatatggatgcttctagggtatagcattgctgctgcatattctcgatatgacaaagttactgaagattgcagaaagatggaagagctaaaaacacaggcagaagctgctgatgttgcaaaatctcagttcctggcaactgtgtcacatgagatcagaacacctatgaatggcgtccttggaatgctggatatgcttttaggaacagatctaactatgacacagaaggattatgctcaaactgctcaaatgtgtggcagagcattgattacactgataaatgatgtccttgatcgagcaaagatcgaggctggaaagttagagcttgaagcggtgccttttgacctgcgttctctcatggatgatgttgtttccttgttttcttcaaagtcacgggagaagtgcattgagcttgcagtatttgtatgtgacaatgttccaaaggttgttattggagatccttggaggtttcgacagatattgacaaatttggtcgggaatgcagtcaaagtaagcagccaattttggtatttggtatcctcacactacaacttcaaatgatgttggttagaagtatttgataagtctgtcatcaaatacatgcacaaaaatgcactgatatatctattgtctgttccagttcacagaacgaggtcatgtatttgtgcgggtctgtttggctgaaaactcaaatgtggaagccaatcaggtcctacatggagccatgaatggcaaaggtggtagagttgagtcaacaactaatggtgccttcaatactttgagtgggtttgaagcagcagacagacgaaatagttggcaatattttaaactgctcctctccgataaggagtcacttttggatgatcttgagggcgaaaattctaatcaaagtgattcaaatcatgtcacactagcaataagtattgaggacacaggtgtcgggataccactgcaagcacaagatcgtgtttttacaccgtttatgcaggctgacagttcaacttcaaggaattatggcggtactggcatcggtttaagcatcagcaagtgtctagctgaacttatgggtgggcagataagtttcactagccatccttctgttggaagcacgttcactttctcagccacactgaagcactcatacaaagatatttcggtcgattcaagtaggagcttgacagaggcactaccaactgcttttaagggaatgaaggccatcttggtagatgggagacctgtacgtagtgctgttacaagatatcacctcaagaggttgggaatacttcttcaagttgtgaacaatatgaatgcagtagtaaaagctttcccaggacaaaatggagcaaccggttctagggaaaaagcatcaattctttttattgagagtgacttctggaggcctgagacagatgttcagttattgaaccatctacgcgagcagaagaacggtcagttgtcggatgggcacaaggtagttcttttggtcacctctgaagccgacaaggacaaatatggatccatatttgatattgtgatgtgtaagcctataagggcaagcacaatcgcttcatctattcaacaactgctcaaagtagagatagccgaaagaaaagataatcaaaaccggccgtcgtttcttcgaagcttgctggttgggaagaatatattggtcgtagacgataataaagtcaacctcagagttgctgcggctgcactcaagaaatatggtgctaatgttagctgtgttgaaagcggcaaggatgctatcagtctacttcaacccccgcatcgcttcgatgcatgttttatggatgttcagatgccagagatggacgggtttgaggcaaccggacaaataaggcaaatggagttgaaagcgaacgaggaaaggaagaacaagttggcttcgattgaaggctcgacaactgccgagtaccatctgcctgttctggcaatgacagccgatgttatccaggcaacttacgaagagtgcataaaatcgggaatggatggatacgtatctaaacccttcgacgaggagcagctataccaagcagtctccagattggtagtgggaacgacggattcggctgtttgatgttcaaaatacgatggacctgacttctcattcatcgaagtgaagcatcaccatcttgcctctgtccagctgactctatatcccttgacaatgggcctctgacatggcctctcacaagactagatgaaaaaagaagatgaaagtgccgtgagttaggtacgtgtcacacatgacatgaagttgctgcggcagcccagaggagtgtaggtagatcaccctgtaactctcttgttctttgatgtttataggctgttgtgtcttctgacaattcattggaaataccacatctcgttgcaatccccctagtttcagaactgccctgcctcgtctcatccacattatccaggaaactgtttccttcagggctagtttgggagtccaaaaaccggaggggattagagggactaaaattccctgcttattcaaaattgaataaggaggggattttagcccgtccaatccccttcggttttgtggctcccaaactagccctaagcgcgaaggaaaacacgggtaaattggctgtaggacttacttgagtattggtatttgctaatggatactaatcaatctcttctaggaatggacgtgagaagctaaaagtgactgctatgtcctgactattatatatacctttctataacccttaacagttatttaaaatagcaacatttgaagggtcaacacgta

SEQ ID NO: 211783 - DNA, 1485 bp, Zea Mays
ctttccctcacgtggaggctgcctcaacttcaacccttatatgtggaatgggaggaaaaagcatcaattctttttattgagagtgacttctggaggcctgagacagatgttcagttattgaaccatctacgcgagcagaagaacggtcagttgtcggatgggcacaaggtagttcttttggtcacctctgaagccgacaaggacaaatatggatccatatttgatattgtgatgtgtaagcctataagggcaagcacaatcgcttcatctattcaacaactgctcaaagtagagatagccgaaagaaaagataatcaaaaccggccgtcgtttcttcgaagcttgctggttgggaagaatatattggtcgtagacgataataaagtcaacctcagagttgctgcggctgcactcaagaaatatggtgctaatgttagctgtgttgaaagcggcaaggatgctatcagtctacttcaacccccgcatcgcttcgatgcatgttttatggatgttcagatgccagagatggacgggtttgaggcaaccggacaaataaggcaaatggagttgaaagcgaacgaggaaaggaagaacaagttggcttcgattgaaggctcgacaactgccgagtaccatctgcctgttctggcaatgacagccgatgttatccaggcaacttacgaagagtgcataaaatcgggaatggatggatacgtatctaaacccttcgacgaggagcagctataccaagcagtctccagattggtagtgggaacgacggattcggctgtttgatgttcaaaatacgatggacctgacttctcattcatcgaagtgaagcatcaccatcttgcctctgtccagctgactctatatcccttgacaatgggcctctgacatggcctctcacaagactagatgaaaaaagaagatgaaagtgccgtgagttaggtacgtgtcacacatgacatgaagttgctgcggcagcccagaggagtgtaggtagatcaccctgtaactctcttgttctttgatgtttataggctgttgtgtcttctgacaattcattggaaataccacatctcgttgcaatccccctagtttcagaactgccctgcctcgtctcatccacattatccaggaaactgtttccttcagggctagtttgggagtccaaaaaccggaggggattagagggactaaaattccctgcttattcaaaattgaataaggaggggattttagcccgtccaatccccttcggttttgtggctcccaaactagccctaagcgcgaaggaaaacacgggtaaattggctgtaggacttacttgagtattggtatttgctaatggatactaatcaatctcttctaggaatggacgtgagaagctaaaagtgactgctatgtcctgactattatatatacctttctataacccttaacagttatttaaaatagcaacatttgaagggtcaacacgta

SEQ ID NO: 211784 - DNA, 3670 bp, Zea Mays
atggccgccggcggagagccctcccccctgtcccctgccaaatactctcgcttgcccgacgacgcccagcccgacgcatccccgaagcgccgcaagcgccaccaccgccaccaccaccaccaccaccaccgtcgacaccgtcacgccgattccccgatacccgaggcggccgacgaagaggtagaggagggggagatactcgacgatgcttcctccgtctctgctatggaggtcaatgccgagtccgccgccccacagtcttcccttgctccggagcactttggtaatggtgctgatattaacacagatgcaaccaagatgcaagctcctgctccgcctacccttccatcctcaaaagatagaaggaggtcacttcacggtgcccctgagtctgaaagcggaggtatcctatcaagtgatgctgaggataacaaagggcatggacggaggcaaagtcaaagttgttcaaaatctccaaagcccagaagggagaaggaaaggaggcacaaagatgggcatcactcttcatcttcaaaagatcattatcccaaaaatcgctctagagcatctccatactcaaggcatcagagtgaagctcattcaagagatcacttgagatctggagaaagaggtgatgatactaatggttctgatcgtgagagcaatgatcagaatgggaagtctggcagacatacgactgggacccaggagaatgaaagagaaaggagcagcagccatggtattcatgatagacatggtgataggcataatgacagacatggcagccaggaaaggtacagagacgataggacatatagagacaaaattgattcgctagaagctacttggaagcacagagaaagaagcaggagtcatagtagatcggatctaagggaaagtacacgtcttcgtgatcaaagccgggagagtgaaagacggattggtagttcaatgcatagggatcatggcagcaagagggatacaagtaaacatagagaatctgacagggttaacagtgcatatgaaagggagagagggagagatgctggggacagggaatggcacagggtcaagggaagcgaaactcatagagctaaggaaggacgggacaaagttagcgatagtgataggtacagggattcaacacgctcgaaatatagtgtgtctgatggctacaaagagagaacaagatctggggagaaaggtagagatgttgaccgtaaaaaccgaaagtttgaagaaatgaaggaaaattatctcaaggaggaagatgaagagaagtaccaagagaaaatagaacagcagttagcaatgcaggaggaagaggaccctgaaaaaatcaaagaggaagcaaggaggaggaaagaagctatcatggcgaagtacaggcagcagcaatcacagaagcaggatatggaagctaaaccaagcagcaatgatgaagaagtaagagctatggatggaaatgtaactatgcatcagaaagatgataacggtagcagttccacgggcaatgacaaagctgaaaataagcatgattcttcagaggtatttgatggcaaaaccgacttttctgtgggaaagtctcctgctcaaaatgatacttcaactagcacgggagcattcactgatgagaggacaatagatgtttcaggtcttggagagggttctcccaagggcaagggtgatggtttgcatgttgagagaaatgctcttcatgacaactgggatgatgcagatgggtactacacttaccggttcggagaattgctggatggccattacgaaatcatagcagcacatgggaagggtgtgttctcaaaagtcgtgcgggcaaaagatcttaaagcgagtaaagatgatcctgaagaagttgctatcaaaattattcgcaacaaggagacaatgtacaaggctggtaagcaagaggtttcaatactggaaaaacttgcaagtgtggaccgtgaggacaaacgccactgcgtgcggtttatttctagtttcatgtaccggaaccatctttgcttagtttttgaatctctcaatatgaatcttcgtgaggttttaaagaaatttggtcgtaatattgggcttaaactgactgcggtgagggcatattcaaagcagcttttcatcgccctgaagcacctgaagaactgcaaagttttgcactgtgatattaaacctgacaatatgctggtgaatgaggctaagaatgtgctcaagctatgtgattttgggaatgctatgcttgctggtatgaatgaagttacgccttatcttgttagccgtttctatcgggcacctgagatcattcttgggttagcctatgatcatcctttagacatgtggtcagttggctgctgtctatatgagctttataccggtaaagtcttatttcctggtccatcaaacaatgccatgcttcggcttcatatggaattgaagggtccattccctaagaagatgcttcgaaagggtgcctttactatgcaacactttgatcaagatctcaattttcatgctaccgaggaggatcctgtgacaaaaacggctgtgagaaggttaattttgaacattaaaccaaaggatgtcggttttttgattttgaactctcctggcgaggatccaaaaatgctatccagttttaaagatcttcttgataaaatgtttatattagatccagaaaagaggataaccgtatcacaagcacttagccatccatttatcactggcaagtgacataagatgctgattcctcttgatattgaacttagcatctacactgtaaaatacaatttgggtttctcttgtctaatcatcgacgtttctgtcttgtgtcctgggagctctgagaacaaatacatggatgaagcacggaactatcgaagagatggctatctgcagaccttgttgcatgcacttatcatttggatatgttctgttgcttgattctgccagggcctctgctgtgtgtacactttatatgcttaagcgccaacatttgaaggtcctgggatggagatcgctggaccctcctctcctcatcatggtgtatttctaattgtttttgcgttttggtaagtaatttctttttgtcagtttcatcaaacattgatcttccaaacaatttgtttgtcttttgtgtgtccgacaaacttttccatattaatgggttgtgaaattcaagtactatatagtatatactccggggattttagccccatccaatcccctccggttttctggcttccaaactagccatcaatcccatcatccaattcccttatcccaaactagccctaagaaaattgggtacagggaaaagaaatcccaacttggcctcccctctataagcatgcagaagctgaaaggctctcagcctgttgtccccgtagaatgctctcctttgtgattgcctgcacagcactgccataacacttgcaatggcgctgttaaaaacacatcattccaatctctcaagccaaccaagatagtgaattcaggcctaccatttcgcacttgaccgcctggctcaaagcacctattgataattggctgagagtttgaggtgcaatggaaataaatcaaagcctgtaagatcattctttagattgaacagttggttgaacgaacctattaccatctatacgtgggcatatgaatgaca

SEQ ID NO: 211785 - DNA, 6224 bp, Zea Mays
ccggccccactccgcagcctctctgctgctggtgggccagcgttacggcgcgcaaacctccgcctctcccctcccctgtcccctccaatcctccattctccggccaccctcgcttctccgtccctcggcaatccgcttgtcccccgttgcccgctccgttcagaagcgcctcgccgctgaccggtcgtgacccgcctcgcacctccgccttctccgtccctcgcggccgcggctgccgccgaatggaagccgcctcatgctgccgcgtcttctccacgcagcggtgccgcttcccgctccgcaggctgtcggcgccgccgtggccgcagccgttctgcaccgagtccagcggcggcctcgtcaccccgtcggcctccaagcggaggtccaggggccccgtcatggccgcgaagaaggccgcggagggcgaaaaacaagaagatggaaaatacaagcacactgtggatctcccgaaaacaacatttgggctgagagcgaattctgtacagcgggagccagagctccaaaaattatgggacgataatcaggttctgaaaagggtttctgaaaggaacactgggactgcttttgttctccacgatggccctccctatgctaatggtgatcttcacatgggccatgcgctcaataaaatcctcaaggattttataaatcgctacaagctgcttcagaatcataaagtgtcctttgttcctggttgggattgccacggccttccaatagaactaaaagttttgaagtcaatggataaggaaactttgagtgctcttacacccataaaattaagacaaaaagctgcaaaatttgctaaagcaacagtcgatgcacaaatgaaatctttcaagcggtatggtgtatgggccgattgggacaacccttacctaactctgtcaccggaatacgaagctgctcagttggaagtgtttgggcaaatggttatgaaaggatatatctatagaggacgaaagcctgtccattggagtccatcatcacgtacggctttggcagaagctgaactggagtattccgaaaatcacatttccagaagcatatatgccgcattcaagattactaatccatctaaatctgggatgctagacgatttttttccaaatgtatctttggtcatatggaccaccactccatggacaattccggctaatgctgctgttgctgtgaacccaaagcttatttatgcagtagctgaggtacagtctgtatttgaaagtgagtcaacatccggtggtaaacaaagaaaagttggaaatatattgagttctgagaaaggaaaactgttcgttattgtggcttctgatcttatcacaactcttgagtccaaatggggtgtgaagcttgtagtacacaaatcatttcccggatctgccttggagcactgcaggtatgcccatcctgtgaatagcaacgaatgttccgtcattctaggaggagattacattacaactgaatcgggcactggccttgttcatactgcccctggccatggccaggaagactacataacaggtttgaagtatgggcttcctatcatttctcctgtggacgatgaagggaacttcacggctgaagctggacagttcggtggtttgtctgtcctgggggctggcaatgctgcagttgtgaagtatctggatgaacagtattcactcattttagaggaaccatacaaacacaagtacccctatgactggagatctaaagaaccaactatattccgagcaactgagcagtggtttgcatctgtggatggttttcgtgatgctgcaatggatgcaatcagacgagtaacttgggttccttctcaggcacaaaacaggattgttgccatgacctctagccgttctgattggtgtatttcacggcagagaacttggggtgtccctattccagttttttaccatgtggactcacaggaacctcttataactgaagaaacgattgaacacatcaaggctattgtgttgaagaaaggtagcgatgcatggtggtatatgacaactgaggaacttcttccagatagatatcgggacaaagcatctgaatatcgcaagggaactgatacaatggatgtttggtttgactctggctcttcatgggcagctgttttagcaaaaagggacggtcttaattttcctgcggatatttatcttgaaggttcagatcaacatcgtggatggttccagagctcattgttgactagcattgctacaacagggaaggctccctactccagtgttattacacatggatttgtactggatgaaaagggtttcaaaatgagtaaatcaattggtaatgtagtggacccagagaaaatcattgttggtggcaaaaaccatagggaagaacctggctatggagcagatgttctccgtctatgggtttctagtgttgattacactacagatgtgttgattggcccacaaatcttgcgccagatgtctgacatgtatagaaaactacgaggcacgatgcgatttcttttgtcgaatctccatgattggaagccggataattctgtgccgtacaatgatctgccaaaaatcgacaagtatgcacttttccatttggagactgtcatgacttccatgaaggatagttatgaaagttatcaattctataaagtataccagatccttcaaagatttgctactgttggtttgtccaatttctatttggatgttgcaaaggatcgcctttatgttggaggccgagtcagcttcacaaggaaaagttgtcagactgtgctcatggcacatctgctctaccttgttagggccatttccccgattatgcctcacctagctgaggatgtctggcagaacctaccctttcaatacaccttgcaggatggatcccttgcaaactttgtttttgatctgaaatggccagaaaagaatgaagaatggctctcggccccgaaggatgatgttgatttcctgggtgttatcctggagttgaggtcagaggtcaacaaaattttggagaatgctcgcactggaaagttgattggttctagcttagatgcaaaggtttatctccataccgaaagttcagatacggtattaaagctaaaggagctatcttctgcatccaatgatgcagacgctctgcatcgcctgtttatcacatctcaggtcgatattcttccaatcctaaatgaagagattacatcatctgtaccatacacaggaaagttcagtaacccacgcactggagtcatatggattggtgtgactcgtgcggatggtgcaaaatgtgagaggtgttggaattacacacaggacgttggatctttccatgaccatcctactctctgcgttcggtgctatggtgtcattgagttgcagacacaacctgcggccgcagctgtcagttgaaaggagtgatgttaacgtatcctatcgaaccatctaattttgaggatcattggtggaattcattcttttggagagctttcacgctaccatgtggcggtagcctgggactccagcttgaatcaagttttgcatgcagcaagctgtactttagattcttcatacataggtcacgagagttgtttggagcttgggtcatcgcttactttcccatactactggggggcttatttggaacagttttttacacaaaactcctgacctgtaaatcaattttggaaaaccgtatccggtggtcgatccatgtattaatagagtaataatgttactatgttcatccaaatctcaaagacgtgatggttgtgttgaaaaaacagcttgaatcacttgcttatgctcaactgttttttcttcatgtacatgtgacggaagtttactgctgattgtttattacatccagttatcataatcaaatgtccaacgaggtggccccacctgcagagtccccatcaaaccttacgaggtgggccatccctgactagttaaccacgggatgttacgaggcaggaggtggcaccgcaccgcattccacttccaccgcgccgcgtcatcttcttccttcagcgttgagcggaatcgcgaattgaaaacggaagttaccaattcacccgactcgatagacacaccggctctgctctaagcgagaatccgaggagcgctgccaagcgcctccgcgacgggatcgacgcgacttgattcgcgagtttcaacgtcgcgaggagagcagaaaattacgcaggcagagcggctgccggctgggtgttgaagctagagcggctaggagcaggttcggagcgctaccaaacaggcccttaacctaagcgctcctgcccttcggatccggaagttggaggcgcgcgaggaggcgaggcttgcaaggtctcccttgctagacggcaacggggtgacgatggcgcacgagcggggcgccgccgcatccgcccacccagcggctccaacctccgaggaagacgcgctgtttattgatttattacatgaagcgcccctgtctggtcaccgggagcctagaagcatagttggtgggaccttgtactgtatcttattggtaggttttgctgctgttgccatttcagctccatggatatttcttttcgcgccagatatgatctctccattgctatgtagctccaatgctatcctcctcgttcttacaggcatttttcaacaatattgggttcaccaggtcaggaaagtgagattgcagggctattacgattttagccagaaactgaagcgtattgctcgacttccatttgctactattgcttgtgggactgctttgatgctcttaatcatggtctggcaacctcttttacaaatactatcagtttcactgcttctcaggattgccattgtagttgaagtcacgtgtgctggatgttttatgggcttatatttatggcacatccacaaatacaactctttgaatgggcagcctgatattttgcggtcattatattctgcactccaaccatctaatactttggaagatcgaagatatcatgatgcccgtctttctgatcagcagatggcgttacttcagtaccaaagagagaatatccattatctgagtgaggaggttctccgcttgcaagaatgcttaagcaaataccagagaactgctggaaccactcctcaggttgatcttgcccatcttttagcaactcgtgatcaagaactccgagcactcactgctgagatgaatcaagtgcactccgaacttcaacatgcccgtggtttgatcgatgaaaaggattcagagctccagcgtatccgtctgagcaacaaccagtatgttgaagaaaacgataggctcagagctattctcggtgagtggagtgctcgagccgcaaagcttgaacgtgcattggaggcagagcgggtgtcaaacgtcgaattgaggaaaaatattgcaaagtttagaggtcatttgtacaaagagcaggaggcctgacttcggtatgttatagctggttccagaattttacctaagacacctgactaaaggcacaatttttgatatagaagggtatctcggtctggatccattcgaactgagattggcacgtgattgttcgatgacgcatggaatatgcgtctagtggtttgtagaatgcgtagtttgatgtacatgtgttcgtaggtttgagcatgtagagtatggtatccctcgggaaaaaaaaggagtatggtattcatgtggttgaagactgctgagtattgtgaacatggtagtgtcttgtggggtgtggttcgcaggagacaagaggaggaggttgcagcactggtcgttcttgtaggtgtgcggcagataggattatgcgtactaactgaagaggcagctaggcaagaatcttaacacaaacaagaagaacaggatcgcccctccgactctaatcaatagagttcattacagataagcgacgcagtgcgatgaaatgtaccacctacattcacagacccagttgggcgtaccgttgaagcctcatgggccactcgcgcctgaacccagttgccactatagttttcttcttcggatttgtttgttttttcattctattttctattctattctgtgtgactttcttttctttgttgtttagggctcatttgataataattcagattggttcatatcaatgttctctaaaaaaacgttccagatgacgaatcggaattgcttaaccatttgactgtagaattagaatcacttggacccgtttctag

SEQ ID NO: 211786 - DNA, 2239 bp, Zea Mays
aggaggtggcaccgcaccgcattccacttccaccgcgccgcgtcatcttcttccttcagcgttgagcggaatcgcgaattgaaaacggaagttaccaattcacccgactcgatagacacaccggctctgctctaagcgagaatccgaggagcgctgccaagcgcctccgcgacgggatcgacgcgacttgattcgcgagtttcaacgtcgcgaggagagcagaaaattacgcaggcagagcggctgccggctgggtgttgaagctagagcggctaggagcaggttcggagcgctaccaaacaggcccttaacctaagcgctcctgcccttcggatccggaagttggaggcgcgcgaggaggcgaggcttgcaaggtctcccttgctagacggcaacggggtgacgatggcgcacgagcggggcgccgccgcatccgcccacccagcggctccaacctccgaggaagacgcgctgtttattgatttattacatgaagcgcccctgtctggtcaccgggagcctagaagcatagttggtgggaccttgtactgtatcttattggttttgctgctgttgccatttcagctccatggatatttcttttcgcgccagatatgatctctccattgctatgtagctccaatgctatcctcctcgttcttacaggcatttttcaacaatattgggttcaccaggtcaggaaagtgagattgcagggctattacgattttagccagaaactgaagcgtattgctcgacttccatttgctactattgcttgtgggactgctttgatgctcttaatcatggtctggcaacctcttttacaaatactatcagtttcactgcttctcaggattgccattgtagttgaagtcacgtgtgctggatgttttatgggcttatatttatggcacatccacaaatacaactctttgaatgggcagcctgatattttgcggtcattatattctgcactccaaccatctaatactttggaagatcgaagatatcatgatgcccgtctttctgatcagcagatggcgttacttcagtaccaaagagagaatatccattatctgagtgaggaggttctccgcttgcaagaatgcttaagcaaataccagagaactgctggaaccactcctcaggttgatcttgcccatcttttagcaactcgtgatcaagaactccgagcactcactgctgagatgaatcaagtgcactccgaacttcaacatgcccgtggtttgatcgatgaaaaggattcagagctccagcgtatccgtctgagcaacaaccagtatgttgaagaaaacgataggctcagagctattctcggtgagtggagtgctcgagccgcaaagcttgaacgtgcattggaggcagagcgggtgtcaaacgtcgaattgaggaaaaatattgcaaagtttagaggtcatttgtacaaagagcaggaggcctgacttcggtatgttatagctggttccagaattttacctaagacacctgactaaaggcacaatttttgatatagaagggtatctcggtctggatccattcgaactgagattggcacgtgattgttcgatgacgcatggaatatgcgtctagtggtttgtagaatgcgtagtttgatgtacatgtgttcgtaggtttgagcatgtagagtatggtatccctcgggaaaaaaaaggagtatggtattcatgtggttgaagactgctgagtattgtgaacatggtagtgtcttgtggggtgtggttcgcaggagacaagaggaggaggttgcagcactggtcgttcttgtaggtgtgcggcagataggattatgcgtactaactgaagaggcagctaggcaagaatcttaacacaaacaagaagaacaggatcgcccctccgactctaatcaatagagttcattacagataagcgacgcagtgcgatgaaatgtaccacctacattcacagacccagttgggcgtaccgttgaagcctcatgggccactcgcgcctgaacccagttgccactatagttttcttcttcggatttgtttgttttttcattctattttctattctattctgtgtgactttcttttctttgttgtttagggctcatttgataataattcagattggttcatatcaatgttctctaaaaaaacgttccagatgacgaatcggaattgcttaaccatttgactgtagaattagaatcacttggacccgtttctag

SEQ ID NO: 211787 - DNA, 1913 bp, Zea Mays
cttccaccgcgccgcgtcatcttcttccttcagcgttgagcggaatcgcgaattgaaaacggaagttaccaattcacccgactcgatagacacaccggctctgctctaagcgagaatccgaggagcgctgccaagcgcctccgcgacgggatcgacgcgacttgattcgcgagtttcaacgtcgcgaggagagcagaaaattacgcaggcagagcggctgccggctgggtgttgaagctagagcggctaggagcaggttcggagcgctaccaaacaggcccttaacctaagcgctcctgcccttcggatccggaagttggaggcgcgcgaggaggcgaggcttgcaaggtctcccttgctagacggcaacggggtgacgatggcgcacgagcggggcgccgccgcatccgcccacccagcggctccaacctccgaggaagacgcgctgtttattgatttattacatgaagcgcccctgtctggtcaccgggagcctagaagcatagttggtgggaccttgtactgtatcttattggttttgctgctgttgccatttcagctccatggatatttcttttcgcgccagatatgatctctccattgctatgtagctccaatgctatcctcctcgttcttacaggcatttttcaacaatattgggttcaccaggtcaggaaagtgagattgcagggctattacgattttagccagaaactgaagcgtattgctcgacttccatttgctactattgcttgtgggactgctttgatgctcttaatcatggtctggcaacctcttttacaaatactatcagtttcactgcttctcaggattgccattgtagttgaagtcacgtgtgctggatgttttatgggcttatatttatggcacatccacaaatacaactctttgaatgggcagcctgatattttgcggtcattatattctgcactccaaccatctaatactttggaagatcgaagatatcatgatgcccgtctttctgatcagcagatggcgttacttcagtaccaaagagagaatatccattatctgagtgaggaggttctccgcttgcaagaatgcttaagcaaataccagagaactgctggaaccactcctcaggttgatcttgcccatcttttagcaactcgtgatcaagaactccgagcactcactgctgagatgaatcaagtgcactccgaacttcaacatgcccgtggtttgatcgatgaaaaggattcagagctccagcgtatccgtctgagcaacaaccagtatgttgaagaaaacgataggctcagagctattctcggtgagtggagtgctcgagccgcaaagcttgaacgtgcattggaggcagagcgggtgtcaaacgtcgaattgaggaaaaatattgcaaagtttagaggtcatttgtacaaagagcaggaggcctgacttcggagacaagaggaggaggttgcagcactggtcgttcttgtaggtgtgcggcagataggattatgcgtactaactgaagaggcagctaggcaagaatcttaacacaaacaagaagaacaggatcgcccctccgactctaatcaatagagttcattacagataagcgacgcagtgcgatgaaatgtaccacctacattcacagacccagttgggcgtaccgttgaagcctcatgggccactcgcgcctgaacccagttgccactatagttttcttcttcggatttgtttgttttttcattctattttctattctattctgtgtgactttcttttctttgttgtttagggctcatttgataataattcagattggttcatatcaatgttctctaaaaaaacgttccagatgacgaatcggaattgcttaaccatttgactgtagaattagaatcacttggacccgtttctag

SEQ ID NO: 211788 - DNA, 2158 bp, Zea Mays
ccaccgcgccgcgtcatcttcttccttcagcgttgagcggaatcgcgaattgaaaacggaagttaccaattcacccgactcgatagacacaccggctctgctctaagcgagaatccgaggagcgctgccaagcgcctccgcgacgggatcgacgcgacttgattcgcgagtttcaacgtcgcgaggagagcagaaaattacgcaggcagagcggctgccggctgggtgttgaagctagagcggctaggagcaggttcggagcgctaccaaacaggcccttaacctaagcgctcctgcccttcggatccggaagttggaggcgcgcgaggaggcgaggcttgcaaggtctcccttgctagacggcaacggggtgacgatggcgcacgagcggggcgccgccgcatccgcccacccagcggctccaacctccgaggaagacgcgctgtttattgatttattacatgaagcgcccctgtctggtcaccgggagcctagaagcatagttggtgggaccttgtactgtatcttattggtaggttttgctgctgttgccatttcagctccatggatatttcttttcgcgccagatatgatctctccattgctatgtagctccaatgctatcctcctcgttcttacaggcatttttcaacaatattgggttcaccaggtcaggaaagtgagattgcagggctattacgattttagccagaaactgaagcgtattgctcgacttccatttgctactattgcttgtgggactgctttgatgctcttaatcatggtctggcaacctcttttacaaatactatcagtttcactgcttctcagggcacatccacaaatacaactctttgaatgggcagcctgatattttgcggtcattatattctgcactccaaccatctaatactttggaagatcgaagatatcatgatgcccgtctttctgatcagcagatggcgttacttcagtaccaaagagagaatatccattatctgagtgaggaggttctccgcttgcaagaatgcttaagcaaataccagagaactgctggaaccactcctcaggttgatcttgcccatcttttagcaactcgtgatcaagaactccgagcactcactgctgagatgaatcaagtgcactccgaacttcaacatgcccgtggtttgatcgatgaaaaggattcagagctccagcgtatccgtctgagcaacaaccagtatgttgaagaaaacgataggctcagagctattctcggtgagtggagtgctcgagccgcaaagcttgaacgtgcattggaggcagagcgggtgtcaaacgtcgaattgaggaaaaatattgcaaagtttagaggtcatttgtacaaagagcaggaggcctgacttcggtatgttatagctggttccagaattttacctaagacacctgactaaaggcacaatttttgatatagaagggtatctcggtctggatccattcgaactgagattggcacgtgattgttcgatgacgcatggaatatgcgtctagtggtttgtagaatgcgtagtttgatgtacatgtgttcgtaggtttgagcatgtagagtatggtatccctcgggaaaaaaaaggagtatggtattcatgtggttgaagactgctgagtattgtgaacatggtagtgtcttgtggggtgtggttcgcaggagacaagaggaggaggttgcagcactggtcgttcttgtaggtgtgcggcagataggattatgcgtactaactgaagaggcagctaggcaagaatcttaacacaaacaagaagaacaggatcgcccctccgactctaatcaatagagttcattacagataagcgacgcagtgcgatgaaatgtaccacctacattcacagacccagttgggcgtaccgttgaagcctcatgggccactcgcgcctgaacccagttgccactatagttttcttcttcggatttgtttgttttttcattctattttctattctattctgtgtgactttcttttctttgttgtttagggctcatttgataataattcagattggttcatatcaatgttctctaaaaaaacgttccagatgacgaatcggaattgcttaaccatttgactgtagaattagaatcacttggacccgtttctag

SEQ ID NO: 211789 - DNA, 2077 bp, Zea Mays
cagcttctccccaacttcatttcagctcttgtgggtcggttcgggtcgggccagcccgggccggtagtgagcgcgccacccgacccgtttcgcggttgctccggtcccttttcctctcctattttctcttctctctctcccgtcgtccagagacccagaaggagagggagacagagccacagaggcaggggagaggaggagcagcgtggcgacgcccaaatcgagcgacctgatcgaggcccctcgcccctactcgctgaatcccaatccgagcccgccaattgggcgcccccccccgcccacgcaaagatgaagcgggctcgaagggcgtatgtgcaagagatgactgatgagggatgctagtgaaattgatgaacttgttacgggcgtgctggcgaccgtcatcgaaccggcatgcccgaacaggctcagatgttaccggtaggcaggatggacttctatggtacaaggacgccgggcaacatgtcaatggggagttctccatggctgttgttcaggcaaataacttacttgaggaccagtgtcagatcgagtcgggcccactgagttttctagattctggaccatatggcactttcgttggtgtttacgatgggcatggtggtccagagacggcctgctatatcaatgatcatcttttccagaatctgaaaagatttgcatctgagcagaatgcaatgtctgctgatgtactgaagaaggcatatgaagctacagaagatggattcttctccattgttaccaaacaatggcctgtaaagcctcagatagcagctgtcggctcatgctgcctggtcggtgtaatttgtggtggcatgctttatgttgccaatgttggggattcccgtgtcgttttaggaaaacatgttaaggccactggagaagttttggctgtccaactgtcagcagaacataatgttagtattgcgtccgtgagaaaagaactgcagtcaatgcacccagaagataggcacattgttgttctcaagcacaatgtttggcgtgttaaaggactaattcaggtttgtagatcaattggtgatgcatatctcaaaaagcaagagttcaacagggaacccctatatgcaaaatttcgcctccgtgaaccttttcacaagccaatactaagttcagaaccatcaatcagtgtgcaaccactacaaccacacgaccagtttctcatatttgcatctgatggactttgggagcagttaaccaaccaagaggcagttgatattgttcgaagtagcccccgcagtgctgtgctaggaggctgataagagcggcactgcaagaggcagccaagaaaagagagatgaggtactcggacctcaagaagattgaccgcggtgttcgccgccacttccacgacgacataacagtcatagtagtgttccttgactccggcctcgtaagccaggcgagcacacaccgaggtccaactctttccttgcgaggcggtggcggcagcgctggcctgcgcagcaacacacttgcacctacgtgactataaagtgcctggtggagtggaggctactgactgaaggtggttttctttccttgtgtcgaatgtgttatatatgtacttgtaccagccaagatcattcatccccccccctaaaatggtgtaaagaagtaggagaggcgccgaagttcctcaccagcgtatctgaatgccctcaatggtgtcaagttgtggactcaagtggatagcttcgctgaatcttctgatgatgctctgtggaaagctcgaatcctttccacctgaaaaagcaagtaatatgtcttccagtgctggaattaacccctagtgcatatatatatgtatgaaataataataaggcaaaaggaggagtaacttatttaactaatgctgtgaggtgtatttatgttttgtatgtgtactgctttttgactgctactgcatctactgttgttaattgaccactggtgaagtgaaatcactggtttcgtcttgctgtctcactgttactagttgttcacagcattgctggtttgactgttcctactatatacatatagtttatatattata

SEQ ID NO: 211790 - DNA, 1912 bp, Zea Mays
ctctctctcccgtcgtccagagacccagaaggagagggagacagagccacagaggcaggggagaggaggagcagcgtggcgacgcccaaatcgagcgacctgatcgaggcccctcgcccctactcgctgaatcccaatccgagcccgccaattgggcgcccccccccgcccacgcaaagatagaagaaaattattggcgctctgacaaatccaactgaggttttcttggactacagatgaagcgggctcgaagggcgtatgtgcaagagatgactgatgagggatgctagtgaaattgatgaacttgttacgggcgtgctggcgaccgtcatcgaaccggcatgcccgaacaggctcagatgttaccggtaggcaggatggacttctatggtacaaggacgccgggcaacatgtcaatggggagttctccatggctgttgttcaggcaaataacttacttgaggaccagtgtcagatcgagtcgggcccactgagttttctagattctggaccatatggcactttcgttggtgtttacgatgggcatggtggtccagagacggcctgctatatcaatgatcatcttttccagaatctgaaaagatttgcatctgagcagaatgcaatgtctgctgatgtactgaagaaggcatatgaagctacagaagatggattcttctccattgttaccaaacaatggcctgtaaagcctcagatagcagctgtcggctcatgctgcctggtcggtgtaatttgtggtggcatgctttatgttgccaatgttggggattcccgtgtcgttttaggaaaacatgttaaggccactggagaagttttggctgtccaactgtcagcagaacataatgttagtattgcgtccgtgagaaaagaactgcagtcaatgcacccagaagataggcacattgttgttctcaagcacaatgtttggcgtgttaaaggactaattcaggtttgtagatcaattggtgatgcatatctcaaaaagcaagagttcaacagggaacccctatatgcaaaatttcgcctccgtgaaccttttcacaagccaatactaagttcagaaccatcaatcagtgtgcaaccactacaaccacacgaccagtttctcatatttgcatctgatggactttgggagcagttaaccaaccaagaggcagttgatattgttcgaagtagcccccgcagtggctgtgctaggaggctgataagagcggcactgcaagaggcagccaagaaaagagagatgaggtactcggacctcaagaagattgaccgcggtgttcgccgccacttccacgacgacataacagtcatagtagtgttccttgactccggcctcgtaagccaggcgagcacacaccgaggtccaactctttccttgcgaggcggtggcggcagcgctggcctgcgcagcaacacacttgcacctacgtgactataaagtgcctggtggagtggaggctactgactgaaggagaggcgccgaagttcctcaccagcgtatctgaatgccctcaatggtgtcaagttgtggactcaagtggatagcttcgctgaatcttctgatgatgctctgtggaaagctcgaatcctttccacctgaaaaagcaagtaatatgtcttccagtgctggaattaacccctagtgcatatatatatgtatgaaataataataaggcaaaaggaggagtaacttatttaactaatgctgtgaggtgtatttatgttttgtatgtgtactgctttttgactgctactgcatctactgttgttaattgaccactggtgaagtgaaatcactggtttcgtcttgctgtctcactgttactagttgttcacagcattgctggtttgactgttcctactatatacatatagtttatatattata

SEQ ID NO: 211791 - DNA, 4340 bp, Zea Mays
cgaaaaagtgcagctcagccacgaatagcagaaatggccgcagtagtgttttggtccctccgccgccccccacggtctaacacacccgcccgctaattcgccgaccagcctgccatcacccgctcgctgcagccgccgcgcccctcccactcaccaacgcggcaacgcccatggcgcccgtctgctgaaaacacccgccgccatgcctcgcgaccagatggtgaccaatggttttggagcaaaaagggataatgcaggggcaaaaaaatctccccagcaaattcagaggctggagaagttttactctgatgtacagtatccaaagccagaggaaatgggtgagtatgcaacctgtgttggtttgacttacagtcaggtccgtatatggttcaaagagcgaaggagaaaagagaggaggatggagatgggagccattgggtctcagatggaaaggcaatttagtgcacgttccagtggacctagatgcagcagcagttcttcgttttgtaaccaagctcccatctatgacatttcacgttcagagtcggacacctggggtatgagcacggcaggagaggaaagtaaaattctatcacaagttctgtttcccaaggattatatcctgagcaaaattttccgcaaggatggtccacctcttggtagtgaattcgaccccctcccccaaagtgcacatggctgtatcagagacactacatgccatcattcctctgagaaccaaagaactgtgaagaagagaaagatcatagagtcaactaaccagagatctgatgtgtatgagaatactgctcctgtgaggaaacatggaattggcaaaggtctaatgacagtgtggcatgccatgtattcccataacgtgaaatgtcaaagcggtcgaaatttcattgatgaaactggttgcttgaggtctcttagaccgtttgacgattttgatggattagaagatcgcgataatggaaggaagactcaaaatcaaggtatgacacggaaaaagatagtcaaaaggagtaaagttctggtgaatagaaaaaaggtgccgtgtaagagagttactggtccaaaggtgcatcctccaatggcttgccatctttcagttgatgaatcagaatctttagaactacagactgaactagtgactttagtggatgatgaggagctcgagctcagtgaattacaaacagatttacttgccaagtttcctccacaaagtttgaagatgaaaaagctattctctacaaaaccttgggagtcatcacctgaaatggtgaaaaagctttttcagattatccggtatgtatacactcattttggcagtattgatgtccaccccttcatatttgatgagtttgtgcaagcattccatgacaaggactcctcgttgttgggggaagtacatgttggtcttctcaagctactgttgttaaaggctgaaataggaagtgatggtgtatttgttccacgatcttctaaagactgcagatttctcagtttcctgaactttgttagggaacaagaattcgatgccaatgtttggatcagatcgttgaatgctcttacatgggttgagatacttcgtcaagtccttgttgcttcaggctttgggccaaaacagcatttgctgaatcaagaattctttaacaaggagaaaaatcaaatggctaaatatggtttacgtccccgcacactgaaaggagaattgtttgcactgttgtctaaggcaggaagttgtgggttaaaggtttcagtactagccaaatcatctgagattattgatcttaatgtttcgagcccattagaactagagcagttgatatctttagctctctccagtgacatcacattatttgagaagattgcaccttctgcatatcgtctccgtgttgacccccaaattaaaggggaagaagattctatgtcagatagtgatgattctggaagtgttgatgaggatgaggatgctagccgaagtgatgatggatctgatggttcccaaaagttaaaatttcttgagaatgaaagcagacttgctcgaaggaaggagaaaaatgcacatggaagtccaaataaatgtagtgaaattgatgaaagttattcaggtgaaaaatggcttttggcattgatggaaggcgagtattcagatctaagcattgatgagaagttggattgtttggttgctttaatagatgttgtttctggtgctggttctgttccaagacttgaggaaccgcaaagagtcttgcataatgtgcccagagtgcatccaccacaatcaggtgggaaaataaagaaatcaactaaaaacctttgtcaatatagcgatgagtccttaaatggttcaggaagtttggattgttgtcatcaaggccagtcaggaaggcgaaaaaatcaggattacaccactgaccctggaaggaacgatttacctattgctgctcatggaccacaagttgttctcttaggatcagaccgcaggtataatagctattggctcttccttggtccttgtagggaagatgatccagggcatcgtagggtctacttcgagtcctcagaggatggtcactgggaggtgattgattcaccacaggaattactttccttgctatctatcctcgatagcaggggcactagggaagcacatctccttacatcgatggagaagagacaagcctgcctttttgaagccatgaaaaaacatgtggaaggagggaaggcagccaggcttccagcctcatctgattcatactgctcccagacaagtagtggagatggaacttcgcccaagacaagtagtgtggatggagcttcatctgtatcagacattgagaacacttctgttcctacaagcctcaaagatagtaatttggattcatcgtctgccgtagtaattgaaagtgggaggggaggtgatgagaaaatatctatgtgggaacggctgcaagcatttgataaatggatctggacttctttttactccatccttactgctgttaaaagtggcaagaagtcatttaaggagtcactacttcgttgtggaagttgtcatgatctatattggagagatgaaaagcactgcagaatatgccattcaactttcgaggttggttttgatcttgaagaaaaatatgctgtacatgtggcgacgtgcagggagcctgaactttcacatgaggtaccaaatcataaatttctgccatcacagctacaggcacttaaagcagccattcatgctattgaggcctctatgcctgaggcagcttttactggttcttggatgaagtctgctcacaagctgtgggttaagcggctgcgacgaacgtcatcattgccagagcttttgcaggttcttgtcgattttgtaggggcaatggatgttgattggttgtacaaaagttcatctgcgagattgagaacaaatctggatgacatcattgtcgactttcagacaatgccacaaacaacatcagcagttgcactttgggttgtccaattggatgccctcattgcgccttatttggataatgccatggcaagacagctggtgaatgctaggtagcttacaaagatggattcttttgcgtgatgcacaagcaccccgagctgacttctttttctggcaccatctgcaagttttttcttgatgaaagcttttcatctaggtgagacagaacatggggtctgctttgagttcgagaacaagatcttgcgacttgctgtaaagcatggaatatattgttccctcccagcagagcattgcgtcatagacaatgaaaaagttttgttaataatcgttgcttcagatatgtgaaagttttggctttccatgtagcgacacaattgggatgtaagcaatttctgaaacagaccgctgtttgcaggtggtgctgtttgggacttgattaccagctgtgcccttagttttaacggaggggtggttataattttgttccttctatatctgtatgtgctaagttgctcctagtccgtgagagctttctacattaggctatttttgtatgttatgtaaccagtttctattagagtgcagttgtagacatttagaacatgtacaccaatattgtgactgtttgaacaagtgagggaggcatagaagacttcatacggatgaattcatgattagaataaaattgcaccaaaaatcaattttgaaccgttacctttttggtatctcgtatatgttttttttttgtctatgtagtgctagttgataaatttcggatagatgtaaataggaaactgaaactctattcggatagatgtaaatagaaaaatgaaactctatttgtttaaaataagttaga

SEQ ID NO: 211792 - DNA, 4336 bp, Zea Mays
cgaaaaagtgcagctcagccacgaatagcagaaatggccgcagtagtgttttggtccctccgccgccccccacggtctaacacacccgcccgctaattcgccgaccagcctgccatcacccgctcgctgcagccgccgcgcccctcccactcaccaacgcggcaacgcccatggcgcccgtctgctgaaaacacccgccgccatgcctcgcgaccagatggtgaccaatggttttggagcaaaaagggataatgcaggggcaaaaaaatctccccagcaaattcagaggctggagaagttttactctgatgtacagtatccaaagccagaggaaatgggtgagtatgcaacctgtgttggtttgacttacagtcaggtccgtatatggttcaaagagcgaaggagaaaagagaggaggatggagatgggagccattgggtctcagatggaaaggcaatttagtgcacgttccagtggacctagatgcagcagcagttcttcgttttgtaaccaagctcccatctatgacatttcacgttcagagtcggacacctggggtatgagcacggcaggagaggaaagtaaaattctatcacaagttctgtttcccaaggattatatcctgagcaaaattttccgcaaggatggtccacctcttggtagtgaattcgaccccctcccccaaagtgcacatggctgtatcagagacactacatgccatcattcctctgagaaccaaagaactgtgaagaagagaaagatcatagagtcaactaaccagagatctgatgtgtatgagaatactgctcctgtgaggaaacatggaattggcaaaggtctaatgacagtgtggcatgccatgtattcccataacgtgaaatgtcaaagcggtcgaaatttcattgatgaaactggttgcttgaggtctcttagaccgtttgacgattttgatggattagaagatcgcgataatggaaggaagactcaaaatcaaggtatgacacggaaaaagatagtcaaaaggagtaaagttctggtgaatagaaaaaaggtgccgtgtaagagagttactggtccaaaggtgcatcctccaatggcttgccatctttcagttgatgaatcagaatctttagaactacagactgaactagtgactttagtggatgatgaggagctcgagctcagtgaattacaaacagatttacttgccaagtttcctccacaaagtttgaagatgaaaaagctattctctacaaaaccttgggagtcatcacctgaaatggtgaaaaagctttttcagattatccggtatgtatacactcattttggcagtattgatgtccaccccttcatatttgatgagtttgtgcaagcattccatgacaaggactcctcgttgttgggggaagtacatgttggtcttctcaagctactgttgttaaaggctgaaataggaagtgatggtgtatttgttccacgatcttctaaagactgcagatttctcagtttcctgaactttgttagggaacaagaattcgatgccaatgtttggatcagatcgttgaatgctcttacatgggttgagatacttcgtcaagtccttgttgcttcaggctttgggccaaaacagcatttgctgaatcaagaattctttaacaaggagaaaaatcaaatggctaaatatggtttacgtccccgcacactgaaaggagaattgtttgcactgttgtctaaggcaggaagttgtgggttaaaggtttcagtactagccaaatcatctgagattattgatcttaatgtttcgagcccattagaactagagcagttgatatctttagctctctccagtgacatcacattatttgagaagattgcaccttctgcatatcgtctccgtgttgacccccaaattaaaggggaagaagattctatgtcagatagtgatgattctggaagtgttgatgaggatgaggatgctagccgaagtgatgatggatctgatggttcccaaaagttaaaatttcttgagaatgaaagcagacttgctcgaaggaaggagaaaaatgcacatggaagtccaaataaatgtagtgaaattgatgaaagttattcaggtgaaaaatggcttttggcattgatggaaggcgagtattcagatctaagcattgatgagaagttggattgtttggttgctttaatagatgttgtttctggtgctggttctgttccaagacttgaggaaccgcaaagagtcttgcataatgtgcccagagtgcatccaccacaatcaggtgggaaaataaagaaatcaactaaaaacctttgtcaatatagcgatgagtccttaaatggttcaggaagtttggattgttgtcatcaaggccagtcaggaaggcgaaaaaatcaggattacaccactgaccctggaaggaacgatttacctattgctgctcatggaccacaagttgttctcttaggatcagaccgcaggtataatagctattggctcttccttggtccttgtagggaagatgatccagggcatcgtagggtctacttcgagtcctcagaggatggtcactgggaggtgattgattcaccacaggaattactttccttgctatctatcctcgatagcaggggcactagggaagcacatctccttacatcgatggagaagagacaagcctgcctttttgaagccatgaaaaaacatgtggaaggagggaaggcagccaggcttccagcctcatctgattcatactgctcccagacaagtagtggagatggaacttcgcccaagacaagtagtgtggatggagcttcatctgtatcagacattgagaacacttctgttcctacaagcctcaaagatagtaatttggattcatcgtctgccgtagtaattgaaagtgggaggggaggtgatgagaaaatatctatgtgggaacggctgcaagcatttgataaatggatctggacttctttttactccatccttactgctgttaaaagtggcaagaagtcatttaaggagtcactacttcgttgtggaagttgtcatgatctatattggagagatgaaaagcactgcagaatatgccattcaactttcgaggttggttttgatcttgaagaaaaatatgctgtacatgtggcgacgtgcagggagcctgaactttcacatgaggtaccaaatcataaatttctgccatcacagctacaggcacttaaagcagccattcatgctattgaggcctctatgcctgaggcagcttttactggttcttggatgaagtctgctcacaagctgtgggttaagcggctgcgacgaacgtcatcattgccagagcttttgcaggttcttgtcgattttgtaggggcaatggatgttgattggttgtacaaaagttcatctgcgagattgagaacaaatctggatgacatcattgtcgactttcagacaatgccacaaacaacatcagcagttgcactttgggttgtccaattggatgccctcattgcgccttatttggataatgccatggacagctggtgaatgctaggtagcttacaaagatggattcttttgcgtgatgcacaagcaccccgagctgacttctttttctggcaccatctgcaagttttttcttgatgaaagcttttcatctaggtgagacagaacatggggtctgctttgagttcgagaacaagatcttgcgacttgctgtaaagcatggaatatattgttccctcccagcagagcattgcgtcatagacaatgaaaaagttttgttaataatcgttgcttcagatatgtgaaagttttggctttccatgtagcgacacaattgggatgtaagcaatttctgaaacagaccgctgtttgcaggtggtgctgtttgggacttgattaccagctgtgcccttagttttaacggaggggtggttataattttgttccttctatatctgtatgtgctaagttgctcctagtccgtgagagctttctacattaggctatttttgtatgttatgtaaccagtttctattagagtgcagttgtagacatttagaacatgtacaccaatattgtgactgtttgaacaagtgagggaggcatagaagacttcatacggatgaattcatgattagaataaaattgcaccaaaaatcaattttgaaccgttacctttttggtatctcgtatatgttttttttttgtctatgtagtgctagttgataaatttcggatagatgtaaataggaaactgaaactctattcggatagatgtaaatagaaaaatgaaactctatttgtttaaaataagttaga

SEQ ID NO: 211793 - DNA, 1291 bp, Zea Mays
gttccccaacctctcgcgttcgtgtccatcttcgaattcgagctcctccatcttccttcaccctcctctctctcgctgtttgaggagaactacctgctcctgctccctcttccgctcctccgcgctcccgctcgccatccccaggcttcatttcggacggggatggacgactacgcccgggagatgatggagctgaagacgctcgtcacccgcaccctcgagaagaagggcgttctcgccaagattagggctgagctaagagcaagcgtgtttgaagccattgaagaggaggatcgggtgatggagaatgatgatggcggtaatcctgctttgcttggtagctgtaatgaccgggctaagcaactgcatgcttcaccttcaggtaggttactaactgcacttgtttgcgaatacttggagtgggcgcaattaagtcacacaatgaaagtttacttgccagagtgtaacctgcccaaggacttctggaagaatgaactgaaagacttctctaacaaaagtggagctgaagggagcaggagtgctgaaagtggtccactgcttttagatgttctcgaaggttatctgaaatatgaggcctgtactcaaggtctccttttgatgaatttgtctcaagcaaggatgggcggcaggaggatgatgagttcagaatctgatccatcactaaatgctgaacatcggagcatgaggagggcaccatcagcatcagttgggaatctgcctcctatggggagacctatctcttcttcgcagcaggcatcagatcgcagaggggggtcttcagtttccaacacaaggaaagatgagtacaactggagatacgataccaccgatgatatatctgaagaggtgctgcgggcatcgactgccctagaaagtgttcagctagaccgcaaatctcggaatctgccgacatcttggaggcattcaggggatggcgccgagtaacaagaaggctttggagctggttgcttgacttgaccgaccctgtatcatgtaatttgtatgccactcatttgtggtgcttggattgctgctatcttagaaaaagaagtggtaaactggttatgtatggttgtcttgtaacgaacaaaacaaatcaaagagttaggtgccgtttgttttacatatttgtaacgtgatgggtaactgtgatgggtaactgataacgttaaaccatgtttgtttaagtccaaccgtaatcagataccacattaaaaattaatactagtttattcaaacttattatcgctcacactcaagtgtgaattat

SEQ ID NO: 211794 - DNA, 1765 bp, Zea Mays
accgccatctgggcccaacgacaaaccctaaacccttttcctccaaattcacgcgagctccaatctgtgtgggtctccgtcgtcgtctctctcctcccggccgccggcgcgatgaggcggttgctcggccacctacacccccatgcccagagcctcttcgcttccctgcctcgcaaaccgtccatcgccaccaagctccccttcctcctctcccgccgcctcctttccgatgccgcctcgcctcctgccccctcgctgccgcctcctcccccgccctctgccgacgtcacgaacacagagttgaagaagaggttggagacttactatggggtggatgaagaggctgaattaccatctgtcgctaaggctgttcttgagcggaatctcacgggtgcccatagtgagactgatgatgaccttattgaggagctgcgtagtaagccactccctgaagtccatgaccgggactttgagtctgattttgaggagatgcatgatactgatgaggagctgaatgacctgtacaatacaagggagtatgttgagaagaagatcaagagtgatgagttctttaacatggatgacacaaagtgggatgccatgatcaaggaggccacagacaagggtcacttaactaacatgaaggagtgcgaggaaatcctcgaggacatgctctactgggacaagctacttcctgatgagatcaagcaaaaggtggagaccaaatttaatgagttgggagacatgtgtgagaggggagagatggaacctgagcaagcatatgagatgttcaaagaatttgaggataagatggtcgctgagtgcactgaattaattgaatcaaagatgccaactgacgctgatgaactgactgaatcaggaggtaagaaagttgagttagatgatctacctggcgagggacctgttctaaggtgggaatcacggattgtatttgttcctagtggagatgcatatcatcccaaaaacagaaaagtcaagctcagtgtgactgtgaaggaattgggactttcacgacatgctttccgtcggttgcgtgaggttgttggaaagaggtataattctgggaaagatgagctcacaataatcagtgaaaggtttgaacaccgggaagagaacagaaaagactgcttgaggacactgtatactctaataaaagacgcaatgaaagctgacaaacttgttgaggatgccaggaattcttatgttaaaggaagacttaaggctaatccacaatttatggagcgattgaagaggaagacagataagttgatggcagctgcataaggtgttacagagctccttgttttaacagctcctctctttccctcatcaacatgggtcattcttagtcataaatatatgttgagcatctcgaataacaatgtcaacacacatccccagcctatgcctttttggaaatcttttgctgctttcctaaattgaagatgcttaatttccatagtttgctgaggaaagtagctactgaggtgtaaattttggagtcaatatgtcgcttcttctgaagtcacagaatcatgctggcaggactggaatctaatctcaaccttgtgatctgtacaattgattcatttaaaggtgtatgcgggagtatgtttgatgcaagaactatgagccatccatcaggcatgagcaggaccaccacggtcctcaccgtgtcctcctacagcggctcctacagcggcgtggcggcggcaaacaccgtggatgacttgtgcgacatgat

SEQ ID NO: 211795 - DNA, 1723 bp, Zea Mays
tatagttccgaccgccatctgggcccaacgacaaaccctaaacccttttcctccaaattcacgcgagctccaatctgtgtgggtctccgtcgtcgtctctctcctcccggccgccggcgcgatgaggcggttgctcggccacctacacccccatgcccagagcctcttcgcttccctgcctcgcaaaccgtccatcgccaccaagctccccttcctcctctcccgccgcctcctttccgatgccgcctcgcctcctgccccctcgctgccgcctcctcccccgccctctgccgacgtcacgaacacagagttgaagaagaggttggagacttactatggggtggatgaagaggctgaattaccatctgtcgctaaggctgttcttgagcggaatctcacgggtgcccatagtgagactgatgatgaccttattgaggagctgcgtagtaagccactccctgaagtccatgaccgggactttgagtctgattttgaggagatgcatgatactgatgaggagctgaatgacctgtacaatacaagggagtatgttgagaagaagatcaagagtgatgagttctttaacatggatgacacaaagtgggatgccatgatcaaggaggccacagacaagggtcacttaactaacatgaaggagtgcgaggaaatcctcgaggacatgctctactgggacaagctacttcctgatgagatcaagcaaaaggtggagaccaaatttaatgagttgggagacatgtgtgagaggggagagatggaacctgagcaagcatatgagatgttcaaagaatttgaggataagatggtcgctgagtgcactgaattaattgaatcaaagatgccaactgacgctgatgaactgactgaatcaggaggtaagaaagttgagttagatgatctacctggcgagggacctgttctaaggtgggaatcacggattgtatttgttcctagtggagatgcatatcatcccaaaaacagaaaagtcaagctcagtgtgactgtgaaggaattgggactttcacgacatgctttccgtcggttgcgtgaggttgttggaaagaggtataattctgggaaagatgagctcacaataatcagtgaaaggtttgaacaccgggaagagaacagaaaagactgcttgaggacactgtatactctaataaaagacgcaatgaaagctgacaaacttgttgaggatgccaggaattcttatgttaaaggaagacttaaggctaatccacaatttatggagcgattgaagaggaagacagataagttgatggcagctgcataagggtcattcttagtcataaatatatgttgagcatctcgaataacaatgtcaacacacatccccagcctatgcctttttggaaatcttttgctgctttcctaaattgaagatgcttaatttccatagtttgctgaggaaagtagctactgaggtgtaaattttggagtcaatatgtcgcttcttctgaagtcacagaatcatgctggcaggactggaatctaatctcaaccttgtgatctgtacaattgattcatttaaaggtgtatgcgggagtatgtttgatgcaagaactatgagccatccatcaggcatgagcaggaccaccacggtcctcaccgtgtcctcctacagcggctcctacagcggcgtggcggcggcaaacaccgtggatgacttgtgcgacatgat

SEQ ID NO: 211796 - DNA, 1471 bp, Zea Mays
accgccatctgggcccaacgacaaaccctaaacccttttcctccaaattcacgcgagctccaatctgtgtgggtctccgtcgtcgtctctctcctcccggccgccggcgcgatgaggcggttgctcggccacctacacccccatgcccagagcctcttcgcttccctgcctcgcaaaccgtccatcgccaccaagctccccttcctcctctcccgccgcctcctttccgatgccgcctcgcctcctgccccctcgctgccgcctcctcccccgccctctgccgacgtcacgaacacagagttgaagaagaggttggagacttactatggggtggatgaagaggctgaattaccatctgtcgctaaggctgttcttgagcggaatctcacgggtgcccatagtgagactgatgatgaccttattgaggagctgcgtagtaagccactccctgaagtccatgaccgggactttgagtctgattttgaggagatgcatgatactgatgaggagctgaatgacctgtacaatacaagggagtatgttgagaagaagatcaagagtgatgagttctttaacatggatgacacaaagtgggatgccatgatcaaggaggccacagacaagggtcacttaactaacatgaaggagtgcgaggaaatcctcgaggacatgctctactgggacaagctacttcctgatgagatcaagcaaaaggtggagaccaaatttaatgagttgggagacatgtgtgagaggggagagatggaacctgagcaagcatatgagatgttcaaagaatttgaggataagatggtcgctgagtgcactgaattaattgaatcaaagatgccaactgacgctgatgaactgactgaatcaggaggtaagaaagttgagttagatgatctacctggcgagggacctgttctaaggtgggaatcacggattgtatttgttcctagtggagatgcatatcatcccaaaaacagaaaagtcaagctcagtgtgactgtgaaggaattgggactttcacgacatgctttccgtcggttgcgtgaggttgttggaaagaggtataattctgggaaagatgagctcacaataatcagtgaaaggtttgaacaccgggaagagaacagaaaagactgcttgaggacactgtatactctaataaaagacgcaatgaaagctgacaaacttgttgaggatgccaggaattcttatgttaaaggaagacttaaggctaatccacaatttatggagcgattgaagaggaagacagataagttgatggcagctgcataagtttgctgaggaaagtagctactgaggtgtaaattttggagtcaatatgtcgcttcttctgaagtcacagaatcatgctggcaggactggaatctaatctcaaccttgtgatctgtacaattgattcatttaaagggtaatttctgccttgtttagataacttaaa

SEQ ID NO: 211797 - DNA, 2689 bp, Zea Mays
atattgactttggtaatatgtatttagcttctcgaaccttaaatatatgttataaaaatatcagtgacaacctttacgaaacgaaggtagtagtttttgtacattttttagtaagacaaagtttaactttgatttttaaaagtcaaacattatttgaatttaaaacgtgtgtggaattgaaaaatcgatggctagctaatcaaattggtcaataaactagtcaacgtgatcaaactaaaaaaatgttgcactttattacttgagaaattttccagtagaaattttccagttgaaattttaaaagaataaatctaaataattaatgaagtgtttcttggcgcgcttaaacttctcgaaaatattgtgctttcggctttcgcgctctgtttatccgcgccaaaaaattcccccccccctaaagtgttggaaccaccctcccatgtttctcgatcacacctcctagaaatctcctccggttcttccacctccctgtagttctcgctctcctgccaccattctcttcgtgctcctgctccatatgccctcctttcagtctgctgcttgatgatccatcgcccagctgctggttgatccgtcgcccagctggtaacagatttcttcgtgggtgcagtagtaccataactgacccaccctctaatctttactccgacctacaagggaaagaagtaatgccaatgaaacacagaagactacaaagtctgaacttagaagctgagacacaggaaaacgtggaacaacatgaagatgtccaagatccacaaccagagctcaccattgggtttcctgagggagaagcgccaacaaggaataagtcattcaaaataatatggcaaaatggagttgttcgggaggtttttagaaatttccgaacagctgaattgtgggatctgaaaggaggaagagtactagttgaaactgacaagaatggcattcccaatcagtggtctgaatccattctctcgtcataccttggtgagcttgcacagaattcatcatttgcaccattacacattccgagatgggacaacaaattattcaaaggtccaaaggaacgcatcatcaaagatgttgagaaaaaatttatctatagtagtgagacaaaatggtctactcgagattggattcttaagacagtgaataaaaggtggagagactacaagtcagacttgaagaaacaatacttcaatccagataagaggtcttttgaccagattgaaaaggatgtccctgatggtgtgaatgaaaatcaatggagttttctgttaggcatatggtgcagtgaagcacatcagaaattatgccggacaaatgcggaatctggaaagaagcagaggcatccacacactagcggtaggaaaagccatgctagacttaagaaggagatggaagacaagaagaaaggaagcatcactaaaattgatctttgggacgagtctcataagaagaggaatgggaactatgtcaatcaaaatgtgcaaacacttatgggtaaggccttcgatgaattagagaacaggaggaaaggacaaggggacactttctactagtgattatgatgatgtgtttgagaatgtcataagaaaagacttgaacattcgtgggtactatgatgatacacattggagcaatgaaactgattcacatgttcaatcagaggagaacaaaatgattagaagggacctagagcttgctatttctgggtttaggaacattagagcattcctagaaaaaagtttccagaagaggaattgctaagcacaattctagctactggatctggaagcactacagttgatactaaagacaatgaaaatgtctcattgcaatatgataatgtagaacgatccagttatgagaaatcaccttcaccatacaatgaacagatttatactagagattataatattgccaaggtgggttgctctgatcattcagtaccaaatgacaacatagctttcagggaatcacaagttacaaggtctagtgacttgaaccaggaactcaacaatggatcactatctctagataaagaaatgtctgataaggaaactcaaagcaagcaacaacaacaaagcaaattgcaacagaataaacagaagactgtcttgttgtactcaacaaggaaaagaaaactaggccaagtttttgctgttggtaatcttatatctagagatactactcatgaaattggaggaactgtacttggggatggatattatgctgttgcggttcattatcttaacaatgttgaagatgaaagattacctcgaccacacggagatcttaaaactttggaggatgctgtgggcatgtgtgttgcttggcctcgcacacatcttaaaagggtgaagccaactactgagaagcgcacttgaatggttagaagactgaagatgcaactaatgaatgagcaagtgttatagtggagagtagttctaggatcaaaagttctagttgtcaatctacttgtttaattgtgttaggaacctcattttattcactcttgtatgtctaatctacctcaagaccacttcgtttggattgaaaatacttatgtattgttgcttacacatgaagcatttaattgatctgttatatatatgaaccttgtgtcttgtatatatatgtgctcaaattgagtgtttgtgtataagcaaaaattagcaat

SEQ ID NO: 211798 - DNA, 2456 bp, Zea Mays
ctagtccctacccggctctctccctcccccctctctctaaaaaaagtagcgcccggagaaccgagaggctggagaaataaaggcggaaagagggagggaaatctcactttgttggggattctttcctccgtttccgactcctttgttctcttaagtgttcttggttagtggaatggaagctcagcagccccatttatgcccccgagagcctcgtcgttcccctcgtgtgtaggtgtagcctttcactcggttggtggaagggcgaggcacagaagaacatcgataaagggtgtgtctattttttagctcttcgtgttcttgtaggaggaattcccgttcacatgatccgtgcctgtacctgacgggccttgtcgcgctctgctgcttcgctttcggggagaggaggactcgactcaaatcacttggtagcggagacgtcgccctttctagttcagtcgagagatatttctggcatggccggcgcaagcaaccatggatccctcaccgacgaatggttgccgccccctacaccaagcccaagaagtctcgtgtcaagctttctgaatgaagaattcagccccgggccattctctggtcttttcagtaaacatggcgccaatagaccccatgatcaatccgaaaagggcagaggagctctgaattcgagcgaggagttccctactcatgctgtcaaagacccatttcaaaagggtttctccctggagccaaatttgttcagtgctaatcatatatcaaactccaatggtggtttggcagagcgcagggctgcaagagcaggtttcagtgtcccgaaaattgatacttctcgagttggttcatcagcagttattcgatctcctgtgtcaattccacctggtctaagtccaactacactactggagtctcctgtttttctttacaataaaatggcacagccttctccaaccactggcacgttgccatttttgacggctacgaatgataagtcgacaataccaccagctaccaagataactgaagattctgcagtttataatgatgtgttttctttccaaccccacttaggttctaaagaaacaggtttctctactgcagaaaaggactatggcgcctatcagcaaaagcattcattgtggaatattcatcagcaggaatccagtcttcagtcaagttttaccgcagtcaaggacaacactagtgcaacaattggtgaaacgaagacatctagctccatgttcagtgatagtcactattcagctgaccaacagcaaggtgaagagacaaacatgaaggagcaaggcaaaggtgtcgaggctagatcagctgcttttcttcctgcaccagtgcataatgatgcatctctcctggattctcaagatgcagttgatgtctcgtcaacgctgtctaatgaagaggacgagagggcaacacatggcactgtttctatagagtgtgagggtgatgaagatgagactgaatctaaaagaaggaagttggaattagatgctttaggagctattgctattgctactacctccaccaccagtaccattgacatgggccctgcatcctcaagagctgtccgggagcctagggttgttgttcagaccacaagtgaggtagacattcttgatgacggttatcggtggcgtaagtatggacagaaggttgttaagggcaatccaaatccaagtgcgcaagcatgtggaaagagcatcacatgatctgaaatcagtcatcacaacatatgagggaaagcacaaccatgaagttccagcagccagaagtagtgggcaaggcagttctggttctggcagcggtccatctgcaccacaagctggtggttctcaccgtaggcaagaacctgcacaagccagcttcgctcactttggtacatctcctttcagctccttcggtctcgcaccgagcggacagttgggaccaacaactggtaatttccgcttcggcatggttccgccaggcgcgacgatcccaatgccctctctaggatcacttgcccctacaaaaatgattggaaatccatcagctatgcaggggtacccagggcttatgatgccaggagagccaaaggtagagcctttctcgcgaccacacttcccaacgtcaattgcacctccgccagcttaccaacagatactgagcaggcctccttttggtcatcagatgtaaataataggaaggggatagatttgcttcggcttgtatacatgatagctacgctgcaacatggctttgttctagttttgttgatggatcgtccgatttttacttctttttaaattttcagctcacggctcacgcatttctttgaagcaaagatggctgaggatgataccctgtcgtgatgtgtaatcagggaaaggatacttttcgtccttttgatactatcgaaatttgaaaatgatcaatccgattttttagttgtggatacaaat

SEQ ID NO: 211799 - DNA, 2405 bp, Zea Mays
ctcagcatttgccaccccttccttcccctaatcccctcctcggtcaaaccgcctcactctcctactcttctctccctagtccctacccggctctctccctcccccctctctctaaaaaaagtagcgcccggagaaccgagaggctggagaaataaaggcggaaagagggagggaaatctcactttgttggggattctttcctccgtttccgactcctttgttctcttaagtgttcttggaggaattcccgttcacatgatccgtgcctgtacctgacgggccttgtcgcgctctgctgcttcgctttcggggagaggaggactcgactcaaatcacttggtagcggagacgtcgccctttctagttcagtcgagagatatttctggcatggccggcgcaagcaaccatggatccctcaccgacgaatggttgccgccccctacaccaagcccaagaagtctcgtgtcaagctttctgaatgaagaattcagccccgggccattctctggtcttttcagtaaacatggcgccaatagaccccatgatcaatccgaaaagggcagaggagctctgaattcgagcgaggagttccctactcatgctgtcaaagacccatttcaaaagggtttctccctggagccaaatttgttcagtgctaatcatatatcaaactccaatggtggtttggcagagcgcagggctgcaagagcaggtttcagtgtcccgaaaattgatacttctcgagttggttcatcagcagttattcgatctcctgtgtcaattccacctggtctaagtccaactacactactggagtctcctgtttttctttacaataaaatggcacagccttctccaaccactggcacgttgccatttttgacggctacgaatgataagtcgacaataccaccagctaccaagataactgaagattctgcagtttataatgatgtgttttctttccaaccccacttaggttctaaagaaacaggtttctctactgcagaaaaggactatggcgcctatcagcaaaagcattcattgtggaatattcatcagcaggaatccagtcttcagtcaagttttaccgcagtcaaggacaacactagtgcaacaattggtgaaacgaagacatctagctccatgttcagtgatagtcactattcagctgaccaacagcaaggtgaagagacaaacatgaaggagcaaggcaaaggtgtcgaggctagatcagctgcttttcttcctgcaccagtgcataatgatgcatctctcctggattctcaagatgcagttgatgtctcgtcaacgctgtctaatgaagaggacgagagggcaacacatggcactgtttctatagagtgtgagggtgatgaagatgagactgaatctaaaagaaggaagttggaattagatgctttaggagctattgctattgctactacctccaccaccagtaccattgacatgggccctgcatcctcaagagctgtccgggagcctagggttgttgttcagaccacaagtgaggtagacattcttgatgacggttatcggtggcgtaagtatggacagaaggttgttaagggcaatccaaatccaaggagctactacaagtgtacacaccctggctgttcagtgcgcaagcatgtggaaagagcatcacatgatctgaaatcagtcatcacaacatatgagggaaagcacaaccatgaagttccagcagccagaagtagtgggcaaggcagttctggttctggcagcggtccatctgcaccacaagctggtggttctcaccgtaggcaagaacctgcacaagccagcttcgctcactttggtacatctcctttcagctccttcggtctcgcaccgagcggacagttgggaccaacaactggtaatttccgcttcggcatggttccgccaggcgcgacgatcccaatgccctctctaggatcacttgcccctacaaaaatgattggaaatccatcagctatgcaggggtacccagggcttatgatgccaggagagccaaaggtagagcctttctcgcgaccacacttcccaacgtcaattgcacctccgccagcttaccaacagatactgagcaggcctccttttggtcatcagatgtaaataataggaaggggatagatttgcttcggcttgtatacatgatagctacgctgcaacatggctttgttctagttttgttgatggatcgtccgatttttacttctttttaaattttcagctcacggctcacgcatttctttgaagcaaagatggctgaggatgataccctgtcgtgatgtgtaatcagggaaaggatacttttcgtccttttgatactatcgaaatttgaaaatgatcaatccgattttttagttgtggatacaaat

SEQ ID NO: 211800 - DNA, 1357 bp, Zea Mays
tgcgcgtctgcagctttcattattaggtacacgtcaatgcttgaagagttgaagaagaatccggagagccatggaggaccaccagattgcatacttctttgtaggcttcgtgagctagtactcagagagctgggatttagggatatcttcaagaaggtcaaggatgaggagaatgccaaggctatgtcactttttgagggagttattaagcggaatgacgaaattgaggatgacggcaaaagaattgagaacttggtccgtggaattttagctggaaacatttttgatctaggatctgcacagcttgcagaagtttttgctaaagatggcatgtcatttttggcaagttgccagaatcttgtatctcgaccatgggttattgatgaccttgatgcttttaagagtaaatggaccaagaaatcatgggaaaaggcagttatttttgttgataactctggtgctgatattatcttgggtatattaccatttgcgagggagttgctccgacgtggcacaaaggtgatacttgctgctaatgatatgccttcgatcaacgatgtcacgtatccagagcttgttgagattataaacaagctcaaggatgcagatggaaagctatcaaatgtggacgcatctggcctccttgttgccaactctggcaacgatctgcctgtaattgatttgtctagtgtatcaccagagcttgcctttatggcaaatgatgctgacctggtggtgctcgaaggcatgggaagagcaattgaaactaacctatatgcgcagatgaaatgtgactcgatcaagattggaatggttaagcatcctgaggtcgcccaatttttaggaggaagactttatgattgcgtcttcaagttcaatgaggcctgaactacgagatacatttgataacacaataccggccgcactagtggtggcttagttctccccaagatcagcttgttaggtgttgcactgaacataattttgttagtatcagcaataatttcaatcaaaataagctacgtatatgtggtggtttatggaagtgtcaggaagggtggttatgaggctgttggattttgtacgaaatctgatgcaccagttcccatttaacgcatcggtagccaagccacgcccgtctgaacttgagctcatgtccgtttgtgcttatggtccgtaataattggttagctaccactggcttgtaaacatcacacttagacgctctggtggcccctttgtgatggtattcataaaagtgtttgtcccgaaactaaaggggtgcgggtgattatggggtgggaaatgtctatggcaatcgaaggaagaaaactctccaaactagaggaaaaaataa

SEQ ID NO: 211801 - DNA, 954 bp, Zea Mays
ggcttaccgtacatgacagtcagtctcaagcagttatttttgttgataactctggtgctgatattatcttgggtatattaccatttgcgagggagttgctccgacgtggcacaaaggtgatacttgctgctaatgatatgccttcgatcaacgatgtcacgtatccagagcttgttgagattataaacaagctcaaggatgcagatggaaagctatcaaatgtggacgcatctggcctccttgttgccaactctggcaacgatctgcctgtaattgatttgtctagtgtatcaccagagcttgcctttatggcaaatgatgctgacctggtggtgctcgaaggcatgggaagagcaattgaaactaacctatatgcgcagatgaaatgtgactcgatcaagattggaatggttaagcatcctgaggtcgcccaatttttaggaggaagactttatgattgcgtcttcaagttcaatgaggcctgaactacgagatacatttgataacacaataccggccgcactagtggtggcttagttctccccaagatcagcttgttaggtgttgcactgaacataattttgttagtatcagcaataatttcaatcaaaataagctacgtatatgtggtggtttatggaagtgtcaggaagggtggttatgaggctgttggattttgtacgaaatctgatgcaccagttcccatttaacgcatcggtagccaagccacgcccgtctgaacttgagctcatgtccgtttgtgcttatggtccgtaataattggttagctaccactggcttgtaaacatcacacttagacgctctggtggcccctttgtgatggtattcataaaagtgtttgtcccgaaactaaaggggtgcgggtgattatggggtgggaaatgtctatggcaatcgaaggaagaaaactctccaaactagaggaaaaaataa

SEQ ID NO: 211802 - DNA, 865 bp, Zea Mays
tttcatgctgttgtaagcttataaactgtgatacttgctgctaatgatatgccttcgatcaacgatgtcacgtatccagagcttgttgagattataaacaagctcaaggatgcagatggaaagctatcaaatgtggacgcatctggcctccttgttgccaactctggcaacgatctgcctgtaattgatttgtctagtgtatcaccagagcttgcctttatggcaaatgatgctgacctggtggtgctcgaaggcatgggaagagcaattgaaactaacctatatgcgcagatgaaatgtgactcgatcaagattggaatggttaagcatcctgaggtcgcccaatttttaggaggaagactttatgattgcgtcttcaagttcaatgaggcctgaactacgagatacatttgataacacaataccggccgcactagtggtggcttagttctccccaagatcagcttgttaggtgttgcactgaacataattttgttagtatcagcaataatttcaatcaaaataagctacgtatatgtggtggtttatggaagtgtcaggaagggtggttatgaggctgttggattttgtacgaaatctgatgcaccagttcccatttaacgcatcggtagccaagccacgcccgtctgaacttgagctcatgtccgtttgtgcttatggtccgtaataattggttagctaccactggcttgtaaacatcacacttagacgctctggtggcccctttgtgatggtattcataaaagtgtttgtcccgaaactaaaggggtgcgggtgattatggggtgggaaatgtctatggcaatcgaaggaagaaaactctccaaactagaggaaaaaataa

SEQ ID NO: 211803 - DNA, 1181 bp, Zea Mays
tcgcgctctgtttatccgcgccaaaaaattcccccccccctaaagtgttggaaccaccctcccatgtttctcgatcacacctcctagaaatctcctccggttcttccacctccctgtagttctcgctctcctgccaccattctcttcgtgctcctgctccatatgccctcctttcagtctgctgcttgatgatccatcgcccagctgctggttgatccgtcgcccagctggtaacagatttcttcgtgggtgcagtagtaccataactgacccaccctctaatctttactccgacctacaagggaaagaagtaatgccaatgaaacacagaagactacaaagtctgaacttagaagctgagacacaggaaaacgtggaacaacatgaagatgtccaagatccacaaccagagctcaccattgggtttcctgagggagaagcgccaacaaggaataagtcattcaaaataatatggcaaaatggagttgttcgggaggtttttagaaatttccgaacagctgaattgtgggatctgaaaggaggaagagtactagttgaaactgacaagaatggcattcccaatcagtggtctgaatccattctctcgtcataccttggtgagcttgcacagaattcatcatttgcaccattacacattccgagatgggacaacaaattattcaaaggtccaaaggaacgcatcatcaaagatgttgagaaaaaatttatctatagtagtgagacaaaatggtctactcgagattggattcttaagacagtgaataaaaggtggagagactacaagtcagacttgaagaaacaatacttcaatccagataagaggtcttttgaccagattgaaaaggatgtccctgatggtgtgaatgaaaatcaatggagttttctgttaggcatatggtgcagtgaagcacatcagaaattatgccggacaaatgcggaatctggaaagaagcagaggcatccacacactagcggtaggaaaagccatgctagacttaagaaggagatgattgtgttcttttgcacaggaagacaagaagaaaggaagcatcactaaaattgatctttgggacgagtctcataagaagaggaatgggaactatgtcaatcaaaatgtgcaaacacttatgggtaaggccttcgatgaattagagaacagg

SEQ ID NO: 211804 - DNA, 4430 bp, Zea Mays
ttccccttttgccttgcctcgctcctcctccctcacctctcccccccgtctgcttccagtccccagaaatcaaaacctccaccaccacagagctccgagaccctcaccctcctccccgtctgctcgctgcgtggatctaccggcaggatgctctctccatcgcgcgcgccgcccggggagcgcctgtgaagaaggaacggaaggtgcctgatgagatagtggacggacaaggaagtgaagtttcttgttctatccacctgttgaacttaccaacttggtatgctggagtgcaagaataagagcaggcccaatcgcttcacagctattgggttctcggtgccgactgtagcagccgcagatctggagggagcagcgaaggcgttcatcagatgttatccagtgagcacccttcaggcccctcatgttcctccaagtctggtggcccgggtgtgagcgctgatccggcgacgtccgcggcggagcagccagcgtgccaggatcccagagatctgatccaatcgtatcccaagttctccataagagattatgtttttgcttcaaggagcaaaggcatcaagagaagctggcctttccatccacactcgttgcagctttgcctggagcatggtgtgaaggatccattgcctccatttgagcctcccgatttgatccggtctcagccattaaatatttccacagacattaagcaatctgctgcgtgctcagaacccatcattagtgttggtctggtgaagaccaaagatgccggttcgtcaaacgagtatacaggcgatatcaacttccagtcatgccagccagtagatgagtcacctggaccttcgccatacacatcaccggaggatgggaaatccggtatcgaccaagtgggaagtacaaatgaatcagatcatactgacgaggctataccaatagatctgcaagataatagctgtacaagagcaagtcggcgaactgaggttgctgtgcccttgcggcggttgagaaatcttgactcatcgtgcgagccatctgaaaagaagtgcaaatttgttgtcaagttaggtgcctcggcagatattcggcggccagaggatatagcatctaactctagctcagtttcagatccgatggcttcaaagacttgtcctgtgtgcaaagtatttgcttccacttcgaacaccacattgaatgcccacatagatcagtgcctttctgttgagtctaatactgagcttgttgaaactgtccttgtaaagcctaaagtgaagccaaggaagaagcgattaatggtggacatatacaagactgctcttccatacacccttgaggatcttgatcggaggaattgcactaattgggcagttgagttggctatgtctccagtgagcaaagaggtttgcactgagaacggaagcccagaagtggtatcatttgacagaagagatgatgaaagagaaggagatgtttatgttgattctaatggcataaaaattagaattttgtccaagtgtaatgatgtacctttggtgttgaaagatgaccttggttctagcaaagttgcgaagcatggaactggaaaaggtatactgatgagcaaaaagatgctgaagtcaaagcttttgaagaataagaagctgaagatgcatggaaagaagtacaacaaaacaagccatttgaactcccagacccgcatgacgatattaatgaggaaacctccgaggaggagaggaatgcatggaatccttctgaaagcaccagcaattgtggttccaggactatgcagcagtgggtatgctccaaacgatcagatatcaacaagaaattaagcaaaaaccatagtggtaaaacatttgacaaagtggcacctggagcacagaaatcggataggagcagcatgtttggctttaatgattctcaagttccagaaagtcctgttggggtgttttcttctgagtcattatacatggccacaacttcagaagccactggtgttgagcagagtaatggtccttcaaaagtgcttagatcgattcctacatggtcttcaaaaactcatcttcagagcagtgtcataccaaaagtacctagatcagctgctgctcttgcaaagagaaaaattaaggagattgggaggagagaagctaccaaactagataattatgatgtagtgaggaatcccacttcagtgaaaagatttgaagctaggactctttccttctccactgcagggccaagcaatggaccaaacaggtcagcatctacatcaaagaagatccggaagcaccgatctccgttgaggactggcaagcgtgcattttcaccttctagtactagattagttcatggctttggtgacgagcatgaacctgagaccagacatgtaaataagaaattcaggattactagtaatgaggctcccaagaagtttttgaagcatactgaagaggatactgcagataatgacttctcttttgcaagtgacatgccagtatcgggacaacagaatgatcaatatgatgttgcacaggaaacagagggtacacaaatggattgtgaaggtgaagatgctgaaactgatgtgccatatgattcagtatccagaagtgatcctgctgagtgttgcaaccaaataagtgatgtttctctgagtcctgaaaactacagaacagcagacgatgatgttttggttgaaggctgtagtgtagctgtggaggatccaaactccagtgagcaattagcacatggccatgaatccaacagtgctgccaataatgaaatggatgaatggcagatggatcctacttcaacaaaggaatctagtccctgcttaactagtaacagggacatgggccctggaggtcatcaagataactcatcaataacatcaaatggagaagaagactttaatgaagagcatggtctgccactcggaaggggctcactagattctcccatttcgactgcctcaactatggcccttccagctgctttgaaggattcaaggactaatgaggaagaacctggcccatctactggtaggactgttgaagagcaaaccaccgggtgcttgaatcaagaaaccaattcaatacctatggccagagaaggtgaactgcccagtgagaagccttttcgttgttcttgccaggaaaacattgccagagagtctcgtcaaagtcctgttgccagaccaatgctgaattctactgggaagcaggttccgcaattgcacattggttcgagggcatcatcatctttcagcacgtaccaaagaaccagcgcaaagcccaacccttgctttgatccacatgatcatcttttagcggctaaggtcccagcagaatctgctatcagcttcccttactccacagactgtataagcccctcattccaaactcagcttccttcaccatcaaatcctgtcttgaggctgatgggtaaggatttgatggtgatgaacagtgaagagagtgtgcatcctcaagcaccaagttcagactacatcttgagagggaattatccagcacctgttggtttcatgcctccaaactaccaacatctcagtaattctgcatttatcaacatgccgccgaccacagccagccaccagatccctctaccaagtgttcaagctagcggcttcgttgctcctccattgcgtggtggttctgtgatgcaatctgaccatcactcccagcagaagccctacagaaacatcatgcctgccatgcatcgcccaacctacatgatgaaagaagtgatcgtgatcaacgactctcctgagcgcagaagtgagccacaaggtagcatgctgttcccccctgctccgcctccaccacttccggtagtaccaaacaacatgccaccccgtccgttctactgctttccaccgcagagcccagttttgccaagggagaggggggctgttgggtccatgctcgtgtacgcaaacgttggctcaatggtcggcgtcaattcgtcgagtcaaggaagccaaacggaagtcgccagtccttacatgccaaacccgttcttcgtgcagtctcgagccggttacatgaacccgccagtgtactactcgcagaatctggggtgatggtttctcagtaactcgaatgaccaggagaactccatttggcttgccggtcgtcatcgctctgtaaaagtgggggtacatgggagtttcgtgatgggtctaaaatgctgagactagtcagcctgcaagatgtctgagtttcatgaggattttcacataggttgctttagattttcttttcttttttttggttccgacttaaaggtacaacatgtttgccgtcaaaagtgttttaattacttccctgcaaagtcgcagtaaattatagtatgcaattcccaacagttctgcaaaggaatatatctcagtatttatcgaaaaggcagctagaatc

SEQ ID NO: 211805 - DNA, 1278 bp, Zea Mays
cttcgactctcccactcctctgtcgcttccgccgacacctgagtcttgtcgctgccgccgggatggccggagtcaccgccaccgggatggccggagttcccgccaccttctcctcagccaccgctcagatcgggggcttcctctcgaagaagccttacgcgccgccgttgtgggccacgcacctctcccccatgccttgccataccttctcgctcggccatttcccaacaccgattcacaagtggaatctgcccaatttgccggaaggaacggaagtgtggatcaagcgagacgatttatcaggcatgcagttgagtggaaacaaggtccggaagctggagttcttgatggcagatgccgtagcacaaggcgcagactgcgttattactgttgggggtatacagagtaaccactgccgtgccacagccgtggctgctaagtatctcaatcttgattgctacctgatactacgtacctccaaggaccctggtttggttggcaatcttcttgtcgagagactagttggggcacacgttgatcttgtgtcaaaagaagaatatggaaaaattggtagtgtggctttagctgacctgctgaaaaaaaggcttctggaagaagggaggaagccgtatgtgattcctgttggtggatcaaactcattgggaacttggggatatattgaggcaataagggagattgagcagcaaattcagcaatcttctgatgttcagtttgatgatattgttgttgcatgtggcagtggtggaaccattgctggccttgctttaggatccagattgagcagcttaaatacaaaagttcatgcattctctgtttgtgatgaccctgaatacttctatgactatgtccaaggcctgattgatggacttaattctggtttcgattcacatgatatagttagcatggaaaatgctaaggggttaggctatgccatgaacacagctgaggagcttaagtttgtcaaagacatagctgcatcaacaggcattgtccttgatccagtctacagtgggaaggcggtttatggtttgctaaaagacatggctggcaatccagccaaatggaaagaatggatcttgaagattctgttccacgcaaagatggcactggttcatctccatgaactccgagagaggaatcaaagctgcagattacaggagaaaaaaaaggaggaacagaatcaacggcgctgtcatccgacaatctttgcgatggagacgagagaagaagtggaaagacgacgacagatggttgtac

SEQ ID NO: 211806 - DNA, 1384 bp, Zea Mays
cttcgactctcccactcctctgtcgcttccgccgacacctgagtcttgtcgctgccgccgggatggccggagtcaccgccaccgggatggccggagttcccgccaccttctcctcagccaccgctcagatcgggggcttcctctcgaagaagccttacgcgccgccgttgtgggccacgcacctctcccccatgccttgccataccttctcgctcggccatttcccaacaccgattcacaagtggaatctgcccaatttgccggaaggaacggaagtgtggatcaagcgagacgatttatcaggcatgcagttgagtggaaacaaggtccggaagctggagttcttgatggcagatgccgtagcacaaggcgcagactgcgttattactgttgggggtatacagagtaaccactgccgtgccacagccgtggctgctaagtatctcaatcttgattgctacctgatactacgtacctccaagcttcttgtggataaggaccctggtttggttggcaatcttcttgtcgagagactagttggggcacacgttgatcttgtgtcaaaagaagaatatggaaaaattggtagtgtggctttagctgacctgctgaaaaaaaggcttctggaagaagggaggaagccgtatgtgattcctgttggtggatcaaactcattgggaacttggggatatattgaggcaataagggagattgagcagcaaattcagcaatcttctgatgttcagtttgatgatattgttgttgcatgtggcagtggtggaaccattgctggccttgctttaggatccagattgagcagcttaaatacaaaagttcatgcattctctgtttgtgatgaccctgaatacttctatgactatgtccaaggcctgattgatggacttaattctggtttcgattcacatgatatagttagcatggaaaatgctaaggggttaggctatgccatgaacacagctgaggagcttaagtttgtcaaagacatagctgcatcaacaggcattgtccttgatccagtctacagtgggaaggcggtttatggtttgctaaaagacatggctggcaatccagccaaatggaaaggtcgaaaagttctgtttatccacacaggtggtcttcttgggttgtatgataaggctgaccagttgtcatctttggctgggagctggcgcagaatggatcttgaagattctgttccacgcaaagatggcactggttcatctccatgaactccgagagaggaatcaaagctgcagattacaggagaaaaaaaaggaggaacagaatcaacggcgctgtcatccgacaatctttgcgatggagacgagagaagaagtggaaagacgacgacagatggttgtac

SEQ ID NO: 211807 - DNA, 3626 bp, Zea Mays
atgccatccaagtcaccatgtggcccaccaccaaaccactgtccacgagtgtgctcatctcgtggcctcagcttcatttataaaaatcacaagcatttttaaaaaagaaatacagaaaaagaacgaacgatgccatccaagtcaccatgtggcccaccaccaaaccactgtccacgagaccacgagtgtcctcacactgccaccagtaccgccaccaaccttgtccttgtgcgttccttgtagccatctccgactccgcgcctccgctgcctcccgaaagcattgccagttcctccgcacaacatgacgcgcatccaccgcctccgccccctcttcctcttcgttctcttggcgtcgctgcaatgcggtgcggcgacggcggcggctggatacggaggtggcgccgaggggttctgctcggcggagccgtccagcaagtgctccggggatcagccgctctactggaaggtcacccatcccaccctcgcgcccgcgcacctccaagatttacctggcttcacacgtagtgttttcaaaagggatcatgctttaataacaccagagagtcatgtattcagtcctttgcctgattggatcaatacagtaggagcatatttgatcagtccagctattggtgcacacttcattatgtatctagcaaacatgcaaggctggaaggctcctttaatgaaccaagctggaagattaacacttgtcagatctgtcctcactgccatccctatttatcaccttattgcgattccctgccctaaatgggtggtcaaggctatcgacaaaatcagaaggggctttttgtggaagggcagaaaagatgttagaggtggtcattgccttgtggggtggaataaggtctgtaaacccctaagtatggggggtttgggaattcacaatcttgaaattcttggttgggctttgaatctgaggtggctgtggctcaagaaaactcaaccagacaggccttgggctgagtttgatgtgcaagtccatcctaatgttactgccatgttctcagcctcagtttgctccatagtaggggatgggggtggtacactgttttggactgaccgctggttgcatggccaatgtatctcagaaattgccccttccctgttaaatagagttccaattcgagtgagaaaaaggaaaacagttcagcaagctctcagggacaacagttgggttggtgacatctctggcagcttaccggcagaagtgattgttgatttcttaataatttgggatttaactcaggatattcatttgcaacctggagtacctgatgctttccgttggcttccaggtgcttcaggggagtactctgctaaaacagcctaccaacgttttttggctggttctatggaatttgagccaggtaaaaggatatggaagagttgggcgccccctaagtgcaaattcttcatttggcttgcttcccttaatagatgctggacagcggaccgtctagctcgtagaggtcttgaccacccggtgaaatgcgttctatgtgatcagcaggaggagacaatccagcacattttggtctcttgtgtcttctccaggaatttatggtggcagatcttatgcaaagtggggctgcagcttgtggcaccagggctggagacatcaattttccaggattggtggagtatggctgaagatcttgtgccatctttgcacaggaaagggttcaacacattggttattctcgtggcttggtggatctggaagcacagaaatgcttgtgtttttgatggtgtctccccaaattcgaatgcagttctgcaacagatccaggaggatgccaggctttgggagatggcaggtgctaaggctctgagaaggctgtggccttaatttaggggcttggttcacttgtttttttgttctttctttttcttcctttttctcctttattttcttttgtatagctgttgttcttggtcttctttagaccttctctctacttaatataatgatgcgcagttctcctgcgtattcgagaaaaaaaaaaaataatttcaaacaaagggagtaccaaggaagagtatccaacaatgtcctcagttgatgtacaattctataagtaactgtttttttttgctcctggtttgccttttctttttggcataggatgtcgtaacttacaacatcatgtaattagtcctacatatgttttagatgccgaagtccatgacctaaggggttgtttgagtcgcctagactcttattcttgttcttaatataatgatatgtagctctcctgcatgtttgagaaaagagatgtggaaatccaaggctgatgcaaactatcagttttttaagagatacctatgagattgtaaatattcaaattcatagctttcttaaatttgtgttctcgtgctttaattttttttacaatattgattatttctagaacttgaagggcaggcttggtgcaatggtgagagctgtatcactaagtcactagcttgcgggttcgaagaagcctctccgcatttgcggggagggggggtggcagtacttgccttggtatatcccatctccagacaccactcatgtgggagcatctggcactgggtttgcccccctttgattatttctggaacttattcctttccttgttacccactctgcataagttctgctgattctgcactgatgtggcttagtaaataagtgcaggtggattcttatggatatcttcctgcaaacacaaagcattctatgatctcagatgaaccaaccactcttgtaatatttgagaggaggtacaatgccattgaggattcccatcctgatctaattgtgggttcaacagataagcaaccccttctcgaaaccccgggagaggtatttcaactaaggaagctgctaccgacttctctgtcctatgactttaatatccatataatggactttcaaccaggcgaatatctcaatgtaaaggaggttcattataatcaacatggacttcttcttttagaggggcaaggaatataccgactgggagagagttggtatcccgtgcaagctggggataccatttggatggcaccgtttgttcctcagtggtatgctgcccttggtaagaccaggacgagatacttgctgtacaaagatgtcaataggaatccattgatatgatcaagaaaccagaacaaggagggaataaatcaaatgtcgagctgtgccaggtataaagaatttcaatgggagatgatcacaggaatgagaaaaggagatcttattgtatgctgaaaaatcttgaaaccaaaaataacgtgggaagttgaatgtgtacttgtgatgtccataactgtcaatctttggtgactagtgcgactggaattgtgatgtaacgtattctggacagcagatgccaagttggatatgctgtgacatttgtgaatggctaatcccatgaatttaggtgatgtttggtttagaaatgataatgcatatgtaaacggtatgagatccaggggcaatgattacaggacaaacagttttccattttgttcggttccaccgtagatagtgttcaggtacgtgtaccgctcaccgttcgggcttgttcggttagagttagattgaaggaggtt

SEQ ID NO: 211808 - DNA, 2887 bp, Zea Mays
aatttatactcaaatggttgtaatatgtggagaaaacaactacaaactagacacaaggcatgtcatagacggagtggtagtggagggtacgcgcgagggtgaggtctacggttcgattactaacaaccgtgtagcgacttcgacggagacgggcgggtggggtggtcctaatacaaataattttttttactatttttaaaatctgttttatgtttcctggaaacgatttgcactggcggtcttcagttacccgcctgtaaaaatgatgatttttactggcccctagcactggcggttacgataaacgccactaaaaataggtttacgaccgccagtatagaacttctgtgtactagtgtaggttggtttttcaggcactgatgagaatatatagcaattctaaatttctaataggatcatctttgatcgatcgttggttgtaaccatcctccttgcagaatcattatgcaagggtaaggctatctaaaaaatcccttccccaagccccaccttaggctttgttcggcatcttaggatttttttcctaaactaggtttttcccccacatggattgggtgaatccaaacctttcacccaaccctttatgggattaaattcctaaacccaaccaaccaatgtttgttcttttattccaaacccaatccatgccctcctcccaccaccaacagcagctgctgcgctttggtggcagtgttgataagtactacactactacagctaccaggaggatgaaatggaacagtccagagctctcatggtcatgggagccactgcgtctccgctaccggcagctcctccggagcttcgacgacggacacaccaggtgcatactcatcgccggcgacgtggacgacgacgatgcaacccaacaccgcacacgggacaagacaagccccgcgactacctgctgcagaggaggcggcgacgcaccgctgatcagggtgcggaagtggccgtggggctagttcgtgtcggagatcagggactccacacgcaatggacaatgcgtgtggatcagcaccttcgacactcccgaggccgcaccttcgacactcccgaggccaccgtgctgactacgaccaggaccaggccgcctactccatgcgcagctcggccgcagtgttcaacttccccgtggagcacattcaagagtcgctgcgggcgctggggctcagcgtcgacgcagggggctcgccggtgctggcgctgaagcggcgccactgcatccataggcgcttgcccaagaacaagatggaggccaacaaggaggaacaaacgaaggcccaacctgcccgggctgggcacaacaaaacggagccttatgtggaaactttcagcactgagtacgcccttcttgatcaatcgtaagtttgttgaatgcacaagatgacaaaaatctagataatggaactcatttagtgaatgtgcagacctttatttactaaacacaatttgtggtttttaaaacaaggaattgatgaggagtacacaaatgtcttagtggttgttagagtgactctggttttttttctcagcttttctaaacaactccactatccatgtgttttatgccatgatatagcaagacacctgcttttgaaaagagtttcaaaagctacactatccaagtgcagtcctaaacttgttaaagatagaaaatatgaaacacttgctaggctgctttttatgaagtagccctaccagtaccaattgattcataatgcgattcacaccaaaaaaaagaacaagaaaagtgatgcacttttactacatattcaagggatgatgatagaaatataggatggtcataggtagaatcagcaagaaccactttccaagttttgatattcaacattattaaagtttgcaaatttaggttgtccttagtttggggatgaggtggaatgggatggtttcatcctagtttcttgaaatgcaatggtcccatcttgatgtttggttgaaaggatagaatggtccctgttttttgtttggtagggggatatgaatagataggatgaaccaggttctttcgaggattttctcaaacactttgcaagagccacctgtctccaggcatatgctgctcatctggcacctctccgtctctgagcatctgtgtcccatgctcttgataatgccaccatcattccaacttatcccacgtgatttgtgtttgccaccgctcgtgaaagcaagcaccagcgcgtgcaggcaaggaagcttgcacctggctgcctgcaagcaaagctaagcaagcagctgctggacttcttcacaagtactgtgttcactgggtgcgcttgccatcctcatctcatctgtgtgagctctccctcgccagcagcccaagctttcacacgcctgcccaaggatgcaggcacacagactcttcttcaacaaccatgcaacagctcctcttgagcttgagctccgcaagacctgcagcgccgccagagcgacttccactcaatccccatgcatccagcgctgctcctccttgttgagcttgccctcatttgcaccccacaccgatctccagcggtgccaagctcatccgggccttctccttttctccctgcgtgtcttgcagccaccactgctctccttcatgtgcactcacgcactcaggcaaaagattgctcatcccacctctttccaccaaattttagggaaaggttctcacccggaatattagggaatattccctggtggaatagttgcattccctgctgttcctgaaccagatacaaaaacaacatggcatatcccacgaaccaaatgctaccttagtaatgtgttttagtgtgacaaaattctgatgtcaaatcttgtccatggatcaacttacagtttataagcttac

SEQ ID NO: 211809 - DNA, 803 bp, Zea Mays
cccgtcaagatagctgcgtcccgcgcatcggcggcggcgtggcggctctttcctcctctcgcgtgacgcgggcgcgcggccggccggcgagcgccgacctcgcggggaagagcgcctacgaggtcctcagggttggggagactagttccagcgtcgagatcaaggcctccttccatctcctagccaaagatacccacccagacgtcgccgcgactgcttgttcttgacggttccttcagatcatcaccgcattctaccagattcacagtgaagagctacgatggcgacctgctgcgatcgcagaggcgtgttgtgcagaaacaccccagttcatctcagttggtatacccaagtgattcaggctcaggcattgtggcttaccattgacgacatagctaccaagagggttgccactggctctggttattttgataggctcaaaagcgaactgttcacagcaatccatgctccatactatggaactgatgtcgactccatggatgtccttcctgattgctttgaagctgaggagagatcttctgaatttactccaaatgtttctataaatgtgaataaggattcaatatctatgaatcctgttgatatgaacatgcaagagatgcggtatgaaaatgatattcctgcaaaagatgcaaaatgccttcaaggacatttagttgcggatatttgggaaattagttgttactgtgactaggagccccaaatgtgattgcattaacaattcggatgcaaaagatcacattcacttgtttcttgttccaaacacatatctattttatttg

SEQ ID NO: 211810 - DNA, 817 bp, Zea Mays
ctctttcctcctctcgcgtgacgcgggcgcgcggccggccggcgagcgccgacctcgcggggaagagcgcctacgaggtcctcagggttggggagactagttccagcgtcgagatcaaggcctccttccatctcctagccaaagatacccacccagacgtcgccgcgactgcttgttcttgacggttccttcagatcatcaccgcgcttttgtacgacagattctaccagattcacagtgaagagctacgatggcgacctgctgcgatcgcagaggcgtgttgtgcagaaacaccccagttcatctcagttggtatacccaagtgattcaggctcaggcattgtggtacctcgagagagcaatatcgttgaatggttgaaatggtacaggcttaccattgacgacatagctaccaagagggttgccactggctctggttattttgataggctcaaaagcgaactgttcacagcaatccatgctccatactatggaactgatgtcgactccatggatgtccttcctgattgctttgaagctgaggagagatcttctgaatttactccaaatgtttctataaatgtgaataaggattcaatatctatgaatcctgttgatatgaacatgcaagagatgcggtatgaaaatgatattcctgcaaaagatgcaaaatgccttcaaggacatttagttgcggatatttgggaaattagttgttactgtgactaggagccccaaatgtgattgcattaacaattcggatgcaaaagatcacattcacttgtttcttgttccaaacacatatctattttatttg

SEQ ID NO: 211811 - DNA, 1368 bp, Zea Mays
ctaattctcagttcaggccatcagctgccgtagtgttatgctgacgtctattcctcctttgctctgtagagcagttgcacctgaaaacgacattgcatttgatagtgtcagttgttcagttattattaatgtgagcatgccaatgccattcataactgggagctgtttgcactttcatctgtctctggaactgtgtcattgttaatcaaccttaagttttagagaataagcttcaggctaaccaaaagaattccccctatcactctgtttttttgttgggtgcaggaaattacatgtttaaccttatatctgatttttaacgtgatacttagctgactgtctagtctaaggcagcaaggtattaagttcctccctgataggctttaatcgtgaactctattggaagtatggaattgttaccatgacttcaaacaccatcccatttctatattttagagttttgctttgagatccttctttgactcaccagcatcatttcttcgaaaactggccattttaaatagttttaggaaaaatatgttgtaccacatgtgtgcgtaaaggttcacctcaagttaaattgaagactcctttatctgccaacaaccaaggtagccaggaatttggggaagactttgcgtgctttccaaccaaccattagagagatacaggatgtatcaagggagttcaggagcactcttgaacgagaaatcggaattgatgaggtttcccagtcgacgaattatacacccacgaccatgaataacaaccaacaacctgctgccgactcaaatatcaagcctgcacctgcaccttacaccagcgatgaacttgtgaaagtaactgaagaacaaattgctgcatcagctgctgcagcttggaacccgcaacaacctgcatcgtcgcaacagcaagtgtacactactccgagtgaggacgctcctacatcaggaggaagcgatggtcctgctgctccagctcttgctgcgagtgactcggatccaaagcaagtgaatctggacaaggcggaaacacagagatgactccgcttaacagcttgacactggatgggatgagcacactgaacacgtcaggacgagcagtcttattttaattttgtaggcgatggacttcagattaaagccagttatttggactgctgcagctataatctatagagacataacactgtaaaaatagtagaatccgttttagattaaagccaaacgagatgagagcgttttctgtgtttactaggcttgttctgtagcagcatgcatgggcaggttcatacaaaaaggctatgtgtatgcgtaacataaccacgagtttatatggattaaatatatttagccacgttgaaaaacc

SEQ ID NO: 211812 - DNA, 1378 bp, Zea Mays
ccttagtctaattctcagttcaggccatcagctgccgtagtgttatgctgacgtctattcctcctttgctctgtagagcagttgcacctgaaaacgacattgcatttgatagtgtcagttgttcagttattattaatgtgagcatgccaatgccattcataactgggagctgtttgcactttcatctgtctctggaactgtgtcattgttaatcaaccttaagttttagagaataagcttcaggctaaccaaaagaattccccctatcactctgtttttttgttgggtgcaggaaattacatgtttaaccttatatctgatttttaacgtgatacttagctgactgtctagtctaaggcagcaaggtattaagttcctccctgataggctttaatcgtgaactctattggaagtatggaattgttaccatgacttcaaacaccatcccatttctatattttagagttttgctttgagatccttctttgactcaccagcatcatttcttcgaaaactggccattttaaatagttttaggaaaaatatgttgtaccacatgtgtgcgtaaaggttcacctcaagttaaattgaagactcctttatctgccaacaaccaaggtagccaggaatttggggaagactttgcgtgctttccaaccaaccattagagagatacaggatgtatcaagggagttcaggagcactcttgaacgagaaatcggaattgatgaggtttcccagtcgacgaattatacacccacgaccatgaataacaaccaacaacctgctgccgactcaaatatcaagcctgcacctgcaccttacaccagcgatgaacttgtgaaagtaactgaagaacaaattgctgcatcagctgctgcagcttggaacccgcaacaacctgcatcgtcgcaacagcaagaagtgtacactactccgagtgaggacgctcctacatcaggaggaagcgatggtcctgctgctccagctcttgctgcgagtgactcggatccaaagcaagtgaatctggacaaggcggaaacacagagatgactccgcttaacagcttgacactggatgggatgagcacactgaacacgtcaggacgagcagtcttattttaattttgtaggcgatggacttcagattaaagccagttatttggactgctgcagctataatctatagagacataacactgtaaaaatagtagaatccgttttagattaaagccaaacgagatgagagcgttttctgtgtttactaggcttgttctgtagcagcatgcatgggcaggttcatacaaaaaggctatgtgtatgcgtaacataaccacgagtttatatggattaaatatatttagccacgttgaaaaacc

SEQ ID NO: 211813 - DNA, 1583 bp, Zea Mays
ccttagtctaattctcagttcaggccatcagctgccgtagtgttatgctgacgtctattcctcctttgctctgtagagcagttgcacctgaaaacgacattgcatttgatagtgtcagttgttcagttattattaatgtgagcatgccaatgccattcataactgggagctgtttgcactttcatctgtctctggaactgtgtcattgttaatcaaccttaagttttagagaataagcttcaggctaaccaaaagaattccccctatcactctgtttttttgttgggtgcaggaaattacatgtttaaccttatatctgatttttaacgtgatacttagctgactgtctagtctaaggcagcaaggtattaagttcctccctgataggctttaatcgtgaactctattggaagtatggaattgttaccatgacttcaaacaccatcccatttctatattttagagttttgctttgagatccttctttgactcaccagcatcatttcttcgaaaactggccattttaaatagttttaggaaaaatatgttgtaccacatgtgtgcgtaaaggttcacctcaagttaaattgaagactcctttatctgccaacaaccaaggtaaaaaatgattctgttctctaactattttcagatttacttttaaacgtttttcttccctatgcgtctgtgcttgacaatcatttccatgtcagcatatgttctctacaaacctatgctattgggctagcgctattaaaaaagacatgttttagatgcactgcccacatatgggtcttggcctcatttgctatattgtttccaggtagccaggaatttggggaagactttgcgtgctttccaaccaaccattagagagatacaggatgtatcaagggagttcaggagcactcttgaacgagaaatcggaattgatgaggtttcccagtcgacgaattatacacccacgaccatgaataacaaccaacaacctgctgccgactcaaatatcaagcctgcacctgcaccttacaccagcgatgaacttgtgaaagtaactgaagaacaaattgctgcatcagctgctgcagcttggaacccgcaacaacctgcatcgtcgcaacagcaagaagtgtacactactccgagtgaggacgctcctacatcaggaggaagcgatggtcctgctgctccagctcttgctgcgagtgactcggatccaaagcaagtgaatctggacaaggcggaaacacagagatgactccgcttaacagcttgacactggatgggatgagcacactgaacacgtcaggacgagcagtcttattttaattttgtaggcgatggacttcagattaaagccagttatttggactgctgcagctataatctatagagacataacactgtaaaaatagtagaatccgttttagattaaagccaaacgagatgagagcgttttctgtgtttactaggcttgttctgtagcagcatgcatgggcaggttcatacaaaaaggctatgtgtatgcgtaacataaccacgagtttatatggattaaatatatttagccacgttgaaaaacc

SEQ ID NO: 211814 - DNA, 3668 bp, Zea Mays
agagaacacaacgcacgccgctgctagtcagctttctgcatgatggtgattgctgatattttgatccttaaataaacaccttttatttgcttctctgcagagaacgaacgagggagcgagcgagatggatatggcaggccgcagcaggtgcaggtgcagcagccatggacgactcctctggctgcttctcgcgtgctcgtgggtggcagccgcgagaggccagcaaacagcacggactgatccagccgaagcggcggcactgagcacgatcctggggcgatgggggctgaaggcgtcgccggggtggaacatcagcggcgagctctgcagcggcgtcgccgtcgacgacaccgacgtcgacaacagccccaccatcaacccgagcatcaagtgcgactgctcctacgacgacaacaccgtttgtcacatcaccaaactgagagtgtatggcttgaatgttgtcggccagataccagccgagctggagaacctcacctatctcagtaacctgaacctgatgcagaattatttgacaggtcccgtgccttcattcatcgggaaatttcccatgcagtatttatctctggctatcaatccgctatctggaacacttccaaaggaacttgggaaccttactgatcttatctcactgggcattagcttgaacaactttactggtgaacttccgcctgaactgggcaacttgtccaaactggagcaaatatattttgacagctctggcttcagtggtccattcccttcaacattctcgaagcttaagaacttgaagatcctctgggcatcggacaacgacttcacaggaaaaatacctgatttcattgggaacctgactcagttggaagttctgagatttcaaggaaattcttttgaaggcccaatcccaaaaagtctgtccaatctaaccaaattgacaaccttacggatcggtgatgttgtgaatgggagctcttcattgtcctttatcagtaacttgacatctttggatgtcctgatattaagaaattgcaggatatctgatactcttgcaacagtaaatttttctaatctagctggattgaccttattggacttgagctttaacaatctcacaggccaaattccacagtccatactgaacttggacaaccttggattcttgtttctcggaaataacagcctttctggaagcctgcctgatattaaaagcccttcactaaacaatttagatttttcttacaaccagctctctggtagctttccttcttgggctacccagaataatttgcaattgaacttggtggccaacaacttcattcttggtagcagcaacaacagcattctgccttcaggcctaaactgtctccaacaagatattccttgtttccgtggctctccggaatattcctccattgccgtagactgtggaagtaacaaatcatttaggggcttagataatactttttatgaaatggatcctacaaatattggagctgcatcatattatgttactggtcaaacaagatggggtgttagcaatgttggaaaatttaatgaggccccaaatggaagttatacaatagatagttccgagcagtttcagaatgcactggattcacaactgttccaaacagcaaggatgtcaccatcatcgctacggtactatggcattggacttgagaatggaaattatactgttgagcttcagtttgcagagtttgcttatccagaatcacccacctggcaaagcactggaaggagagtttttgacatatacatccagggtggtctgaaagaaaagaatttcgacataaggaagacggctggtggaaaatcatatgttgcagtatataagaaatacaatgcaactgtgtccaaaaacttccttgagatccatctcttctgggcaggcaagggcacttgttgcattccaactcaagggtattatggacccatgatctcagcattgagtgtgacaccaaattttactcctactgtgcgaaatggtgttcccaaaaagaaaagcaaagcaggggcaattgttggaatagtaattggtgcttctgtcttaggactagccgccttagctggaatctttatgctggtacagaagagaagaagagcagcacagcagcaagaagagctttacaacatggtgggaaggccaaacatcttcagtaatgctgaactaaagttagctacagataatttcagttctcaaaatattcttggagaaggcggatatggaccagtttataagggtaagctacctgatgagagggtaatagctgtgaagcaactttcccaaacatcacatcaggggaaaagccagtttgtgacagaagtggccacaatttctgctgtgcagcaccgcaatctagtgaagctatatggttgctgcattgacagtagcacccccctgctggtctacgagtaccatgagaacggaagccttgatcgagcactctttggtgacagtggtacgatccttgactggccaactcgcttcgagatcattttaggtattgcaagaggcctaacctatcttcatgaggagtccagcgtgcgcatcgtgcatagggacatcaaggccagcaatgttctacttgacaccgacctcacgcccaagatttccgatttcgggcttgccaagctctttgatgagaagaagactcatgtcagcactaaaatcgcaggcacgtttggctacctggcgcctgagtatgcaatgagaggccatctgactgaaaaggccgacgtcttcgccttcggggtattggcaatggagactgtcgcaggtcgaccaaacactgacaattccttggaggaacacaggatctatctctttgagtgggcctgggagctgtacgagagggaccaagcacttggcatcctggacgcaaggatcgaagaatccgacggtgaagaggcagtcatcagagtcatcaatgttgcgctcctctgcacgcagggttcgcctcaccagcggccaccgatgtcgcgtgtagtgaagatgctcaccggagacatcgaggtgcctgaggtggtgaccaagccaagctacatcactgagtggcagcgcaggggtgggaacagcagctatgttaccagcggctactctggcgacacgaccggggagttcagcgtgcagagggagacgactgcgcctctcaccccgtcgccggcgatgactggagtcatcgacgacgggcggtgatttgatcgcaggctgatgcatgctgggtttggtttgatctcaagggaaaatctttgaaccatagttgataaagcgcggtgcgcggagaataagagtcagctttacatgctacttggctgggttaatgatagatatcatataacataacgtaatgtaatgtaatatgctacttagctaggttagtgatagatacgatatgatatgccatcacagccttggcgttcaccgcctctccacagtggcggatctaggttttttatacaggatgtaccgtaataaattttttatatgcaactgtatatacagttttatagtagatttgataaaaagtttgataaatagatataatgtttagcaatcaacagttaagtacgaaagttgcacacattagaatgcaaataattcaaacatattataaaatagaaaaaaattgtacaaagtaaaaagcctcata

SEQ ID NO: 211815 - DNA, 794 bp, Zea Mays
agctgcaccactaatccactatacagcaccaagtttgagggctcgatgctggttgaccttgaccttgtgctcgtcaaccgagtcccgactgcatcgatctgacggcctttctacgcgcaacgacgaagcttcgcgaatcccctccttccttcggcctcaccttcttattctccgccgaacaagtcttagacgcctaatccgtagtttacatcccgaagggcggcaagggtgatccaggccgaccatggcttacgtcgagagaggtgttgtgaaagacaagcggactatatggcgactgagcataatctcagacttctttcgggctattgtcaacttcatcagaatcttctttgacacactgttctcagtggacaaaactgacagctacaagaaagggtatggtgctggtaagaagtgggatggtggacctggtggtggtggtgggcggggcccatatggaggtggaggtggtggatttggcggcggaggtggaggtggtaggggtcctcgcactctatctgacatccaatccaatgaccacagttctctccctgcttgtggatcctgctgcggctaatgagcgcacagccgttctgcctgatgactgcttaacagatgaatacacatgcttcaatatgttctgaagaacatcatagctatcaatatgtatttcactgtcagacgattgtattatatataattagtgtgtcgtttattaacagttaatttacctgtaacttgactctggcatgattcacatggcacattcatggtttatcttttgtgaaaagaaa

SEQ ID NO: 211816 - DNA, 726 bp, Zea Mays
agctgcaccactaatccactatacagcaccaagtttgagggctcgatgctggttgaccttgaccttgtgctcgtcaaccgagtcccgactgcatcgatctgacggcctttctacgcgcaacgacgaagcttcgcgaatcccctccttccttcggcctcaccttcttattctccgccgaacaagtcttagacgcctaatccgtagtttacatcccgaagggcggcaagggtgatccaggccgaccatggcttacgtcgagagaggtgttgtgaaagacaagcggactatatggcgactgagcataatctcagacttctttcgggctattgtcaacttcatcagaatcttctttgacacactgttctcagtggacaaaactgacagctacaagaaagggtatggtgctggtaagaagtgggatggtggaggtggtaggggtcctcgcactctatctgacatccaatccaatgaccacagttctctccctgcttgtggatcctgctgcggctaatgagcgcacagccgttctgcctgatgactgcttaacagatgaatacacatgcttcaatatgttctgaagaacatcatagctatcaatatgtatttcactgtcagacgattgtattatatataattagtgtgtcgtttattaacagttaatttacctgtaacttgactctggcatgattcacatggcacattcatggtttatcttttgaaaagaaa

SEQ ID NO: 211817 - DNA, 1486 bp, Zea Mays
cttcctttcctctcctctctcacgagcttctctctcacatctcgtactgccgcatcgtcccacacgtccctccgtccatggtctcaccggcgttcccctcccccgctccccccattccccccgcattccgtccgtggtctcatgggacaagacggtgaggctttacgacgctgacgccaacgtgctcaagagggagttcatgcaccctggggccatcctcgactgctgcttccacgacgactcctcaggctttagcgccggagccgaccacaccattcggaggttggtattaagctcgtccaaggaagatgttttggggcggcatgatggtccagttcgttgtgtggaatactcttatgctgcagatacttttatttctatggatttgcttttggatttcttttctagcgtttctttttcttctgcaaggtacttctgcagcctgatgcagctataaatagaacacattgatagctatttttgtacttgaattccaaaaacactatatatagttatgcagttatgcttttgaaagtatttactcctaggccaagataaaaattatattctgcacagtttacaatgccacaatgcaaaatctttatctctcaatttgaactaagaattgtacatatgtccttgccagaatcgtgtctttggtacctggttttttcttttctttttgtccttggaatatattttgtagtattttagttgtcagcaacttaactatgcattgtcctcaatctaatcacaatctctgtccaatcgtgccatgtctttgttctatattttacacatttttttagaaataaataactattaaccgctcacctgattactaagcttatacgagaggaaacattctataactttcaagttagtcgatactggaagtaattggcttctggatatttggttacaacatttactttggttgcaagaagaggggtaactttagcccctgtttcagaatactggaaagggaccgctacttaaaaatggatgcttccatgaattccatccaacattacttttcagtatgagtgacacgttggggtcagatttgaacatgattattgcaagtcaagacatcgtcatataattattccaatatcaagtatgatgcaaaatcaagggatgggaactccatctgttcaacaatcagagagctcagggtcagaaccatacaggttgctctttcacaggactgctggaaaagagctatggaggttgaactgaagttaattcaagaaaatcagacctgggagattgctgatctgccaagggatcactaaggctataggactcaaatgggttttcaaagtaaagagggatccaacattagtgcgaacaattgtattttagtttagatttagagtacacttatgtatgagttgtttgacaatgcttatttatgagacattaaaatgtacttatttatattatattaattataatgttgttcaatatatgtttatgtata

SEQ ID NO: 211818 - DNA, 1480 bp, Zea Mays
cctttcctctcctctctcacgagcttctctctcacatctcgtactgccgcatcgtcccacacgtccctccgtccatggtctcaccggcgttcccctcccccgctccccccattccccccgcattccgtccgtggtctcatgggacaagacggtgaggctttacgacgctgacgccaacgtgctcaagagggagttcatgcaccctggggccatcctcgactgctgcttccacgacgactcctcaggctttagcgccggagccgaccacaccattcggaggttggtattaagctcgtccaaggaagatgttttggggcggcatgatggtccagttcgttgtgtggaatactcttatgctgcagatacttttatttctatggatttgcttttggatttcttttctagcgtttctttttcttctgcaaggtacttctgcagcctgatgcagctataaatagaacacattgatagctatttttgtacttgaattccaaaaacactatatatagttatgcagttatgcttttgaaagtatttactcctaggccaagataaaaattatattctgcacagtttacaatgccacaatgcaaaatctttatctctcaatttgaactaagaattgtacatatgtccttgccagaatcgtgtctttggtacctggttttttcttttctttttgtccttggaatatattttgtagtattttagttgtcagcaacttaactatgcattgtcctcaatctaatcacaatctctgtccaatcgtgccatgtctttgttctatattttacacatttttttagaaataaataactattaaccgctcacctgattactaagcttatacgagaggaaacattctataactttcaagttagtcgatactggaagtaattggcttctggatatttggttacaacatttactttggttgcaagaagaggggtaactttagcccctgtttcagaatactggaaagggaccgctacttaaaaatggatgcttccatgaattccatccaacattacttttcagtatgagtgacacgttggggtcagatttgaacatgattattgcaagtcaagacatcgtcatataattattccaatatcaagtatgatgcaaaatcaagggatgggaactccatctgttcaacaatcagagagctcagggtcagaaccatacaggctctttcacaggactgctggaaaagagctatggaggttgaactgaagttaattcaagaaaatcagacctgggagattgctgatctgccaagggatcactaaggctataggactcaaatgggttttcaaagtaaagagggatccaacattagtgcgaacaattgtattttagtttagatttagagtacacttatgtatgagttgtttgacaatgcttatttatgagacattaaaatgtacttatttatattatattaattataatgttgttcaatatatgtttatgtata

SEQ ID NO: 211819 - DNA, 1491 bp, Zea Mays
ctctcctctctcacgagcttctctctcacatctcgtactgccgcatcgtcccacacgtccctccgtccatggtctcaccggcgttcccctcccccgctccccccattccccccgcattccgtccgtggtctcatgggacaagacggtgaggctttacgacgctgacgccaacgtgctcaagagggagttcatgcaccctggggccatcctcgactgctgcttccacgacgactcctcaggctttagcgccggagccgaccacaccattcggaggttggtattaagctcgtccaaggaagatgttttggggcggcatgatggtccagttcgttgtgtggaatactcttatgctgcagatacttttatttctatggatttgcttttggatttcttttctagcgtttctttttcttctgcaaggtacttctgcagcctgatgcagctataaatagaacacattgatagctatttttgtacttgaattccaaaaacactatatatagttatgcagttatgcttttgaaagtatttactcctaggccaagataaaaattatattctgcacagtttacaatgccacaatgcaaaatctttatctctcaatttgaactaagaattgtacatatgtccttgccagaatcgtgtctttggtacctggttttttcttttctttttgtccttggaatatattttgtagtattttagttgtcagcaacttaactatgcattgtcctcaatctaatcacaatctctgtccaatcgtgccatgtctttgttctatattttacacatttttttagaaataaataactattaaccgctcacctgattactaagcttatacgagaggaaacattctataactttcaagttagtcgatactggaagtaattggcttctggatatttggttacaacatttactttggttgcaagaagaggggtaactttagcccctgtttcagaatactggaaagggaccgctacttaaaaatggatgcttccatgaattccatccaacattacttttcagtatgagtgacacgttggggtcagatttgaacatgattattgcaagtcaagacatcgtcatataattattccaatatcaagtatgatgcaaaatcaagggatgggaactccatctgttcaacaatcagagagctcagggtcagaaccatacaggttcagaacattgactggctctttcacaggactgctggaaaagagctatggaggttgaactgaagttaattcaagaaaatcagacctgggagattgctgatctgccaagggatcactaaggctataggactcaaatgggttttcaaagtaaagagggatccaacattagtgcgaacaattgtattttagtttagatttagagtacacttatgtatgagttgtttgacaatgcttatttatgagacattaaaatgtacttatttatattatattaattataatgttgttcaatatatgtttatgtata

SEQ ID NO: 211820 - DNA, 1035 bp, Zea Mays
ctctcctctctcacgagcttctctctcacatctcgtactgccgcatcgtcccacacgtccctccgtccatggtctcaccggcgttcccctcccccgctccccccattccccccgcattccgtccgtggtctcatgggacaagacggtgaggctttacgacgctgacgccaacgtgctcaagagggagttcatgcaccctggggccatcctcgactgctgcttccacgacgactcctcaggctttagcgccggagccgaccacaccattcggaggttggtattaagctcgtccaaggaagatgttttggggcggcatgatggtccagttcgttgtgtggaatactcttatgctgcagatacttttatttctatggatttgcttttggatttcttttctagcgtttctttttcttctgcaagatactggaaagggaccgctacttaaaaatggatgcttccatgaattccatccaacattacttttcagtatgagtgacacgttggggtcagatttgaacatgattattgcaagtcaagacatcgtcatataattattccaatatcaagtatgatgcaaaatcaagggatgggaactccatctgttcaacaatcagagagctcagggtcagaaccatacaggttcagaacattgactggtttgtttgatgcaactgaacaagtgcatcactttgagtatagtggagtgtgcatgctggcagctgatgaacctgcatgtgtggaacaggctctttcacaggactgctggaaaagagctatggaggttgaactgaagttaattcaagaaaatcagacctgggagattgctgatctgccaagggatcactaaggctataggactcaaatgggttttcaaagtaaagagggatccaacattagtgcgaacaattgtattttagtttagatttagagtacacttatgtatgagttgtttgacaatgcttatttatgagacattaaaatgtacttatttatattatattaattataatgttgttcaatatatgtttatgtata

SEQ ID NO: 211821 - DNA, 1459 bp, Zea Mays
ctctcctctctcacgagcttctctctcacatctcgtactgccgcatcgtcccacacgtccctccgtccatggtctcaccggcgttcccctcccccgctccccccattccccccgcattccgtccgtggtctcatgggacaagacggtgaggctttacgacgctgacgccaacgtgctcaagagggagttcatgcaccctggggccatcctcgactgctgcttccacgacgactcctcaggctttagcgccggagccgaccacaccattcggaggttggtattaagctcgtccaaggaagatgttttggggcggcatgatggtccagttcgttgtgtggaatactcttatgctgcagatacttttatttctatggatttgcttttggatttcttttctagcgtttctttttcttctgcaaggtacttctgcagcctgatgcagctataaatagaacacattgatagctatttttgtacttgaattccaaaaacactatatatagttatgcagttatgcttttgaaagtatttactcctaggccaagataaaaattatattctgcacagtttacaatgccacaatgcaaaatctttatctctcaatttgaactaagaattgtacatatgtccttgccagaatcgtgtctttggtacctggttttttcttttctttttgtccttggaatatattttgtagtattttagttgtcagcaacttaactatgcattgtcctcaatctaatcacaatctctgtccaatcgtgccatgtctttgttctatattttacacatttttttagaaataaataactattaaccgctcacctgattactaagcttatacgagaggaaacattctataactttcaagttagtcgatactggaagtaattggcttctggatatttggttacaacatttactttggttgcaagaagaggggtaactttagcccctgtttcagaatactggaaagggaccgctacttaaaaatggatgcttccatgaattccatccaacattacttttcagtatgagtgacacgttggggtcagatttgaacatgattattgcaagtcaagacatcgtcatataattattccaatatcaagtatgatgcaaaatcaagggatgggaactccatctgttcaacaatcagagagctcagggctctttcacaggactgctggaaaagagctatggaggttgaactgaagttaattcaagaaaatcagacctgggagattgctgatctgccaagggatcactaaggctataggactcaaatgggttttcaaagtaaagagggatccaacattagtgcgaacaattgtattttagtttagatttagagtacacttatgtatgagttgtttgacaatgcttatttatgagacattaaaatgtacttatttatattatattaattataatgttgttcaatatatgtttatgtata

SEQ ID NO: 211822 - DNA, 556 bp, Zea Mays
ctctcacgagcttctctctcacatctcgtactgccgcatcgtcccacacgtccctccgtccatggtctcaccggcgttcccctcccccgctccccccattccccccgcattccgtccgtggtctcatgggacaagacggtgaggctttacgacgctgacgccaacgtgctcaagagggagttcatgcaccctggggccatcctcgactgctgcttccacgacgactcctcaggctttagcgccggagccgaccacaccattcggaggctctttcacaggactgctggaaaagagctatggaggttgaactgaagttaattcaagaaaatcagacctgggagattgctgatctgccaagggatcactaaggctataggactcaaatgggttttcaaagtaaagagggatccaacattagtgcgaacaattgtattttagtttagatttagagtacacttatgtatgagttgtttgacaatgcttatttatgagacattaaaatgtacttatttatattatattaattataatgttgttcaatatatgtttatgtata

SEQ ID NO: 211823 - DNA, 2213 bp, Zea Mays
atcgtggcctgtagtttaactgtgcaatgaacctcgtgctgaggatgctctaccagctgatgcgacaggttcctctccacactttgggagaaagggatctgaactaggtccaactcatgttttagttgttcgtggcttagatgaaaatgctgatgaggaaatgcttcggtacgaatttgctaagcacgcaccattaaaggacatccgccttgttcgggataagtttactcatgtgtctagaggttttgccttcgttcatttccattcggtggaagatgctacgaaagctctggaagctacaaatgggattacactcgagaaaaacggtcaggttttgcgtgtagcatatgctaaaagtacacatggacctgcatcagggggctcacagtcaaacagccttgctgcagctgccattgaggctgcatcatttgctcaacagtatgatgccataggttgggctccaaaagagtacaatcctgatgacaaacagaacagtaactttgaatctcaaaaagacgatggcagtggcacagcacagtcgggatttgtttgggatgaaaaatctggttactactatgattctgcatctggattctattatgacggaacaactggcctttactatgacagcaactctggagtttggtattcgtacgatcaacagactcaacagtatgtcccttgtactgaccagagcaatactaaggcagccggggagacgtccagtgaaaacatgatctcagatagtatttgtgggaaaaaggttgtgatctctgcgcctgctgccacaattaaacaaaacaagaaaacatcactccctgatgctgttcaagctgctgcaaatgcagccctggctgcagaaaagagagaaaaggagaaggcaaaagagattaagttggcctcaaaaagtagtctcatagctaataagaagaagatgaacaatgtcctagccatgtggaagcaaaggaatcaagaagggcaggccgcacggattgtcattgatgacaaagaaccaccaaattctgatgatagatttaatcattcacatagtggaactggtttctcttcgaaaagcaagccaaattttgaatttgaaaatgctatggataattctgttcgccaaggaattgcatcgacccaaatgttggattctgatgtaaagcctagacctgtcagtaacagcttaggtactacagttatgggtgtcataagaggttctactagaggagtgatcaagtcggatactacgtttcatgcattatctgatgccgggagcactgattcccgcaccactataatcacaagatcaaatgggttaatgacaagtcctgtggaacttgtaactcctgcaccctacaaaactgatgtgtctgccttagtctctaatacttcatcgggagtttctgggagtggtaaacgtcggttttctgaggcaccagggcaatcccagtacagggatcgagctgcagaaagacggaatctgtatggatcatctcttcgcactgatgctgttggattggattcaactggtcactatccgtcccgaaagggtccaagtgagatagggtcgatgccatttcctcctggcgtgggtgaacgttctaatggtgaaattggcaacaacgaaaactatgaagttattaccgctgatagcgcaatcgacgaaagcaatgtgggtaaccgtattctacgcaacatgggttggcaagagggactgggtctcggaaaggatggcagcggtatcaaggaaccagtccaggcaaaatccgtggacgtcagggctggactaggaagtcagcagcggaaggctgatccaatcctggaggccaaagccggagacagctacaaaaccatcatccagaagaaggccatggcaagattcaaggagatgtcctagctagaccttttttttttgtatattcggttgtcgtattttgtcgtccgtatacttttttttttacaatctgtgcactgttttgcttgtgttttttttcttcacaaacctagccactgaattgtgatttattatcctcaaaggggcaccgtgtttatcttattattactatgtagttcgagacctggatgctttttttttcatgtgtgttggggttttcatttgcacgacgaatgtgcccgatcagttgctttgccacacatgatgtggcggtactgcctctacatcttatcgtggcacaggttgttttttaaacggt

SEQ ID NO: 211824 - DNA, 4083 bp, Zea Mays
actcgcgactccgcccgcctgcccagcgatagcgccatagcggcgaccggcgagctccaatatcacgcggatcggcggcggcgcccttgccccggagccccgcggcggcgcggccctgtccccgttccccgccccggcggtaggcagccccgtctcctgtcgagcgctcccaccaccccagccccggcgcccccgctcccagcccgaccgctgtatccgcggcgaccggcgtcccgaacggacgcggcccgagcgcctggctcacagaaaatctgcacacaaaactacaaaagtttaaggtcaccaagaaccttgcaggataacacaagtgctggattttggaaatggaccatgggctttatgctccacaacatggatgggagaacaacagtgtaattgcagtcttttcctttactaactactgaagatgatgaaatagcagaattttggccatgtgattggcctctgtgtatccagcctttagttgtaaaggagttcaagaagaggccgttgcttaaatggaatggatttacctgcctgttctgtagaatttgttgctgactccacttattctgttgaatctacaggcatcaaatgggtatggtgcaatcaatgagccagattttaggtctggtggatcctacaatggtaggagatctgtggatgaaggttttcctagagattcatatgggaggggtgcatactgtcaggatacacatgatagaaatatgtatgcaccaccgccatctgttggtggaatatggtctcagcctcgaaggaatcatgatgaggaatatgcaactgcaagagatcacagaaggcacaatactgattatcacaatgatggaaaacatcatgagtttgattcatacagagttgatagactccatgataattatcatgctactgacagctattatgaatctggcagtcgccctgattttggtgttgataggagcaaaaggattggaagcagagaaagtgcggagtttcatggtgagtttgaagaccggtaccacagttctaaccaaagcagagatgacagctatgagagagatcatgaatatggtcattatgattatgattcggaccatgagagaggcaggagagatagtagctggaaaagacgcgattcatgcgagagcaaacgtgaaagaagtggattaagtcgtgaaagagaggaaagtccatacatgcgccatagccgttctcgatcacatggacgtgatgaccgatcaagatcatggtctagatcaagatctcctcgtgcgagaagtcatggtcggaaccaaagagatggcctgtatgatgataatcgatttgacagaagaagggaatatgattgggatgataggaggcatggtgattcagtggtattgacatactgcatacatacatacatttgtagcagtggctttggaatttacaaaccatgagtttgcattcatgtttgcaggccccatctgccactgttgttgtcaagggactgtctatgaagactaatgatgatgacctatatcagattctttctcagtggggccctctacgcagtgtacgtgtgatcaaggaacggaattctggcatgtctcgtggatttgcttttattgacttctccactgtggaagctgcctgtagaatgatggaagctactggaaagagtggtctccaaattgatggcaggaatgtgttctttcagtacagtagtaaaccaaccggtgtaatgggtgggtcttctcctggacaagaaaatcttacaaggcctacttatgggccccgcactgttgctgcactctgtgactggatttgttctatatgcggatgtatgaatttcgcccgcaggacctcctgttttcagtgcaatgaacctcgtgctgaggatgctctaccagctgatgcgacaggttcctctccacactttgggagaaagggatctgaactaggtccaactcatgttttagttgttcgtggcttagatgaaaatgctgatgaggaaatgcttcggtacgaatttgctaagcacgcaccattaaaggacatccgccttgttcgggataagtttactcatgtgtctagaggttttgccttcgttcatttccattcggtggaagatgctacgaaagctctggaagctacaaatgggattacactcgagaaaaacggtcaggttttgcgtgtagcatatgctaaaagtacacatggacctgcatcagggggctcacagtcaaacagccttgctgcagctgccattgaggctgcatcatttgctcaacagtatgatgccataggttgggctccaaaagagtacaatcctgatgacaaacagaacagtaactttgaatctcaaaaagacgatggcagtggcacagcacagtcgggatttgtttgggatgaaaaatctggttactactatgattctgcatctggattctattatgacggaacaactggcctttactatgacagcaactctggagtttggtattcgtacgatcaacagactcaacagtatgtcccttgtactgaccagagcaatactaaggcagccggggagacgtccagtgaaaacatgatctcagatagtatttgtgggaaaaaggttgtgatctctgcgcctgctgccacaattaaacaaaacaagaaaacatcactccctgatgctgttcaagctgctgcaaatgcagccctggctgcagaaaagagagaaaaggagaaggcaaaagagattaagttggcctcaaaaagtagtctcatagctaataagaagaagatgaacaatgtcctagccatgtggaagcaaaggaatcaagaagggcaggccgcacggattgtcattgatgacaaagaaccaccaaattctgatgatagatttaatcattcacatagtggaactggtttctcttcgaaaagcaagccaaattttgaatttgaaaatgctatggataattctgttcgccaaggaattgcatcgacccaaatgttggattctgatgtaaagcctagacctgtcagtaacagcttaggtactacagttatgggtgtcataagaggttctactagaggagtgatcaagtcggatactacgtttcatgcattatctgatgccgggagcactgattcccgcaccactataatcacaagatcaaatgggttaatgacaagtcctgtggaacttgtaactcctgcaccctacaaaactgatgtgtctgccttagtctctaatacttcatcgggagtttctgggagtggtaaacgtcggttttctgaggcaccagggcaatcccagtacagggatcgagctgcagaaagacggaatctgtatggatcatctcttcgcactgatgctgttggattggattcaactttttattgattttctggaaattacctgttgtcaagctggtcactatccgtcccgaaagggtccaagtgagatagggtcgatgccatttcctcctggcgtgggtgaacgttctaatggtgaaattggcaacaacgaaaactatgaagttattaccgctgatagcgcaatcgacgaaagcaatgtgggtaaccgtattctacgcaacatgggttggcaagagggactgggtctcggaaaggatggcagcggtatcaaggaaccagtccaggcaaaatccgtggacgtcagggctggactaggaagtcagcagcggaaggctgatccaatcctggaggccaaagccggagacagctacaaaaccatcatccagaagaaggccatggcaagattcaaggagatgtcctagctagaccttttttttttgtatattcggttgtcgtattttgtcgtccgtatacttttttttttacaatctgtgcactgttttgcttgtgttttttttcttcacaaacctagccactgaattgtgatttattatcctcaaaggggcaccgtgtttatcttattattactatgtagttcgagacctggatgctttttttttcatgtgtgttggggttttcatttgcacgacgaatgtgcccgatcagttgctttgccacacatgatgtggcggtactgcctctacatcttatcgtggcacaggttgttttttaaacggt

SEQ ID NO: 211825 - DNA, 4341 bp, Zea Mays
actcgcgactccgcccgcctgcccagcgatagcgccatagcggcgaccggcgagctccaatatcacgcggatcggcggcggcgcccttgccccggagccccgcggcggcgcggccctgtccccgttccccgccccggcggtaggcagccccgtctcctgtcgagcgctcccaccaccccagccccggcgcccccgctcccagcccgaccgctgtatccgcggcgaccggcgtcccgaacggacgcggcccgagcgcctggctcacagaaaatctgcacacaaaactacaaaagtttaaggtcaccaagaaccttgcaggataacacaagtgctggattttggaaatggaccatgggctttatgctccacaacatggatgggagaacaacagtgtaattgcagtcttttcctttactaactactgaagatgatgaaatagcagaattttggccatgtgattggcctctgtgtatccagcctttagttgtaaaggagttcaagaagaggccgttgcttaaatggaatggatttacctgcctgttctgtagaatttgttgctgactccacttattctgttgaatctacaggcatcaaatgggtatggtgcaatcaatgagccagattttaggtaaggcaactggtcatttagtgttctgttaactgggatattcatgtcctttattcctgtaaaaacgtcatttttttttctctagcaagctgatatatgtttttatttggtactgggttaactcttcaacaagttctcttcttttgtgatttgtgtcatgcatttaatatttatatagtgttctgtcatattaccatatcttcccctattaacttaatttgcaggtctggtggatcctacaatggtaggagatctgtggatgaaggttttcctagagattcatatgggaggggtgcatactgtcaggatacacatgatagaaatatgtatgcaccaccgccatctgttggtggaatatggtctcagcctcgaaggaatcatgatgaggaatatgcaactgcaagagatcacagaaggcacaatactgattatcacaatgatggaaaacatcatgagtttgattcatacagagttgatagactccatgataattatcatgctactgacagctattatgaatctggcagtcgccctgattttggtgttgataggagcaaaaggattggaagcagagaaagtgcggagtttcatggtgagtttgaagaccggtaccacagttctaaccaaagcagagatgacagctatgagagagatcatgaatatggtcattatgattatgattcggaccatgagagaggcaggagagatagtagctggaaaagacgcgattcatgcgagagcaaacgtgaaagaagtggattaagtcgtgaaagagaggaaagtccatacatgcgccatagccgttctcgatcacatggacgtgatgaccgatcaagatcatggtctagatcaagatctcctcgtgcgagaagtcatggtcggaaccaaagagatggcctgtatgatgataatcgatttgacagaagaagggaatatgattgggatgataggaggcatggtgattcagtggtattgacatactgcatacatacatacatttgtagcagtggctttggaatttacaaaccatgagtttgcattcatgtttgcaggccccatctgccactgttgttgtcaagggactgtctatgaagactaatgatgatgacctatatcagattcttgtacaagttcttcataacttcttgcaccggttttaagtgtattgtctattgtctcgttcgttttaatcatttcgcctgttctcttgtagtctcagtggggccctctacgcagtgtacgtgtgatcaaggaacggaattctggcatgtctcgtggatttgcttttattgacttctccactgtggaagctgcctgtagaatgatggaagctactggaaagagtggtctccaaattgatggcaggaatgtgttctttcagtacagtagtaaaccaaccggtgtaatgggtgggtcttctcctggacaagaaaatcttacaaggcctacttatgggccccgcactgttgctgcactctgtgactggatttgttctatatgcggatgtatgaatttcgcccgcaggacctcctgttttcagtgcaatgaacctcgtgctgaggatgctctaccagctgatgcgacaggttcctctccacactttgggagaaagggatctgaactagttgttcgtggcttagatgaaaatgctgatgaggaaatgcttcggtacgaatttgctaagcacgcaccattaaaggacatccgccttgttcgggataagtttactcatgtgtctagaggttttgccttcgttcatttccattcggtggaagatgctacgaaagctctggaagctacaaatgggattacactcgagaaaaacggtcaggttttgcgtgtagcatatgctaaaagtacacatggacctgcatcagggggctcacagtcaaacagccttgctgcagctgccattgaggctgcatcatttgctcaacagtatgatgccataggttgggctccaaaagagtacaatcctgatgacaaacagaacagtaactttgaatctcaaaaagacgatggcagtggcacagcacagtcgggatttgtttgggatgaaaaatctggttactactatgattctgcatctggattctattatgacggaacaactggcctttactatgacagcaactctggagtttggtattcgtacgatcaacagactcaacagtatgtcccttgtactgaccagagcaatactaaggcagccggggagacgtccagtgaaaacatgatctcagatagtatttgtgggaaaaaggttgtgatctctgcgcctgctgccacaattaaacaaaacaagaaaacatcactccctgatgctgttcaagctgctgcaaatgcagccctggctgcagaaaagagagaaaaggagaaggcaaaagagattaagttggcctcaaaaagtagtctcatagctaataagaagaagatgaacaatgtcctagccatgtggaagcaaaggaatcaagaagggcaggccgcacggattgtcattgatgacaaagaaccaccaaattctgatgatagatttaatcattcacatagtggaactggtttctcttcgaaaagcaagccaaattttgaatttgaaaatgctatggataattctgttcgccaaggaattgcatcgacccaaatgttggattctgatgtaaagcctagacctgtcagtaacagcttaggtactacagttatgggtgtcataagaggttctactagaggagtgatcaagtcggatactacgtttcatgcattatctgatgccgggagcactgattcccgcaccactataatcacaagatcaaatgggttaatgacaagtcctgtggaacttgtaactcctgcaccctacaaaactgatgtgtctgccttagtctctaatacttcatcgggagtttctgggagtggtaaacgtcggttttctgaggcaccagggcaatcccagtacagggatcgagctgcagaaagacggaatctgtatggatcatctcttcgcactgatgctgttggattggattcaactggtcactatccgtcccgaaagggtccaagtgagatagggtcgatgccatttcctcctggcgtgggtgaacgttctaatggtgaaattggcaacaacgaaaactatgaagttattaccgctgatagcgcaatcgacgaaagcaatgtgggtaaccgtattctacgcaacatgggttggcaagagggactgggtctcggaaaggatggcagcggtatcaaggaaccagtccaggcaaaatccgtggacgtcagggctggactaggaagtcagcagcggaaggctgatccaatcctggaggccaaagccggagacagctacaaaaccatcatccagaagaaggccatggcaagattcaaggagatgtcctagctagaccttttttttttgtatattcggttgtcgtattttgtcgtccgtatacttttttttttacaatctgtgcactgttttgcttgtgttttttttcttcacaaacctagccactgaattgtgatttattatcctcaaaggggcaccgtgtttatcttattattactatgtagttcgagacctggatgctttttttttcatgtgtgttggggttttcatttgcacgacgaatgtgcccgatcagttgctttgccacacatgatgtggcggtactgcctctacatcttatcgtggcacaggttgttttttaaacggt
